United States Patent Application Publication US 2014/0141044 A1 - sequence listing, part 3

SEQ ID NO: 30 - DNA, 107321 bp, Bradyrhizobium enterica
tccacgccgatgacctatccggtcgggaccattattccagccggcgtggtgctgccgcagacggtccagatcacgccagcaccggcgctcaatcccgcgttcttcaccgccggcttctccaactacgacatcaatggcgggctcggcgttgtggtggccagcaacacggtggtcgcgcccgcgatgccggtctatcggttcacggcgaacagctatgccgcagctaccggcagcgatccgtcgtcggctctgatgctatggacgccgccgttgttcaccgcggactcggtcaaggccacgctgacgcagcgggccggtgtcagcgtaaccttgcgttcgctgctgaacggagccggcggcggcgcgatcgtggtcggccatggtgcgtcgatcaccgtcgatcccggacagagcatcaagctcgatgcctacaatcagatcacgatgaatggcaggctcaccgcgcatggcggcggcatcacgctgatcaacgagtccgacaatgtactggagccgtcgcgcaactttgacacatccggcaacggccgtgccttatcgctgtggatcggcgcggacgccgcgatcgacgtctcgggtgcggcctacacggccaccgataacggtggacggacctacggcacggtcaccgacggcggcagcatcagcctgaatggtggaaccggcttcgtgatcgtccggcccggtgccgaactcaatgccgacggcgccagcgtcaccgtcaactctgcggccgggatgtcaccaaacacacctggcggcgcgcagacgcttccgagcaatggcggctccatcgcactcagctcatcgagcgggctctatctcgacggcagcatccatgccgcgggcggcggttcgggcgcggcgggcggcagcctgtcggtctccttgcccaccgccgttttcccggccgacggctcggtcataccggctaccgcgtttgtgcccagcacgctgattgtgactcaggcgcggcaatcgctgctgcccgccgacatcgcgccggggaccgacgctgcgaagctgacgttcggccaagccacggtcagtgccgacatgatcaaggcgggtggcttcggcagattgtcgctgagctcgggcgactacatgcagtttgccggcgacgtatcgctcgcgcttagccaaagcattacgctcacggctgccgcgttcacatcggcgccgcccgtgccgggcctgcccgtacctgtcggctcgccaagcaagccggatccgtccgcaccggtcccgaccggcaacgtcttgctgtccgcgccctatgtattgctgcgcgaaccggttgcggtcgtcccggacaagagcaccagcggattgatcggcaatccaggtgcggccggtgttccgaccaaagcgagcttcgaggtcgatgccaaccagatcgacgttcaggggctgatcctgttctccgcatccgcgccgaacagcatgtattcgcccggctttgccgagatcaggctggtgagcaagggcgatatccgcttcctggccagcggcgccgcgcagaaggcgacgacgctggcgaccgactggaatctcgatctcattgccgctcagctctatcccgccacgggcgccgttgcggtcgtcaccgccgggcagaacaatttcacggctgcacagtccgatcagccgccgacgctgaccatcggccgcagcaccgacacgattcccgacgcaccgctgtcggtgtttggcagccttgcgctcgccgcacctgttgtggagcagggcggtatcgtccgcgcgccgttcggcagcgtcgtgctcggcaacaacaatccgttcgacaaccgcattccgacacaacgggtcgacgtgctgccgggcagcctgacctcggtctcgatggcgggcatgaccatcccctatggcggcaccgtcgacggcgtgacctacagctacaacggggcgagcgtaagccggatcgacgtgacgaacttcggcaatgtcggccatcagtccggcgtcacgctggacggtcaatccatcaacgtcgaaagtggcgcaacgctcgacatgtcgggtggtggcgtcctcagcggagccgccttcatttcggggcgcggcggctcggtgaatgtgctcaacacaccgttgatcaatgccaatccggccacgcctgtcagcaagcctagcgacaaggtctatgccatcctgcctggctatgcgtccggttatgcgcccatcgcgcccgaaaatggcgccggggatccggccatcggccagcagatcaccgttccggccggcgtgccgggcctgccggcaggcagctacacattgcttccgtcgaactatgcgttgctgcctggcgcctatcgcgttgaactcggcgcggccacgcgaacgccgatcaacggcgccgtcgcgatcggcaacggcacatatgcgacctcggcgtacaccggcaccagcaataccgcgatcaggagcgcacttgcgtcgcaggtgttgatcacgccgggcgcgtcggtgcggatatattcgcagtacaacgagcagggctacagcgacttcatgatcgccaatgccacgcagttcggcggcgtgcgcccgctgctgccggccgatggcaagatgctgatgctggcgttcgagccgccatcgacgacgccaccgacatcgcccgcattggcattcagcggcaccgcgctgttgcaggccggaccaggcggcttcggcggacaagtggccctgtcaggtgtagatgaaatctacgccggctcgccaacaccgggtttcgccggtgtatccgttcgcgcaggcgatctggacgcgatcggcgctacgcggatgatcatcaacggcaccgatggcatcgttaacggcacgatgctcttttccggcggaagagacctccaggttcgcgacggcgtcacgctgagcgccggcgagttgttcctggtcggcggcaatatcacgatcggcaacaacgtcacgctcagcaccatcgggcaggggcccgcgccgttcgactccacgtcccttggcgtgagctacaccacgggctccggcaccacagtgctggcgctgtcgaacggcaatctcaacttcctcggctcgaatggcggcgccggcacgatcacgatcggcgccggttcgcagctctattccgaagggacgttggcctttgccaccaacggtgcctcgagcatcgatcccacagcgcatttcggatcgcgcaacatcacgctcgcggtcggcagcatcaatatcggcgacggcggcacgattgccgcggccggtgccccggcagggttcctgttcaaccaggcgctgttcgatgtgctggtgcatggcgaccccagccatgccgcgccggcgctggaaaagatcacgttgagtgccgcgaactccatcaacctgttcggcgcgaccggcctcgacgccaccggcaccggcatcgatctggtcctgaacacgccggcgatctacggctacggcaccgcgagtgacaccgcgaccatcgcaggtggcaagatcacctggaacggcatcgccggcgcgacgccgccggcacccggggccagcgggctcgggaccggcctcggcacgctcaatctggtcgcgaacgagatcgatttcggcatggtcgcctcgctgacgtcgacgacgtccagccgggtcatctacggcttcggcaatgtcaacatgaccggcggcgcgcggatcgtctcgtccggcaacggctcgctgtacgtctaccaggcgccgagcacggcggccggcgccgtgttcggccagagcggcaccggcggcaacctgacgctgtcgacgccgctgctgaccggcgcgcagaagtcgatcatgaactataccgccggcggtgcgcttgctgtcaccgtgcccacagggctcgcgcagagcgctgcgacctccacgatatcaggcgccgagatcgatctgaccggcaacagcgtcgcgatcgccagcaccattctgctgccgagcggcaagctggtcgtgaacgcgaccaacgacatcgcgatcggcggcagcggccgcatcgatctctccggccagccctcgatgatccagaaggcgacggtctacggcttcggcggtaccgcgatcttcaacagcagccagggcggattcacgcaggcggccggctcggtgatcgacgtctccgccactaacgccagcgcagggtcgatcagcatcagcgccggcagcggagcggtctcgttcggcggccgcctcgcgggcagcgccaccggcaacaacaccagcggcgacttcagcgtcaccgccgcgagcatgagcagcaccgatttcgccgcgctcaacgccctcctgacgcaaggcggcctgttcgatgcccgcagcttcgacatcaagagcggcgatctggtgatcggcgacggcgtcaaggcgcacagcgtgacggtgtcggtcgatggcggcgccctgactgtcgccggcacgatcgatgccagcggcgcggcgcccggcacgatccgcctctcggccggcaacggcttggcgcttgcgtcgactgccgtactcgatgcccacggcacggtgctgcaaacggatagctacggccagccgatcgaagccaagaaccgcggtcatatcgagttgaccgccgccggcggcgtgctcacgctgtcgcccggcgcgacgatggatctcaccgcgccgaacggtgtcgcctatggcgacgtggtgctgaatgcccagcgcaccggcgagacctccggcgatatcgcgatcaacgccgcgggtccgctcaacatcaagggcgcctatagcatcgcgctcaacgccttctggacctacgatctgcctggcggcagcaccatcacccaggccacgctcgacgggtacgacaccgcgagcacggccttcatcagcgcggcactcggcaatgcaggattgtcggcgcgtgttgcggggctgtcggcgtacggcagcgcctatcatctgcggccgggcgttcagatcacctcgagcggcgacctgtcgacctcgggcgacatcgacctcgcgacgtatcgctacggcgccaatgccgatcgcgatccgaactcggcgacctatggcgccggcgaagcgatggccctcgtgatccgggcgggtggcaatctggccattcagggaagcatatcggacggcttccggccggccacagatgctccggcgctgtattccccggtggccgacgtcaccgcgagttctgctttcagacaggtcggcaccaactatctgctgagcattggtgggaccgtgaaaacggccaccgcctggactgttccaacgacgtggggattggtgctgcccttctatccgagggacccgagcggccatcgctatgccccggggcagacaattccggccggcactactctcagcttcctgtacattccggccaccaaggcatcctccgtcggcggcgtattcagctcgccatcgggtcccgcccttccagccgcacagggaacgtcggcctgggccgtcatgctgccgagcggctcgcaatcggcatcgctgcgcttgacggcgggcgccgatctcactgccgccgaccaacgcggcttgcaaacggtgggtgcgctgagcggcgcgggcaatctgacgctcaacgatcccacctatggcaacttcggccagggcaccttctacagtgtcgttcgcaccggcaccggcagcctcgagttgctcgccggcggcagcttcagcgaagcgaccccgtatggcgtctatacggccggcacgcaggctgccccggttctggtcaacggcagcaatccctatgacctgatcggtgcgctgcgaagcaacatcacccatgcctggtatccggagcatggcggcgatctgctgctcgtggcgcagcaggatgtgacgggttacatcgagaccgccccggtacaaaacaccttacgcaacaccaacacggatcggatcgcgaactggctgcaaacccagggcggtggcgggctgacgccggatccgaccgcatggtggatcaatttcggcaccttcgccaagaccgacgcggctgcaaccggcgcctccctcgtcggcttccaggggatcggtacgctcggtggcggcaatctgacagtgatcgcaggccgcaatgccggcgcatccggcggcggcgccgcaaccacctcgaccgggctcgatcttgcggtcgcgtcgagcgggcgggtgctgccggacgggacggtgctgcagaccggcggcggcgatctgacgctgaacgtcggaggcattctcaatccgatgagcccactcaccgcgtcgggatcctactggccggattatttcgggtcggtcgccgatctgcgcggaaacaccattgttcgcgccgggtcggtcggagctgtgcttccaaacgggcgaggtggcggggcctcgtcggtcgatccgcgcacgcttgatccatccaccttcaaggattcgatcaagacgctcggcccgacattcacgccgggcgacggcagcgtcagcatcacgacgcgcggtgacctcgtgatcagcggggcgagcgaccccggcatggccgcgccggtcgacgtgaatcgtggcctctatacgcggtttcaggttaacgcggacggatcgttgacgccggtggtgagtaccggcgggctgaccaatttcacgctgtggacgtcggccactgcgatcaatctctactcggcgggtggcgatgtggcaccaatgtcgggagacaccggcggcaagcagaacgcgaacggcttctatccgggaacgctgatcgttgcagccgccaacggcgacattcgcttcagcggcggatcgatcgagatgatgccgtcgcaatacggccagctggaattgctggcggcagggtcgatctacgggcagggccaggtgttgtcgatgtcgggcgccgacatcagcgcgctcgcgacgccacggcatccggtgttctccaccagccgagggaacaccaacgcgtcgccggacgggatttaccgtaccaacaatttcaacccgctcgccttcggcgaagacacgccggtctccaatctgcaccagggtgatagccagcccgcgttggtctatgccggcgtcgacatcgacgatctcagccttggggcggcgctgcccatggtccgcagctccggcgccggcttctttccccagcacggcacctggtatctcgcggccaagccgttcgaggtgattgccggccgcgatatcgtcggtcttggcgcgacgccggatgtgttcttcaacaccggccccaccagcgtttcgctgatgcaggccggtcgcgacatcatctaccagtcggtggatgtggttggtccgggcgtgtttcagatccaggccggccgcaacctgtaccagggctattatggtacgctgaccagcgtcggggatgtcttgaaccctgccaacaatgcgggcggcgccgatatcgcggtgctgaccggtgtcggcgcgaacggcccggattattccgatttcgccaaacgctatttcgacccggccaatcagctggcaggcaacggcacgccgctcgccggcagcggcaaggtggtgcacgcctatggcgccgagctgttggcatggttgcagaagcgctacggctacaccggaagcgcggccgacgcgctcgcctatttcctggcgctgccgagcgagcaacagggcgtattcgtccgccaggtcttctatgaggaactgaccctcggcggccgtgagtacaacgatgcgaccggaccgcgctacaagagctatctgcgcggccgcgaggcgatcgcgacgctgttccccgaccaggacgcccagggcaacgcgatcaactattcgggtgggctgacgatgttcagcggctttgccaaggactacctgggcaatatctatctcgccgatgccggcatccgcacccagtacggcggcgccatccaggtgctgaatccgggcgggcggaccatcctcggcgtggaaagcgtcaccccgggcgcgggctccggcctgatcacgcagggacgcaacagcccgatcgacatctattcgctcggcagcatcctgctcggccagagccgcatcatgacgaccttcggcggcaacattctcgcctggtccgccaccggcgatatcaacgccggccgcggctcgaagaccacgacgatcttcaccccgccgctgctcagctacgacagctacggcaacgccacgctcgcgcccgccgtaccgtcgagcggcgccggcatcgccgcgctcgcgaccatcccgggcaccccgccgagcgatgtcgacctgatcgcgccgctcggcaccatcgatgcgggcgaggccggcatccgcgtctccggcaacgtcaacctcgcggcgctgcaggtggtcaacgccgccaacatccaggtgcagggcacctcgaccggcgttccgacggtgcaggggccgcccgtggccgcgctgacagccgcgtcgaacaccgccgctgcgagccagcaggccgcggcgccaccgccaaaggccaatgaccagccctcgatcatcatcgtcgaggtcatgggttacggcggcggcagcggtgaccagacgcagccggaggaatcgccggggcagaagcgtcagcggcgtgacaagcagacctacaacgagaacagtgccttccaggtcatcgggctcggcgatgcggcgagctcgtccggtcgatgacggcgagggcgcaagatcgcgacatgggaaaagcgacggcgcgatgcaaattccgctgtcgcggggagcgcgacgggtcgcgcgcggcgcgggcttgcgatcggtgattacttgaccgtcaggtgcacgtccggcgctgcccggtcgggaacccatcccaacgcaaaccgctggccggcaatgatctcataggtcgagagtttcgatgcgactgcatcgcgaaacctcagataggcgtcacgctgccgcccgccggcgcgggcggccgccaggttgagccatttgtaggccagcacaaaatcggtcgggacgccgtgtcccttgtcgtagatcaggccgagctgggcttgcgcgaacgggtcgccctgcacggcgccgcgataatagagatcggcggcagcggcgtaggcctgcgggacgccgaagccgtgctcatacatgaagccgagcatgccgagcgctctcgggttgccgcgctcggcggccggcgcgagctcccgagcggccctgacataatcgccgtgattgaaggccgccgcgccgcgcgcgacgctgtcggcgctcgcagcagacgcggtgatggcccaaagcacgacggcgagcgaagccgcaacgcctgtccgttgtgcgagtccgcggcgcatcccgttgctccgctcagtgatagctggtggtgatcggcgcattggtcgttgtcgtggcgatgctgccgcgcaatttcgatcgcagctcctcggccacggtctgggcgtcggagccgttgcggatgatctgcgggcggatgaagatgatcaactcggtgcgctgggtgccgttgctctgatgcccgaaggcatcgccgaggccgggaatctggtcgagcacgggaagcgcgttgcgggcgccgctctgctgctcgctgatcaggcccgccagcagcacggtctggccgttggcgaccgagatctggctcttgaccctgcgctccgacaccgtcggcgtcaggttcaccgtgctgctttgcggaacgttgctgatctcctgctcgatatcgagccgcacggtgccgttgacgctgacgcgcggcgagaccttcaggatgatgccggtgttgcgatagtcgatggtgttgaccaccgtattgctggtggtcagcaccgtcgcgctgccggtcgacaccgggacgacgtcgccgacctgcaaggtcgcgacctggttgttgatcacgaccagcgacggattggagagcaccttgacgctggtgacggcatgcagcgcatccaggatgaagctcggctgcgtctcggacccgaccaggaagttgaagcccgggaaggcccggttgatgaaggcattggtgaccgagccggcgacggaagcgacgccggtggccgcatccgtggtggtcgcgggcgccgtggtggcctgggtgccggtgaacgagcccatgttcggcttcaggccgaggctccggctggtgagataggtctgcacgccgtaggacagggtgttgttgagcgtgacctcggcgatcgtcgcgtcgatcgcgacctgcagttgcggctcgtcgatctgcaccagcgtcgcctcgatgatgcggtagttggcctggtcggcatagatcaggagattgttgttcacgacatcgggcgtgatgcgtacgtcctgcatgacgggctggccgttgcccgagcccgacgcgccgcggccggcatccagcgcattgttgccctgtccctgattgttgggattgttggactgtccgccggcgccgaatccctggccgaggccctggcccgtcgcgcctgtccccgacgtgccgcgcgatgcgaagccgcccatgctcgaattcgcgccgccgttattgttgagcgacaggcggtcggcggcgctcgaggtcgacgaggtgccggagccgggcgcgagctggctgtcggcactgtcgagcagattgccggacgagccgccgaggaacatgtcggtcagcacccgcgcgatctggcgcgcatcgccgtatttgacgcggtagacgtggaccgaggtgcgcgcggtgtcgttgcggtcgaggcgcttgatccaggtcgcagccgtatgcagcatgtccggcttcttggtcaccaccagcacggcgttgaggcgctggatcggcatgaacttgatgacgttctggctgaggccgttctcgccggaatcgacgatcttctccagctcggcaatgaccggcgcgggcgagccgctcgagatcgggaagatgccgacggactggccgcgcatccagtcgacgtcgaagctgagcacggtatcgaccgcggtgcggcgctcggcgccggtgccctggatcagcagcaagttgcgcgtcgtgtcggcgcgaaccgagccggcccgggtggcgaagctgtcggtcagcttcagcagggtctgcgccgacacatattgcagcgggaccaccgagatgccgaatccggcctcgggattggctgccgcggcatcgacgcggccgccgccgacggcgtcgccgagcggcgtcaggcggtagcccgccgtatccttcatcagcacgacgccgctcaggcggagtgcgttttcaagcacgaagaccatgtcggatttcggcaccggtcggaccgacaccaggctcaccgtgccctgcacccgcgggtcgatggtgtatccgacatgcaggatgtcgccgagcacgaccttggcgacggtcgccaccggcgtgctctcgaaattcagatcgaagccattgccgttcgaagccggctgcggccgcgcatccgccaccgccgtgacgtcgcttccgtcatacatcgccgcgcgtacgctgccgctttggctgccgctcgtggccgccagcccgctcaccggctgcggttggcgtggcaacaaatccagcgaccgcaccttgtcggtgacgtcgacctgggacgcgtcgacgctctcgctgaccgtcgcggaattgcaggacgccagcaaccccaatgacgtcaatgcaaaaatggctgcgaggccgccacggatcgtcgggcagcggcccactgtgcctgcgcgttgcatgaaggcccttcgctccgactaactgaaaaatcgatggcttgcgacgatcggtcctaccccgggaggactcttatcgatcgaacatgacagaaataaattggttacatgattgtcgttcgcgcaccgccccaccgcatcgcaccaacatcgagctgcgctcgcccggtcgtgtccgcggtgccacgtcgaggcttgttgagcgaggcgaacgacgccacttcgcacagctgtcacacttcggatcgataaccgcagaaccgccggagccgaacgcggcggcggatggcacgagctgatccgggatagtgtggcgggatatcgagaatggccaacgacctgtccgttcggttcgtggattatctgcgtcagaacaatcacctggcgccgatcgacggggtagtcgagcggaccgggccgggcgccgatgtcaggcagttgaagttgtgggaggtcaccagcctctcaccgaccgaattcgccgacgaggcggcacgtttcttcgcgctcggccgcctggcgctgcaggacatgacctcggccgaaccgctggtcagcgcgttctcggcgcgcttcctgcgcgagaccatggtctatccgtgccgggccgccgacggcaccactgtcctcgcggtcgtcgatccgaccgaccaggcgacgctgcgggcggcgcagatcgtgctcggcgccggcatcgatgtgaaggtggcctcgtcggaagacgtcgtcatcgcgctgaacaacgcgagtgccgaggaggccgaggcgaccgatacgacgtcggcgctgcctcgcgaggacgacatcgagagcctgcgcgatctggccagcggcgccccggtagtacgcgcggtcaacgatctgatcgagaaggcggtcgagcttcgcgccagcgacatccatatcgagccgttctcggccggcctcatggtgcgcttgcggatcgatggcctgctgcggccggttgcggcgctgtcgggcgtgctgccgcaggcggtggtctcccgcatcaagatcatcgccaatctcaacatcgccgagcgccgcctgccgcaggacggcgcggcgcggctgcgggccgggcgtaccgacatcgatattcgcgtcgcgatcatgccgacccagcacggcgaatccgccgtcatccgtatcctgccgaaggatcgcggcctgctggtggtcgaaaagctcggcttctctgcgcctgacgagggcaagctgcggcgcctgttgaagcttccgcatggcatggtcgtgatcaccgggccgaccggcagcggcaagaccacgaccttggcgaccatcctgtcgatcctcaacgagcccagccgcaagatcctgaccatcgaggacccggtcgaatacgagctgcccggcgtcaaccagtcccagatcaaaccggcgatcggcctgaccttcgccaccgcgctgcgctcgttcgttcgccaggaccctgatgtgatcatggtcggcgaaatccgcgacacggagaccgcgcatgtcgcggtgcatgccgcgctgaccggccatctggtgctgacgacgctgcacaccgagaccgcggctgccgcggtgccgcgcctgctcgacctcggggtcgaaggctatctgctgcggtcggtgttgcgcggtgtgatcgcacagcgcctggtccggcaattgtgcgagcgctgcaagacggcgcggccgctggcagcggccgatttcaccgaggatccccggctcgccgcgctcggcttcaaggccgaggagatcatccaggagccatgcggctgcgagcgctgcggcggtaccggttatcgcggccgcctcggggtgttcgagctgctcgaactgtccaatgaactgcgcgagctgatcggagagcgaaccgacggactgaagatcgatacgatggcgatccgggcgggcatgaccacgatgctcgacgacggggtcgccaaatgccgcgccggattgacctcgcccgccgagatcctccgcgtcgcaacggtgcggtgacgccgtgccgaattatcgctatcgcgctctgacccaggccggcgagatcgtgaacggcacgatctcggcgccgaccgcggcggaggtggcgcggcgcatcgaatatctcaagctgctgccgatcgagaccaccgaggacaagcgcgccgccggcgccggcggcggccgcagcctgttcggcgggccgagtgccgccgaggtcaccaccttcacgcgcgacctcgcgctgctgctcaaggccggtgcgcgtctcgacgatgcgctggagctcctgtcgggcgatgccgatgtcgggcggatgcgccctgtggtggccaagatccgcgccgccctgctcaccggcgagagctttgccgatgcggtggcggatcatccggccttgttccagccgatgtacatcgccctggtccgggtcggcgaaatctccggcacgctcgattccgtgctggagatgttggggaccgagcgcgcgcggtccgagcagatgcggcgcaagctgaccgacgcgatgcagtatccggccttcgtgctggtcgcggcatccggcgtgatgctgttcttcctgctgttcgtgctgccgcaattctcgaccgtgctgggcgatttcggcggcaagtcggacaccgcgctcgccagcttcatcgcgctgtcggacttcctgcgcgccaatgccacggcggcaagcctgatcggcgcggcggcgattgcgctcgcatggtggctgctgcggcaggcgcgggtgcgcgccgcgctggtcagcggcatttcgcgggtgccgggcatcagcagcgccttccagttctaccgcgccagcctgttctgccgcaatctcggcgtcctgctcggcagcggcgtcaacctcacggccgcgctgcgcatcctcgtcgacatcatggcggtgaccgggagcgaggcgaactggaccgcggccgcggaccgcgtccgtcatggcggcaaattatccgaagcacttgcggtggcggacagcctgccgccgatggcagtccgcatgctgcggctcggcgaagagaccgggcagttgccggtgctcgccgggcgggtggcggaattctacgaagctaaactgcagcgcagcctggaccgtgtcgtcggcatcgtcggtccactggcgatcatcacgattagcaccgtggtcggcgggctgatcgtctcggtcatgacggcgctgctctcggtcacgcagctagtcggttagagcagaggtcatcggtcatgatatcgcgcaacagcatcatcgaaactttttccatgcgagcgggatacggtcgcgcgcggtcgcaaacgccgcggcgttcgggcgaggcgggcttcaccctggtcgagatgctggtggtgatcgcaatcatcggcctcatcatggggctgatcggcccacgggtcctcaattatctcagcgagtccaaggtcaagaccgcgcgcattcagctgcagagcttctccagcgcgctcgatttgttctatctcgatgccgggcgcttcccgtccacggcggaggggctcgccgcactggtgcggcgcacgccgggggtcgccgcctggaacggcccgtatctcaagggcggcaacgtcccgaacgatccctggaatcacccctacgtctatcgttcgcccggcgagcacggtccttatgacatcgtctcctatggcgccgacggtcaggagggcggcagtggcacctcggccgatatctcgctcgagaagagcacggccgccaacaacgaccagtaaggatgcacggcgcgcatgaatgacgcgatgcaacgcggctttaccctgctcgagatggtgtgcgtgctcgccatcatcgcgctgctggcggccgtgctgcttccgttcattccgcaccagacgtcgcggtcgcgcctgcaggcctatgcgctgcagaccgcgacgctgctgaaggccgaccggaatgccgccatcgagcgcagcaccagcgttgcgaccctggtcgatgcaccaagccgcgtgatccattcgggggcgtcgcgcattaccgtgcggatccccgatgacgtgcggttcgatgccgtgctgccgcagagctgtcagcgccgcgcggccctgtcgaccatccgcttcttcgccaatggcgggtcctgcggcggctccatcgcgctgacgcggctcgatgccggatatgaggttcgcgtcaactggctcaccggaagggttgaaatcgttgcgcgcgacgtcgccaccaactaaccgcatggaagcggggttcaccatcatcgaggtgctggtggcgctggcgctggtggctgtctcgatcgttgcgatcggcgccgtcatgggcgtcaagatgcgcggggtgcgggccatggaacagcacgtggcgctgatgcaggcagtgcggacgttgatgacggtcggcattccgccgcgcgccgaattgcagtcgggcacgtcgacgggacaggcggaggggtaccgctggaccatcgaggtcagtccgctcggcggcgactggaaagtccctgatggcaacgcgccctgggccccggagctggtgcgaattcgcgtcaaatcgccgggcggtgcgctgtccgacatccgcaccgtgcgcctgatgccgaggtctgcggaatgatccgggcagggacagcacagcgaaccagtgagcgcggcttcacgctgatcgagatgatcgtcgcgctggcgctgatggggctgttgctgtcggcgctcgccggcatcaccggggaatggctgccgagctggaacaggggactcgaccggatccagcgcagcgaactgatcgggatcgcgctggagcggatcggcgccgatctcgccgcggcggaattcgttgccgccaaccgcgatacccgcaagccgctgttcgacggatcggagctgtccgtgaccttcgtgcgcacctcgctggggccgaatgcgggcccggggctcgacgtggtgcgccttggcgaggtcagggatcgcggcgagttcgtcacggtccggtcgcaggcgcggttcacgccgctggccgacggggtgtcgctgtcggagcaggtgcatctcggcagccccgtggtgctgctgcgtgcgccctatcggctgtcctttgcctatgccggtgccgaccgggcctggaagaacgcgtggaaggatgccgagcggctgccggcgatgatccggctgaccgtgcgtgacgcggcgagccagcgcgtgttgtcggtctcgaccatcgcgccggtccatgtccaaatcccgagcgactgcaccaagccggacggcaattgcggcgacaagggcagctccaatgttccgaccgatcaggggaagacgtgatgaacgcgcccggcaacagcagccgatcgccggccgaccgcggcttcgtcatcgtcgcggtgctctggatcctgctggcgttgtcgtcgctggcgatcatcttctcggcctatcttgccgcatcggcgcgggcgctggcggcgagcgacatctcgctgcagaccgaggcgctggtgtcggccgggctcgagctcaccgcctatcagctgacgctcacggatgagaagacgcggccgcagcacggcgcgtttcagttcgggctggacgatgccagcgtcggtgtcaccttcacgtcggaagccggccgcgttgacctgaactacgcatcgaaggagatgctggtcggcctcttcgtcgtgctcggcgcaagcaaggatgcagccggcgaatatgccgaccggatcgtcggctggcggacccggccaacgccgggcagcgagaatgtcgaggtcgcgcgctacaacgcgctgggctattcgccgcggcaggggctgttcacccatgtcaacgagctggcgttggtcgccggtatccccgaagcctttgtcgatcgcgtgctgccgttcgtgacggtgttcaacggcagtccggatgtcgatccgaaaatcgccgcgccggaagtcgccctggccgtgaacaaggcatcggggaaggatcaggacggcttcgggtcggctgcgccgtcgccgaacgggaccgtcgcgggagcgcaggccccgagcccgcaaagtgcggcctcgactgcgcagagcccctgctaccggatcgcaatctctatccgcttccgcaatggtcaccgcaccacgtccgaagcggtggtcgcactcggcgacaaggccgagccttatcgtgtgttgtcctggcagaacgatcttgaaccgagaagcccggttctgttgcgcgggagaggatgatggcaatgcttgccgaagcacggcaatggttcgagcaatggatcggcgcggtcgcgacggccgttgacggcgtggcgggcaggttcatgcaccggcgcagcgtcgaactcgacgagaatgccgacggcacgttcaccgcccgcctcgcggcgtcgaaggacggctcgcctttgacgccggcatcgttccggctcgatcatgatgcgccgcagccgccgttgtcggcggactggaaggcggcgctcgatggcagccgcatcgaggtgcgattgcgatcggatcaaatcgtcagccgcgtgctcgatttcccgagccaggcggccgacttccttgacgggatgatccgcgcgcaggtcgatcggctgacgccatggaccgccgccgatgcggtcttcggctggggttcgccgcagccggtcgccaacgatcgtatcgaagttgcgttcagcgccaccgcggcggccaaggtcgatccgttgctccggctggccgggatgctcggcgccgcctccgttgcggtcacggcgccggcagtcggcagcgatggcacgccgcagcaggtgacgttgctcgaccggtcgctgcgcggccttgctggccccacggttccgcgcctgctgcgcatcgccctggtttcgacggctgccgcggccgcggcctgcctgctgctcaacatctatgtcggcggatggctgcaatccgagcaggaggatttgcagcaccggatctcgcagcgccgtgccgcgctgcgtctcgatgccaatggcgatacgtccggcctcggcctcctggccaagcgcaagcagacgacgccgtcgagcgtcatggtcctggaagcgatctcgcgcgtgctgcccgacaccacctatgtgacggagcttcgcatcgagggcaacaaggtgcaggtggtgggactgacccaggatgcgccgtccctgatccggctgctggagcagtcaccgcaattcacccgcgcgacgtttttcgcgccgacgacgcgggccgcgaatgaatcggcggagcgattccacgtcgaggccaacatatcagcctattttgggtccggctcatgagcgcagcttcccgatcgctgaccgcggtcagcacctcgccactggtcgccaccgcgagctatctcggccttttcgtgctgctgctctttgtcgtcatctcttcgctctcggacctcatcggcctgcgcagcgatgttgcggcgtcggccgggatgctggagcaactggaggggcgatccagggcgaagactgcgcccggcgaggccgccatgccgaccggttcggcctatctcgaaggggcgacggtcacggttgccggcgccaccttgctgcaacgggtgtcgggtgcggtgatcaaggccggcggcaacgtgctgtcgacgcagctcgacgttcccaacgcgccggccaaggccggcttcatcagcatggtggcaagcagcgaaatcgagcaggcgcaattgcagcaggtgctctacgatctcgaagccggcatgccgttcctgttcatcgaccagctggtggtgcaaccggtcgccgacgaagccgccaagggcggcgatcccggcaagctgcgcgtgctgctcggtgtgtccggacaatggcgaggagccaaatgatgcgacgccatgctgcgatcatcgtgctgctcgcgatgtcggctcatgccgcgccggccgcggtgccggaccggtccggcgatgcgctggatgccggcctgctcgacgagacccgtctcgggggaccggtgttgaattcaccgccgccctccgaatcggtgacgtcggttcgggtcgccccgtcgccggcggcgacgccgcggccgctcagtgctaatccgttgtggggcattccgctgacgacgctgtccaacacccgcgaccgcccggtgttctcgccgtcgcgacggcctccgcccgccgtcgttgcggaacccgaggtcagcaagcccgcgccgccaccaccgcgcaggatcgcgaccgagccgccgccgctgtcgctggtcggcacgatctcgggagatgatgaaagcttcgggatctttctcgatcaatcgaacaagaccgcgctgcgcctgaagatcggcgacgacttccagggatggaagctgcgaaccatcaaggggcgcggagccactatggagaaagacgaacatggggccgtgctcacattgccccaacccggcagcgatgagggcggcgaagcccgcctcgttccggtcagcaccgagcggaagccgttggccgcgcggcgccagatgtaagggcacgtcccgcaggagccaaagcatgatccggaaaagtgcgaagcggttttccgaaaagatcgtgctcaaacaaaggtctaaagcgcgataatgattcaaccaaatctcatcgcgctttagttcagcgcaagccagttctgaagtgccggcgtcagcagaagtccgagcgcaagaaacgggccgaacgggatcgatgtctggcgtttcatctggtgtcccgcgagctgcatgccgccggcaacaccaagtgccgcgagcgccgcgatcagcagcagggtcggaatccccgacgcgccgacccagatcgatgcggcggcaagaaacttgacgtcgccaagtcccaggccgtccacgcgccgcaaggcgaagtagagtcgctgcaacagccagaacacgatgccgacgagggtggcgatcgccatcgcagtgaaggcggctgttgcactttcagtgacgacgacgttcgcaagcccgagtgctgcgatcgcaagattgagccagtcgggaatgatgccgtggcgaagatcgatcagcgcgacgccgcagcagagcacgcaaagcgtgccgtaggatgcaatgaaataaagcgcttcgtgatcgatctgcatggtgacgggacaagtgtgacgcgtgaacacattgtgttgcaacaacttgcgtgggttgaacagtccattttcaattgatcagcagccgcgtgatccgcttgcgggattgtgaacgtcatcggcgatgacgaaacagaaaagatgcgacaaaaagtctgcgctgtcacaaatccgcataggataccgacaatagttcgctccgctatgtgccgcgagcccttcgcggcagacgagtgggttgactatgtacaagatgcgagtggcggcgtgcctggttttgctggcagcgtcggcaggcgtgcgtgccgcgcgtgcaggcactctcgaggacggtgccgagcgttatcggccgtatctgatcgagggcgtcggcagcgcgctggcgggcgcgcgtgcgctgcgtgaacgcgccgcggctgcggatgtgcccggtgcaaggaaagcctggttgtcggcgcgcgccggctgggagcgctcggaggtgttcaccgcgggcttcgtgcccgagctcgatgcacagatcgacgcctggccgaacgcggacagcgggtttcacgccatcgaggccaagctgttcggtgctgccagcaccgacgttgcgaccgatgcgacgggcctcgtcgagcatttgaatgatcttcacggcaagctcaaggacatcaagctgacgccgcagggcctgctggacggcacagtgcggctcgcctacgaagtcggcgagagcaaggccgatggcggcgagtcgcgcatcagcggcacctcgctggacgacatgcgcaacaacatcgccggcatcgacttcgcctatcacacgatcttctccgccgcgctcaacacggtggacggcaagctcgacgagatggtgacgaaccgcatcgagcaactgcaggcgatcgtcgccacgccggacctgccccatgtcaacatcgccgatctgcgccgcaccagcgaggaactcgtggtcgcgttgcagagcgccgcggccaagctcgggctgcagcgcccgaccctggaggcgcaggcgcgatgacatcgttccaccggcagctgggcgcgctgctctccggcgtcatcgctcttgcgttgctcggacgtgccgcggcgtttccggtcgacggcgacaagaccgtgctgccggtcgcgaccgagctgaacgaggacgcgctcgacaagccgcgcgaggtgttccagtcggagcggaccggagccaagtcttatctggtgaatctcggtgatctggcattcaactcgccggggctgctcggcgaggtggcgcggcaggccggcgtgagctgcggcacctgccatgtcaacggtgcgaacaacgccaagttcttcatgccgaagatgtcgagccggccgggcacgttcgacaccaccggcccgctgttcaatccgaaggccaacaatctgtcgttcgatccggtgcgaatcccgagcctgcgcggcgcgcgctacctcgcgccctacggcgccgacggccgcttcgcttcgctgcgcgacttcgtccacaacgtcatcaccaatgaattcgccggacccgagccgtcgccggccacgctcgatgcgatcgtggcctatcttcacgacatcgacttcctgcccaatccgagtctcggtccagccgggcggctggccggcaagatcaccgacgcggagcgccgcggcgaagcgctgttcgcaaagccgttcccgcacgatcctgcgctcagctgcgcggggtgccacgttccgtcctccggcttcgtcgaccaccagcagcacgatgtcggctcgggcggattgttcaagacgccgacgctgcgcaacgccgacttcaacgcgccgtacttccacgacggccgcttcgacaattatggccaggtggtcgatcatttcgaccggacctttcagctcgacctttcggcgcaagacaagggcgacctcgtcgcctatctcacggccgtcggcgatggcgtgcagccgtatgaacgcgatggggccggtgcgacgctgaaggagatcaacgatttctcgacggtgctcgcgaccgcgattcccgccggcgacaaggacatcgtcgcgctggcggtcgatacgatcgggcgcgagctgcgcgaattgaccgagcaatatcccgatcgcaagaataccagcgtgtcgggcggcgaggagcagcgcgtgctcgcgcgcaacgggctcaaggagctcgtgctgacgttgcgccgtatcgagatggcggttgcagcgggccgcaacgccgacgccgcgaccgagttcaggaattatcgcaacctgatggctgcggcggtacctgcgttgctggccagcgccgagccgtggtcgttgttcaatcaagacgtgcatgaccagcattacgccgcactgcgcgaggtgatgcgctccaggcacatctcgcactgatcgacttgtatcgttgtggatctgcgcaacgcgccgttgcgtgaattgcttcggcgtttctcgctcttcggttgaagagttgtctccacagaaaatctttcaacgtttcgaaatttctcgcgcgctttcacgttagcgaaaagcatgcgtcatactgtcgcactaagcaatgggtgttgctaaccgcaaacaccctgaggtcgacaatgagtctgaattacaaaaagcactggcgaaccagcaccgcgctctccatcgcgtcaacggtgctcgtcgcaacagccgcatatgccgctcactacccgggcggccgcagtgattgggacaggcgttcgcatcacaatcacaaggtgcacgaagaagccgatcgtgcgaagcacgaaaaccatgaaaatcacggtgacaaggatcacggcgacaagggcaagaccgcgtcgccgatcaagcacgtcatcattctgatcggcgagaaccgcggcctcgatcacaccttcggtgtgtacaagccgaagggcaaggggcagaccatctccaacctgttgtcgaagggcatcgtcaacgaggatggaacgccgggaccgaacttcgcgctggcgcagcaggcctcggtcgcgggtcagccttcgtattacatcggcgcgcccgctatctcgaagtcgccctacaacgcgaccaacctgatgccgcagccgaacaccaacggcacgccgaccgcgcagagcgacacgtcgcccccgttcaagacgattgccgaggccagcgtcgaaaaggacatggacccggccgatctcgacatcctcaccaccggcttcagcggcctgccgaccggtgtgctggatacccgcgtgcccggcgccggcggtctgaacggaccgttcccgctgcagggtgagcagatcagcgacgacgactacaccggcgactcgacccatcgcttctatcaggattggcagcaggaagactgcagcgccgccaacgccaccaagaagaacaattcgggctgcctcaacgacctgttcccgttcgtgatggcgacctattcggcgtcgaacaagagcatggccaactcgatgggcttctacaacgcccagcagggacaggccccgatcctgaagatgctggccgatcgcttcaccctgagcgacaacttccaccaatcgttccacggcggcaccggcgccaaccacttcatgctcggcaccggcgacgcggccttctggagcgacggcaagggcaacccggtgacgccgccgtccaccctgatcgccaatccgaatccggtttcgggctcggtcaaccgctacaccgtcgacggcaactggagcaactgctcggatgtcttccagcccggcgtgaagccgatcgtcacttatctcaacaatctgccctacgcggcggagccgaactgcaagcccaaccactactacatgctcaacaacgtcaacccgggctatctgccgaacggcgcgctgtcgggcggcaacaacgttccgccgtcgtcggttcgcacgatcggcgatgcgctgatggagaagaacatctcctgggcgttctatggtggcgcgttcaacgacgccgtggcgctctccaatgccgcggttgccgccaatccgtcgaaccccaacctcagcgccgctgcggtcgccgacccggcgcacgcgctcggtgtcgcctactgccagatctgcaatccgttccagtatgcgacctcgatcatggccaacccggccgtgcgtcaggcccacttgaaggacactgccgatctgatcacggcgatccacaacaacaagctgcctgcggtgtcgttcggcaagccggacggtctgctcgatggtcatccgcaaagctcgaaggttgacctgttcgaggcctatgtcctgaacgtgctcagcgcgctggagaacaacccggagctgaaggctgatacggcggtcttcatcacctgggacgaagccggcggctactgggactccggttaccagcagtcgatcgacttcttcggcgacggaccgcggattccgaccctgatcctctcgccctattcgacgggcggcaaggtcaaccacaattatgccgaccacgtttcgcttctgaagttcatcgaacgcaactggggcctccagccgctcacgaaccgcagccgcgacaacctgccgaacccgagctacgcgaagaacaacgagtatgtcccgaccaacagcccggcgctctccgacctgttcgacgcgttcgacttcagcaagccggtgacgctgtcctacaccgaatgatcgggctctcgtcctgaacgaggtcttgaatccatccaaggccggcgccgatcgaaccattggttcggtcggcgccgtcattttctgcctgccgatcagccgaacgaccggggatatgcgatgactcgcgacgagaacacgtacaaggggcgcagccgcgtggcggccagcctgttcgcggtcgccatcctggccgctgcgccgatgcccgccacggcgcagcaattctccgctgacctcgtcgcgcggaaagacgacaaggcaaccgcgatgggaacactgcgtgtctcgggcggaaaagcgcgcatcgagaccgtcgcgctgcccgacggcttcttcctgctcgatgcggcgaggcccaccgcctatttcgtccggccggccgcgcacgtctacatggatgcgatgcaatcgagcccgctcacccggctgttcgtgccggtcgatcccgacgatccgtgccgacaatggctggcgatggcgcagctatccgcgccggtcgatctcgcgacgtggcactgccggcacgatggacagcaggccatcgcggggcgcgacaccgaactctatcgaattgccggagcgtccggacaaagtttcacaggctggatcgaccgcgcgcgcggctttccagtgcagatcgagaccgcggatggcacggtaatatcagcggatcacatccgggacgagccgcagccggcgcaaagcttcgacattcccgcgggcctgcgcaagttcgatccgcaggcgctgatccgccggatccagcagagcgacgtatgggtcgagccgccggccgcgcagtgatgggctatgcgctactgtgattgcccgctcgtgaccggcaacatccggccgagcgcggtgtagtgggcttgatgcacgttgctgttgaacagcgaccacggctcggccttcttcaaggcgacgggaacgtcgaaattcacaagctgggcgaatctgcgatactccgtcatcgcctcgtcgatatggccggccgcaacttcgaggtcgatgcggcgcagcgtgaggacgaggtctttgaggatcgcacgcgccgccagccgctggtccttgccaccgatcgaggtgttcctgatgtcggggatgtgctcggtcaattcgcgcagctcggcgccgaccccggtcacggccagcgacactaccgcggtatcggcggccgggatcgcggcctcgagcacgctcgagagctccagcacttccttcatccggagcacgacgccgtccttgtcgaacggacgttcgccgtcgccgaccgcattcagataggccacaaggtcctgcacgtcctgggtcgacagttcgaggtcgaacacacggtcgaaatgctcgaccacctgctcatacgtatcgtagcggccgtcgtggaagtacggtgcattgaaattggcgttcagcagggtcggggtcttcaccagcccgcccgatccgacgtcgtgacgcacctggtcgttgaaagttccccccggaatgtgacagccggcgcagctcaactcggcctgcttcgggaacggcttgaagaacagcgcctcgccacggtgctcggccacgcttgcctgcgtgccgagcctgccgccgggcgcgatcttcggattggggaggaagtcgatgtcgttgatataggcgacgaggccgtcgagaacctggtcgctcggccgcggcccggaaaactcgttgacgatgacattatagacgaactcgcgcaacgaggtgatgcggccgtcatgtccatagggcgcgaggaagcgggcgccccgcaggctcggaatcctgaccggatcgaggatgctgttgaacgtcttcgcgttgaagacgaggctggtcgtatcgaaggtcccggggcgcgaggatacgcccggaacgaacagcttcgggttcgatgcgccgttgacgtgacaggtgccgcagctcatctcggcctgacgggccttgccgccgaggatggagggcgagttgaacgcgaggtcgccgagattgaccagataggactttcggccgccgatcgcctcggaatgaaagagttcgcgtggccgcgccagcgcgtcctcggcaaattcggtgccggccggcagcacggtctggtcgccgccgagcgggaacgccgtcgcgcgcaatggcagcagggcaacgacaagcgccagcaacgcgatccgcaccggtccgacgccacgatcgccagatgctgaacgacattttccggagccggacgccagaatatcccaaaccatcgctagaaaacgccccttgtcacaatgcaaatgtgccgccctgcgtcggaagatgtcacggaggtgacagtttcctgtcggcagcatcaatgaccatctgtttggatagacgactgttgattgcggtttgatgacgatcgatcaacgtcccgcaggccgagctgtatgtgacggaaagaaaaatgatcggcgcgcttgcaccttttcacgcgtttgcgcacgcgtcgaaaaacggtcatcccagcgaaatgtgttttgcatagcgtgtagctccatttctatttctttctaaaatcaggagagcactatgcggctttggggagccattccggcgctcgcagttgttgctggcgccgttgccatctcaccggcggcaaacgccgagaatttggtcgaaaagatcgttgatgaattcaagcacgaggtcagcgacgagctgcgtgagctgcgcgaccgcggccatgagggcgtgcatcagtacaagcatatcgtcgtcatctatcaggagaatcacagtttcgataacctgtacgggcattggggcgatgtcggtcgtgaccacctcaacggcacctccgacgccgatcaggcccacacgctgcaggtccggcaggacaaccagaccgtctatgcctgcctgttgcagaatgacctcaacctgacctcaccgtcgccgcagccgacgacctgcaccgacaatacgggctcggtcgcaatcctgagcgcgttcaagaacaagccgttcgagatcaatgacttcatcccgacctcggcgaccacctgcccgaagccgctcggtgccttcgcggcgcacggcttcctcaacggcaccggcgcgcccggcggctgcaccgaggatatcgtgcaccgcttctacagcgagcagtaccagctcaacggcggccggcagaaccgctacgtgaccggcagcgacgcctcgggcctggtgatgggctattacgacaccaagaagctgccgatctacacctatctgcacagccacggcgcgccgaactacgtcatcgccgacagcttcttccagggcgccttcggtgggtcgttcctcaaccaccaattcctggtcgcggccgcagcgccgcaattcgtcggtgccttgaacgacggcagcgccaacgacttccactcgatcgtcgatgccaacggcatgccgaccagcacgccgctctacaagccggcctccaccgtgaaggacgcgcaactgacggccaagtgcaaccagaccggcctgccggccggcctcgcctgcggcgactacgcggtcaacaccacgcagccgacctaccagccctattcgccgggcacgcccgacatcaagcgcctgccgccgctgcatacgccgaacatcggcgatcggctgtcggccaagcatgttgactgggcatggtattcgggcggttggtcgaacgccaatggtgatgtcggcgcgtccggctggaccaacggcaacggcaccacctgcaccgatccgaaccataactcgaatgcggtgttcccgaactgccccgacgtggacttccagtaccaccaccaggcgctgaactacttcgccaactatgcgccgggaacgcaggcccgcagggatcacctgaaggacgaggcggagttcatccaggcggccaagaccgggcggctgaagcaggtcagcttcatcaagccgatcggcgaggagaacgagcaccccggctacaccagcgaatccgagggcagccagcacctggtcgatctcgtcaaggcgatcgtcgaagggcctgacggcaagaacacgctgatcgtcatcacctatgacgaattcggtggacagtgggaccacgtcccgccgccgccgtacaaccgtcatggcgccgaagccaaggctgcggatcagtggggccccggcacccgcattccggcactgctgatcgccaagcgcttcaacaagtcgggcgtcgcgcatgaggacttcgacaccacgtcgatcctcaggctgctcgagaagcgcttcgacctcgagccgctggtgacacgtccggtgcgcagcctctcggcggcgctgaaggccggcgaaggctggcattgatacgagagatcatcctggcccgcgccaacaatctagcgcgggccaggaccttcaccaggcttcagggcctttacaggatcagatcgtgctgcacatgcgtgacaggatctgaaatgatattggcggtcatcgcagcgtcttccggactcggcgcgaatggcgaggcgtgtgtcccggtgccggcggcctggatgtcaacctgaaggctggtcgtggcggaatggccgcccttgtcgacggcagatacatcgaacagaagatccgtgctcggaatgctcgtcttctcgtcgtaggtgatgttgttgaccgtgaaggtggggtggccagcttccgctcgatcatagtcgatctggacctgagtgaatgcctttccgacgtagagcgtgtacgcctgcgtcgcgttgttgaaggtgaaggtatcgatcagtgacgtgttcgacgtttcctgtaccacgatgccggcgcagccgctgcctggtttgggaacgcagatgctgaagtcgtgaacgcaggtgctgccgtcgagtaccttgaaagtcagagttgcagtgccgcaaccctgccagtgagcgagagtaaaatcgacctgcgattgcttctcggtgaatgcgagattcagccgctcgccgggatcgatttgctggccgcaatcgccgaccgcgatgccgtcgctcgatgctttgacatcgaggggatgaccagcgcagtcggacccggtgatgacgagttgtgcgtccggagccgtgagttccatcgagccgccgtccgaggcgccgaaatcggagcctgtcacggtgacatccttcaactgctcgaccttctcgaaattaaagcaataggtgccgttcggattgatcaggagtgcaaagagcggatcgctgagctcaccgcctgaatccgtacggtaggcgtccagttcgacgccgccgctgaccgcatgggtcgaatagtagaaagtgtagtcatcgcaatgtccggtgacatgcaccgaggtgacactatcgccgaggctagaggtcgcgaggtcatatcccgtgctgccgacctcgccgttgtggatggcgacgtgcattgcggcatcaccatctgcgccgaaattgacatcgtaggtgccggtcgcggcctgatcgtcgtgagcggcgatgacggtcaccgggaagccaccaattgtcggactgtcttccctaatcgacagctgcttaccgagatcaatactcgcgctctggaagttgccgtccttgtccgtgatggtcgcgatcaagcctatggttccggcagtcagcgacacggtttcattgtcgtccgggtcggtgccgcgcggctgcgtcactgcccgatactcggtgaaggtcacaagccccgtggctggatcgagcgtgatggtaaaagccagtgtgccggtcgtcgtgccgacatggccctcgatggcgttgccgttcagcaccagcacgtcggcgcaaccggtgtgcgaatcgatcaggcccgacgcagcgccgttgccgccggtgatcgtcagtgcgtaactgatggtcgcgccatccgcgccctgaaccgagctgaatgccctggaaaagtcggctgacgtagtggtcaggagcgcatccggcgcggacccggcaatgttatcgtcgagtgtcgtcgcagtcagatgcgtctcgctcaatgtcagagatggagttgtgccgctcgccttgatgctcggaccgtcgtccgtgatcgtgagctgcttgccaagatcaatgctcgcgctccggaagtctgcgtccttgtccgtgatcgtcgccaccaggcttatgagaccggcgtccagcgccagagcttctccgctgtccggattgggaccgagcgggtgcactaccgcgcggtactcggtgaaggtcacccgtccggtgatcggatccaccgcgatggtgaacgccagcgtgccggtggccgtaccgacatggccctcgatggtattgccattcagaaccaacaagtcggcgaggccggtgtgggagtcgatcaggcccgacgcggtaccgttgccgcccgtgatcgtcagcgcatagctgatcgtcgcaccatccgcgccttggaccgaggtgaatgccgtcgagaagtcggcagaggtcgtcgtcagcgtcgcattgggcgcagagccggcgatgttgtcgtccagcagcgttgccgtcagatgcgcctcactcagcgtcagcgaggggactgttccgcttgcgctgatgctcggatcgtcttcgacgatgaccaatctgctgccgagatcgagggtcacatcctgcgagatgccagccttcgtcacggttgcaatcagggttacgatcccggtcgccagtgacacggcttcgttgtcgtcggtgttggtgccaggcggcgccatcgccgaccggtactcggtgaaggtcacgagccccgtggccggggcgagcgtgatggtgaatgccagcgtcccgtcagccgcgccgacgtggccttcgacggtgtcaccgttcagaaccaggacgtcggcgaggccggtgtgcgagtcgatcagccctgaagccacgccgttgccgccggtgatcgacagcccgtagctgaccgccgcgcccgccgcgtcctgtgcgctggcgaacctcaccgagaagtctcctgtaatcgtggtcagcgcgacgttcggtacggagccagcgatgttgtcgtccagcgccgtcgcggtcagatgcgtcgcgctcaacgtcagcgacggtaccgttccgaacgtcagcttgggcggcgtcggtggcggcttgaaagtaatgatgaactgggggacgaccgtcggcagcggtccgagctgatacggcgtctgcgaagggtcaggctcggtgaaattgatcggttgcagcagcggcgaaccttggtaggtgggtgcgctggagccttttgatcccgttcctctctccagattggcgagcgtctcctgttgcgcgtcgcgcaattcctccatgtgagcagggctgttcgtgaggtggttcacgctgaccgaagaccctcgcttggtcaggatgatcgtctctccggggtcgtcgacgatgatgtgccgggggatcgcctccttggtcaccagctcgaacacgccgtggtggaggtccttgtagccgatggtgtcgtcgtccagcagcgtgacgtccggctccgcagcccgcgcgttgtccaggagcgcgaaggtcagcacggcgaatgtcagcatgccgaggccgctggccctgacggtgccaacaggcgtctccgccgtcagcacgcctgcccccgtcagcctgctgccaatgatccggaagaagcttctggctttcgcgaacaggcccgagccgccaccggggtcctgcgcgaaatcgcccagctccaaccgggtgccgggcggcagcctgagcagcgtgccgtcgatcaagcggatctcgacctgtccgccggtcgcgacctcgatgacgtcaccccggcgaacgggatcgccggccacgacctgcacggcaatgccgcgcgcacgcgcgatggtgccgcagccgatcgccgtctgaacagtgccgatcacccggggctgctgacctgaaacggccatgcacgcgttcccgggcattacgccggaagcgaccaatattggcattttcgcccgctcaacagctcaggcggaaggtggtgccgcagttttttcgtctggcttgctttcgtcgcgaggaaaaaaacctcgcaccggcagccataggcttgcccgccgaaacgtcctgattgaaaccaaatacggtagtgaaaatcgaattccagcactgcgagaaccgaccgcgaaaacagcagaacagctgtctcttatcgcgggggtgcagccccactggatttatagtataattatcgagtaaattgtccatatattaatttttattcgaattgcgtcaggcctttaggcctggttgcagcaatgcgtttggcactcaaggtcctgcggtctcggcccggcggttcggatctccatcgcgccgcgacacgacaagatcttctcgaaagggaggggatcgtgcgcatccatttggttattcacttgctcgcaagcttcgtcttcgccgttacgctcgcaaccttcatgccggtccaggtgcaggcgcaagccgggccggcccaacccgcggtcgacaattcctcagcgaagtcgatcgggaaggtcgtgacggccaccggttcggtcacgatcgaacatgcgagcgcggtcgtcgttcaggccgcgctgtccgatcaattgccccaggcgaaggttggcgaccccgtctatatgggcgacacggtacagaccggagccgatggacgggtcgggatcaacttcaccgatggcacctcgttcaatctgtcgagcaacgccaagatggtcatgaccgagtttgtgtacgacccgaacggaaaatcgaactcgaccctgttcaagctggccaatggaacgttcaccttcgtggccggcaacatcgcgaagaccggcgacatgaagatcgacacccccgccgcgacgatgggaattcgaggcaccacgccgcgtatcgaaatttccgacgatggaacggtgaggttcgcgacgctcgtcgaagagggcaagagcaagctgctcaggaagcccgcgacacgcgtgacgccgcagtccgagccgaacacctaccacaggttcaatccgaacatttgtcgcggatgctaggcgggcagggcgttggtcttgagcggctactcacggacatcggtgacgctgcgtcgtcaaaaaccggagcccgacatgaagcctcgtgcaggctcctgtgggagtcgcggcctgtcggcggtcttcatcctgctgttgctcgtaacgccggcgggcgcgcagaacgcgaagcaaaggggcagctacctgcgcaatatcgagctgtgcagcggtctcgatcacacgccggccgacgcgcgcatcggtgcgtgcacggcgctgatcgatgcaggcgaggacatgacacaggccggcctcgcgatcgcctacaacaaccgcggcaacgcctacgccaccaaggaagactatgaccgcgccatccgggattttgatcgatccatcgagctcaatccaacctacagcaagccgttcaacaaccgcggcgtagcctatgtcaggaagcaccaatacgatggcgcgaccgacgcgttcgatcgcgccatcaagctcaacccgaactacggcgaagcctttgccaaccgcgccggtgcctatctgaaaaggaacgaatatgcccgcgcggtgcaggattacgatcaggccattcgcctcgatccgaaccttgacggtgtatggagcggacgctgctggagccgggccattcttggcgcgttgcaggaggcgctggaagactgcaacaaggcgttgcaatcgggggcggccaatgctgcgacctacgactcgcgcggcctggtctatctgaagacaggcgagcttggcgcggcgatcgacgattacagctccgcgcttcgcatcgatccaaggctcgcaagcgcgctctatggacgcgggctggcgaagctgaagcagggcgacaaggccggcggcaatatcgacatcgcggcggccaaggcgatccagggcagcatcgccgacgatttcacgcgctatggcgtgcaataggcgagccgagccgatcccgcgcgaagcaagcgcgggcgaaccggggtctggtcgctccagctgaagcgggatgagtattggttgaatcggcttggcgtcgtcttgcttcacctctcccaagggagaggtgaagcttcgacgccgtcccagctcaacctaatctcatcaggctctagtcggtgatctcgaccgtcgccgagcggccggcgaccagcgcgatgcgatccggcagatggtccagcgcgatccgcaccgggacccgctgtgcgagtcgaacccagctgaaggtcggattgacgttggcgagcaggttcgcgccttgcccgcggtcgcgatcctcgatccccgccgcgatgctctcgacgtgcccggtgagccggaccggctcgcccatcagccttatctgcgccttgtcgccgacgcgaatgcgcgccagcttggtctcctcgaaatagccttccacatgcagcgtatcgctgtcgaccagcgccatcacgcccttgcccgcggtgacgtaggcgccgggccgcaggtccatgttggtgatggtgccgttcacggaggcgtgcacctcgctgcgatcgagattgagctgggcgacggcgcgatcggcgaccgcctggtcataggcggccttggcttgcagctgcgtggccagcacctgttcctgcttctgctgcgacaccgcatcggtggtcagcgaattgtagcgcctgagatcggattcggcctgatccagcgtggcgcgatgaccggcgaccgccgcgtcggcctgctgcaacgccagcgcaaagcgcgcgcgatcgatccggaacaggatatcgccgcggtgcacctgctgattgtccttgaccagcacgtcggtgacgaaaccggatacgtcgggagcgacctgaaccacgtcggcgcggaccctgccgtcgcgggtccacggcaactccatgtagtagacccagagcgcgcgaccgacggccagcgcggcgacaagcgcgatcgcggtcaacgcgacccggccgagccaggcgaaattccccttcatggcagaaactccgaaagataaacgacgccgccgagcaggcagacatacagtgcgaaattgaacagcgcgcgatgccagaccagccggtagaggccgaagcggcgcatgatccggctcaccagcacgctcagcgcataggcaatgacgagccacagcagcagcgcggggaccagaactccgtagatgtcgagctcatatctcatgccgcaaaactctcctcgggctgcgatcggtaggcgggcgcatccggaaacaggccgcggcggatgccgacgaggccgagcaacgcatcgtcccgcgcgcgctcattgggatccttgacgaccgcggtcaccgccgcgtcgatgcatgacagcagctcggccggtagcgcctggtccgcatgggcgcgaaacgccgccgcgaggtcatccagcatgtggtcgatggcgcgcacggtcgatgcggcgaggccgtagcgggcgcgcctgagatcgatgatgttgagcccgatgcgcaactggaccaggctgtcggtatcgcggcggtcgctttcggagatgaaggcgatgcgctgcaccaacagcccgagccgatgcagcatcaggccggcaaactgcgcgcgatcgccgcggccgcgccgctcggccgcgaccgccagcgtctgccagctcgacgtcgtcagccgcttggcgatccattcggcgccgacgccgcgcgcgatccgcgtcacgatctccgcgatgacgacgccgaggaagaaggcgaccgacgtgttggcgaagctggcaaagtccgcggtgtaggtcgattgcagcgccagcagcgtcgcggtgttggcggcgagcgccatgccgatcggcgaggttttcggccgcgcgatcaggaagccgtacagcaggaaggtcggcgccagcgcggcgatcagaacctcgacatgggagatgcccggcaccagcgcgaactgatagatcgcgaccacgacgatcgcgaccagcgagaacaggccgaaggcccggatgctgcgtgccggctcgtcctgcgcggcgaagaaggagcaggcgaccgccgccatcatcggcgccgaggcgccatcggcccagccggtggcgatccacacgccgcagcagatcaggatggccaccgcggtccccgcggccgaccacagcgccatgccgtggtcgcgatgacgaaccggcgccgctcccgactccggatggaacgcgagctggacggtcgagatatcccggcccgcggcgatcgcatcggccaccgcgcggcagtcggccgagatgtcgatgaggtcgcgcaaccgcagcagcaggctgatcgtgaggatgcgttcccgcggcgcgaggccgtcgagcgcagacagccgcgcggtgaccgtcgcgcggatctgttcgccggattgccgctggcgatcctcgtccacgatccatgcggcgacgtcgccgatcaggcgctggagttccggttgccgttgcagcgccatcttgccgagcgcggcgagccggtcttcgatcgacgtggcaatcggcagcagcatcagcatgcgcagccggacctcggcgagaccgcgcacggtgccggtgtcggccagccggtcataggcgagatgggtcgccagcgtatcgatctcgacgatgtcggtcgcgaggcggaggcgttgggcccggcgcgtctcgctggtgccgtgatcgagcagcacgtcgcgggacaggcggcgggcatccgacagccagctcctgacgcgaccgcccaccgccggcgcgacgctgcgcggaaacaccacggtcgacaccaggcttgcgcagatgatgccgagcgagatttcctcgacccgcgccagcgcgatatcgaaaatgcttcccggctcggcgacggacggaaagccgatcaatgcgacggtgtatccgcccagcatgaagacatagctgcgcggcgttccgtcgagcagcgacagatagagacagagcccgacccacagcgcgatggcaaggcagagcagctcgggcgcgttgacgaggttcggcaccatcgccaccgtgacggtggcgccgatcaacgttccgatcacgcggaagaacgccttcgagctggtcgcgccggccagcggctgcgacgtgatgtaaaccgtcgccatcgcccaataggggcgcggcagatcgatcgccaatgcgatgacgagcgccagcatcgacgcggcgaacgtcttcaacgcgaagatgaggtccgcgtggcggaccaggaacggctcttccgcgcgcatgactatcgcgcctctgcagtcgatttcgcttgagcggtcttgacttgagcggtcttagcgtcctgcggccggcttgcccgctgctcgatgcgctggagcgtctcgaaggttaccgcaagttcctcgctgccgatatccttcagcatgctggcgcgcacccggcgcagcacccggttggtctcctcgaccttggcgtcgccggccgccgtgagatgcagcgtcttggcgcgccggtcggtcgggtcctcacgacgctcgaccaggccttcagactgcagcagatcgatcagccgcaccagtgaaggcccctctattcccagttcgtcggccagcacgccctgacggacgttctccccgtgccgcgacagcaccagcagcgggatggccgtcgcgtaggataggccgtgatcggacagcgcctgatccgacaagcgacgccagatccgggcgagcctggtgatcaggcggccgatctcggcgtggatatgggattgcgacggaggcatgcaaattagataggatacaaactattaggctgcaatcatatatcccggcgatcacgcaaaagcgatcgcaagcggccccgcagcctcgttccaggatggagccgggccggttgcgctcaggaacctcgttccaaacgcgccgttggcgcgtggtgcgatcgtccgcgcgagacatcggcgcaatgaggcggccgcagcgccatttgcgtaaggagaacacgatgggattggctcaatacgcggtgatttcagccggcgaagaatggggcgtcctgcacgacggcaagctcaacgccggatacgccaccaaggaagccgcattcgagtcggcggccgccgccgcgtcgccggcgatcaggctgggacatgaagtccatgtcagcgtacccggacgcgaagaaggtgacgcggcgccgacgaagcagtcggcttagtccggtctcagccgaagtcgcacatcagccggctccagtcctcgcccgcgaggccgccgacatagatatcgccgcgcacgatggcgtcgttcacttccggaacacgcgtcaacgccatggcgaaggcgcggtgccggaacacgagccagcgctgcagcccgagccctgccatcagagccggttgtgcgcggccgcgggcttcgaggtggccggtgtcctcgaggtggcggaacatcgcaccgagcacgccaacctcccgaccgggaagcgacaggatgttgaggacatgcgcggtccgccccggagacgcgtagtagacaaagcagccgatcgtcgcgctggtatggtctacgatcgcgcggatcgtgaatgcgccgagcctggtgttctgcgccgcgaggccgacgagccagccgagctcgtcctccgaccagagcggccggacagcgtagtgggcaatgaggcggggcgcgtgggcgaggaagtccgggatggacatctcctgcaccttcaggccggcggggctctcgaggtcgccgccgcgcaggcggcccaggaaagcgtcgacgggacgcgcgagcgttgccaggccgggatcgatccggcgcaacaagcgcggcgaaagacgtccgagcagtgcgcccaacggacggaaggtgcgcacccactccaggttctgcatcggaatggtctttccgccgatggccatcagggatctggcgctggtcggcgatgcactgtcacagaacgaaagactcgcctttttcggtcgcaggccaagattgagctgggccgccccggcggagtccctgttcgtcatgaagacgccgagcagccgccccgggatcacattgccgcaggccatgaagcgcatcgggacggagagcagcgcgctcgagatcaggccgtcctgctgctgatagatctgggtgcccgcagcctcgctgtaggacggcgacccgagggtcagcgcgtgcaaatagcccttgagatcggtacttgccggcttgtcggtgcccctgaagaccttgaggaagaggccggcgaccgcaggaacgtcagccgtggtcatcggcctggcggcgcccttgcgtgacgtctgtgcgttggcctgggcgatcggttcgggctgttgactcgggtgatccggcgagatcgacagaccgtcgtgcgggtggatgagccggaccgctgtatcggacgttgcgctaagcatgattcgccatttcgtctgctgccgcccaattgcgacagcaccgtcggacgacaggatcaaatgacagccgacaacctcgagccggtcgacatcacgcgagcatgacaatttcagaactgctccgcgcaggcgtgcgtccttgccgcgactctccagcgagacgcgtgagccgtcaacaagttcagcttgtggaggttaattcgttaacgcggtcgccgccgtcggcaaggcttcgatcggcggcagcgacgcgcaggaggcgatcttcgcgcaggcgccggcgtgcttcggagcgaggtcgaaaccaatcaaagattgttttcttcatagttgcgccgcacgcaaccagatcggagagctcaagacggagagccgtgccagtttcggctgcggggccggacaaggagcatggtgctcctgatccgccgcggcgatcgccgttcggcgggtgtccggtgccccgtgatttagtcggcagagactgccggacattccaagggggcaggccatgaccaagtcagtgcagattgagaccgggatcgccgatgtcgcttacctcaagaccaaccgatacaggctatgtctcgccaagaaggtgaacggcatctacaacgtcgtatggcagtcacatggcgacttcgtcgccatcaatagcttcagttggatgaccccggtctatcaggtgttcggcagcacccacttccagacctcagcccgggtcgtggtggacaccaatctcgtggcggcctcgcttggcgaacgcgtgatcatggatcaggccgggcatattggaccggccgagcccggcgcggactcccatagcatcactttcgttaaccaggacggccccatccatcccggactacagtccggttcgatcggtcccggcggcaatcaagtcatcacaccgatttatctctatccgcagtccgttccggtcggcaccgtcatgttcgcgccgatcgagaaggtgcaggtctggttcgcgcagaacctggcgacaggcacgatcatcgatgaccacgttctcaacgcggtcgagatcgacctgacgacggtgaattcggcggcccgtcgctaccagaatggcaactggttatgatctcaatctcaatttgatcaatttaaggttgctgaaattgcaaaaacaaaagttaaaattgcgctgcgtgcaaccggtcgagagagcctgaagaagcgcaccatgccagttttcggccgcggggccggacaaggagcatggtgctcttgatcctctgcagggatcgctgttcggcgatgtccggcgccccgtcgttcagccggccgaggccgccggttatgcaagggattaggcaatgaccaagtcagtccaaattcagattacaaaagaggcgctcgaaactctcaagggcaaccactacaagctttgtttcgccaagaaggtgaaggacgtctacgacgtggtgtggcagtccttcgacgaatatctcgataccaataccttcagctggactcccgtctatcaggtgttcggcaccaatactttccagacctcggtgcaggtccaggtatcgaccaacgtcgtgaccgcgacactcaaccagcaagtcaccatggacgcggccggcaatctcagcgacgccgtgaccggcggttctgccgacgccgtcaccttcgtcaacaattatggtctcatccaccccggattgaattccgtgtcgaccggccccgacggcattcagcggacgacgccgatctacgtggcgcccgatgcaatcgaaaccggcgcggacgctctgacgccggtcgaaatgctccaggtctggttcgcgcaggatctgaccacgagcaccatgatcagcaaggatgtcagcaaggccatcgagatcgacctgacggaagtggattcagcgacacggctttatgacggcagctggtccaccccgtcggccctggaatccggcgatcccaagacgtacctgctggtcacggtggctgtggtcgggaccgtggtcgccggcttgttggcgaccaagatcggcacctatctgaccggcgtctaccagaagttcgcggtcaatgtgaatcccagcgcaagcagcttcacgatcacctacagtgagacgcggggactcaacgccgtcgatcgtcagcacctggcgttgttggcgagtgatcccacgacgaccgacaccctggtcgagttcgtgatccgagcgctggctgccagtggttgcacgttcagctcgatcagcaccaaagtgccggcctgaaccggcgcaccgacgtccccgcgcgcgcctcctcgcgccagtttgacgcgcgaggcaagcgtgccggctgtcccggacatggcgacctcgctataacttcacgccgggacgtcggcctcgttcgttgtcagcattgcgtcgacgccggcctggaccagccggcgccggcgttacggagcgttggggagccggcggtccaaccgcgacagaggaagcgggccggcaggatcccgccgtcaagagtgagccgatcacatgcggggcaacaaccgaacatccacgctcgcgcgtggaagtcggctggcggaagcaatgcttctgcggggatggaataagcagacggcgctcgcggaggcgcttggcgtcaaaccgagtgcggtatcgcgatggctgaagagcggatcgctgtcattcgagcacgcggtggcgctctgcgaatttctcgatatctcgctggactggttgatgttgggccgcggcaagcctgatatcgaggaccggcatgacaagcgacccgaaccggcgatccagacgagggcgcgcgaggcgctgcggcaattcacggcaacgttgccggagatttttgtcaccgataacctgtgcgaaaccgacggagcggcgaccgccggacaggagagcggcgtcaatgcgggcagccatgggatcatcgaggtggcgctgcgcaacggcagggtcctgcggctgcccgaatttttcacgccggcacgcgtggcgcggctggtggaggcattggaggagatcgcgcgatgacgtccgaagacccgtcgatgaccaaatcggtgaccgtgcagatcgccccgggcgatctgcagattctcaaggacaacggttacacgctgtgctttgcgcgatgcgtcgagtatagctacagcgtgacctggcaatcgttccccgattatctcgccagcaacactttcgcctggtcggagcaatttcagctgttcgggaccgacatcatcgatggcgtcgcgcgcattgagagccgaaccaatgccgtagacatcgcgctcggccagcaggcaaccctcgatgccgtgggggtgctcgggcctgcgagttcgggcggaccgcccgaacagatcacgctcatcaacgattacggaccgattcacccttcgctgagtggtgcgtcagtcggaccggaccgcgtggtgcgcgtcacgccgatctatgttgcgccgagatccatcgttcgcggatcggcctcgctgcgtccgctcgacaaggtgcagatctggtttcaacaagactttaggcccggcgtgatgctgttcaacgccgtttcgaatccgaccgtggcagacctgacccaggccggttcggtgacggtgctctatcagaacggcaactggatcaatccggcgccggcatagctgggtaaacgtccgccgcctatggatcaagctcagtatcccagtagagataatcgagccagctttcgtgcagatagttcggcgggaacagccggccgttgcgatggagctgatgcacggtgggcgcgtagggcgtctgcttcggaaacatcttggcctgctgcggcgtcagattgcccttgcgcagattgcagggcgagcaggcggcgacgacgttctcccaggtggtctggccacccttgctgcgcggaatgatgtgatcgaaggtgaggtcgtccggcgacaggcaatactggcaggagaagcggtcgcgcaggaagacattgaagcgggtgaaggcggggtgcgtggtcggcttgacgaaggacttcagcgatacgacgctgggcaactggatttcgaaggaaggacttcgtaccgcgcggtcgtaatattcgacgatgttgacacgatcgaggaacaccgccttgatcgcgtcctgccaggaccagagcgacagcgggtagtaactcagcggccggaagtccgcattcaagaccagcaccggccaaccgccttgtgagacatgtgcgttcaaataacgctcctgactcccattagctgcgaagcagcatgcactcacatactacaggcagcgtgacgggattgtgaagagcgatgagcggcttatccgccatcccctgccatgttcctgccccgattgcctcccgcccgcggggcccgtaaagggagccgcaaggcctgtcggccagtgacggaccctgccgatgaccaccaagtcgagctatctcgaagcgccgcgccggttgcgcgcgttcgtgcgcgcgcacgagacgagcctggtggtgctggcggtcctgatcggggccataggcggcctcgtggtggccgtcatgggcatgctggtctccgtgctgcatgccgtattgttcaatctgccctatggcgaccggctgtcgagccagccgagtatcgatccgctgcgcgcgctgctggttccctcgatcggtggcctgctgctagggattgcgttcctgctgctgcttcgagtccggccggcccgcgagatcgacccgatcgaggccaacgcgctttatggcgggcggatgtcgttccgcggcagcgtgatcgtggcgctgcagacgatctggtcgagcggcgtcggcggctcggtagggctcgaggccggctatacccagctctccagcggcctcgccgcctcgctcggccgcggtttccatctccgccgcaacgaccagcgaatcatggtcggctgtggcgcggcggcggcgatcgccggtgccttcagcgcgccgctcgcgggcgcgttctacgctttcgaacttgtgatcggcggctacaccccggcgagcctgaccccggtcggggtggcggcggtgaccggctatttcgtcgcccatgccttcgagccgctgccgctcggggtcggcgtcggaaccgtcggcgacgtgctcgggcgggatctggcgatcgccacgctgctcggcatgctcgcggcgctgaccggaattgcgatcatgcgcggggtgacgctgtgcgaggcgctgctcgccaagacccggctctggccgccgctgcgcccggcgctcggcgggcttgcggtcggcgccatggcgctgctgaccccgcaggtgatgtcgtcgggccatggcgcgctgcgcttcgccggcatcgtggcgatgccgctcgccttcatcgccggcgtgttcgtgctgaaggcggtggcctcgatcatttcgctcggctcgggcttccgcggcggcctgttcttcgccacgctgttcatgggcgcgctcggcggccggctgttcgccgccggcgtcgacatcgtctggccggggctcaatctcgatccgaacgcctatgcggtgatcgggatgagcgcgctgtcggcgtcggtgatcggcggtcccttgacgatgtcgttcatcgcgctggaatccaccggcaatctctggctgaccacggcggtgctggtcgcggtcatcatctcgaccacgatcacgcgtgagctgttcggctattcgttcgcgacctggcggctgcatctgcgcggcgagaccatccgcagcgccgccgatatcggctggatccgcgatctcacggtcggcaagatgatgcggcaggacatgatcacggtgaacgccgcgatgccgatcgcggcgttccgcgaggaattcccgctcggctcgaagacccaggtcgtcgcggtcgacggcgaggggcgctatgccgggctcgcgctggtcgccgaagcccatgcgccggatctcgaggccgacaaggggctcgccggcatcctgcgctacgccgacgtggtgctgcatcccggcatgaacgtgcaggaggcgatcgcggtgttcgacgcggccgaagcagagtcgctcgcggtggtcgaaggcgatggcgaccggcgtccgatcggcctgctcaccgaagcgcacgcgatgcggcgctacgctgaagaatccgagcagcgccgacgcgaggcgatcggcgagatttgattttgctgtcctcggtgtcattgcgaggagcgaagcgacgaagcaatccatctatccccgagtttggcatggattgcttcgctgcgctcgcaatgacggcgtcgacgcggtccttgctgtcgaccgcgacggaggcgacgacggtcaggctccagccatcggggagctttgcgaagttctcgacgacgcgttagcgagctcgccggcgccgaggatggtcggcattggctgtcccctctcttctcgtcattccggggcgcgcgcagcgcgaacccggaatgacggctgactataaaagcctcgccaccggcccgacgtcgcgcggcagcaggctggcctcgatcgccttgatctgcagcgcgagatagcgcgagttgatgcggcattgcgcgaggctgccggcgatgaaccacaggccgggctgcggcgtgcgggtgtacatgttgcgcagctcctgcccgtcgccaaaaccccagatcgggccgacgcgttgggccatcgcctcgccgaacagtttcttcaccagctcttcctgcggccggtagccggtcgcgagcacgatgaggtcggcttccaccgtctcgccgttcttgagccttgcgccttcgctgacgaaggtctcgatgtcggaaaactgcttcagcgcgaccgcgccgctcgcgacgaggtcggagcagccgacgttgaagtaataaccgccgccgcgggtcaggtatttgaactgccagccggtgccgccatcgccgaaatcgagcttgaaacccctgcgggcgagaccgtcgagcagcggcttgtcgagctccttcgactgctcggtcatcagcacatggctgcgcttggcgagcgtaagcggcatcgaggtcgcgatcaggtcattgtcctcgagcgagccttcattataggcggcataggcgagctgcgccgacggctcgatattggtgaccagggtcggggagcgctgcaccagcgtgaccgcggcgccggaggaatgcaggtcctgcgcgatatcgtggccgctgttgccggtgccgatcaccagcgcacgcttgccggtccagctctcgccgtcctcgtagcggctggaatgcatgaccttgccggaaaaattcttcaggcctgggatgtcgggcagattggggatgccgctgacgccggttgccatcacgacatggcgcggctgcatggtccgcgtcgtgccgtcggcgcggcgcagctcgacggtccagcgtccttgcgcatcgtcgtagctgccgcccagaaattccgtgccggtccagaagttcagctccatggcatcgacataggattcgaaccagttggcgagcttgtccttcgggatgtaggtcggccagttcggcgggaacggcatgtagggcagatgattgacctgcacctggttgtgcagggtcagcgcgtggtagcgcttgcgccaattgtcgccgacgcgcgcctcgcggtcgacgatcagcgcgtcgatcttgagctgcttgagccgcgcggcgatcgcgagcccggcctgtccgccgccgacgacaagcacatccggatcgcgatcggcgtactcggtggacgccttgcgcaggtcgagccagttcggtccgcggaagtcgcgggaataggcctgtccgcgcggccttgtgtgaccctgctgttcctcaaaacccttgagctcctcgagcgcggtcaacaaggtccaggctttcagccggtcgccgtcggcggcgtcagggatcagccgcacgatgccgtggccgcggccggtcgccgtctcgaacttgaagatcgcctcgatcgcattggtgccggcgcgcatcacccggcgcggcgccgcgcgctcggcatcgatgcggaagtcgcgtgggtcactgcgacgggcatgtgacggcagttcctcgatgatggcgaaggcgcggttgacggtctggatgttccagctcagcgccagcacgtcgcgccagtagctgtcgggatggaacagcggcttcagcagcacatcgtcggggctcgccagcgcatcctcgaactgcacgagccaattgtcggcggcgactgaaatatcgtccgtcttgtcgagcatccggcgtttcccgtcatcggccgcccctggtcagttgcccggcggcgttcccattgccgcaaagcctatacccattggcgaggccgcagaaaggccgtgacgggatagcgcctattcgcccagcgacaggatcaagccctggtccggcggaacgcggccctgcagggtatcgagataggcctcgcgcaccgcggccgggccacgccgttcgacgacatcgagccaatcaggcagatgcggcacgagcccggtccatgcggcaccgaagcgctggtcgatgccgccggggccccattccttggcgcgcttgcggatctggtccggcgcgaagaaccacaccggcttggcgccgggcagtgccggctcgtccggctcgctcgcgcgatgcgtcagcccgacccggccggaatagaccatctgatcgccgaagtgccggtgcagggcctcgcgcagcgcgctgttgccggccatgtcgacataggcgaccggctctgccggcgggatcgccgcgacctggtcatagctgacgacctcgtcatagcagccgagcgaggagacgaaatcgacattgcccttcgaggtcagcccgatcacgcggataccccgcttgtgcagcagatgagcgaggccgaatgcggtcttgctcgaggccgatgacaggatgacgcggcgcgcgccgtagaattcattctcggcgaggaagtcgtcgaccaggaacgacagcatgaacagcggcagcagcagcgcgcggaaatcgccctgccggccggcataggtcggatcgccggagacgcgggcataagcgttgtagaccggcgacacctcctgccggtgcgcggcgccatcgcgcaggccgcgcttgctgacatcggccgcctcgatcaccagatgggtcgccatcgggaaatagccgaacagcgtctcgccgacggcgacggcgggatgcttcgaggccagcacctcgccaaagccccacaccgggatgatgccgtagccctcgggcgccgggaacaaatgccagtatttcagttgctcgccgatcacggcgtaggtgatgttgttggcggtgaaagcgaagcgggtcaccttcaccagcagcgcgtcggccggcagcgccgcggcgtcgggcaatcgcgtctcgatcaccttgcactgctgcaggtcgttgcggatgacgatgaagtcggtggcgttcatggcgatgatcccggccttggatgcgggccggcatcgttgcgtcgattgccggctgtttgcaacagcaactaagtttcaaacgccgttcgcttcgccgttatatcgttcagcgaagctgtccttcgcggtagaggtcgcgcagcttgcgcttgaagatcttgccggtggcctcgcgcggcagcgcgtccatgaagcggatgtcgcgcggcaccttgaaattggcgagcttgccgcgcaggaaatcctggatcgccgcagcagatagcgcagctcctgcttccggctcgacgcaggcgaacagccgctcgccatactcgtcgtcgggaacgccgaacaccgcgcagtcgcgcacgccgtccatgccgatcagggtgttctcgatctcggcgggatagatgttgacgccgcccgagatcaccatgtcgcgcttgcggtcgcacaggaacagatagccgtcggcgtcgagatagccgacatcgccgacgctgatcaggccgtcgcggtcggcttcggcgcgcgctttggcgttgccatggtaatcgaaatccgagatcaaggtctggcgcatgaagatctcgccgggctcgtcgacgtcgcattgcgtgccgtcggggcggaagatcctgacgatgccgccctcgatcgcgcggccgacggtgccgggctttgccaatgcttccgccgacgaatgccagaccgggatgccggtttcggtcgagccgagatattcgttgatgacgggcccccaccactcgatcatcgcgcgcttgacgtcgaccgggcagggcgccgcgccatggatgatgaagcgcagcgacgacaggtcgtagcggcgccgcgtctcctccggcaggcgcagcagccgcacgaacatggtcggcaccatatgcatgtgcgtgacgccgtggcgctcgatcagttgcagcagatcttcgggatcgaagcgcggctcgagcacgatgctgcagccgttgcggaacgccagcatgccgtaggaatgcggggccgaatggtacatcggcccgttcatcaggatcacctgatcctcgttgggctttacgccgtaggtgatggcgccgatgcgggcggccgccggcatctgctcgggccgcatcggcttgcgccggacgcccttcggcagtccggtggtgcccgaggtgtagaacatcggcgcggcgccgatcggggcatcggtcagcggcgcatgcgtgtcgcgccattggtcccagtcggtcatgccatccggcacccgcgtcaattcaggcgccacgccataggcggcggcgatctccggcggcgtcgtcacgatcagcagtttgatttccggcggcaatccgtcccggatctgcggcaggagatccgcgtggcagaccagcgtgtcggcgccgctgtcggccaggatgtaggcgacctcgtcggccttcaggtgccagttgatcggcaccaccgggctgccgagcgcggccgaggccgcgaccacctcgaacagcgcgaaatcgttgcgcagcatcatgccgaccggcttgccgtcgcgcatgccgagcccgcggaagccgttcgctgcccgtgcgatgcgggcgtggatatcgccgtagctgatctgtcggtcgccgctgatgatcataccgggtctctccaggcgatcgtccagcgtcaggcgctggccttcatgaagtcgttgcgcgcctcattaaactccgccttcagccgtgtcaccagttcggcgaccggcggggcgtcggtgatctggccgatgccctggcccgagccccagatgtcgcgccaggctttggccttggtgttgccgccggagccgaaattcatcttggacttgtcggcgaccggcaggttggcgggatcgaggccggccgccgcgatcgacggcccgaggtagttgccgtgcacgccggtgaacaggttcgaatagacgatgtcgtgcgcggcatgttcggtcagcgcctgcttgtacctgacgtcggcgttggcttcttgagtcgcgatgaagcgggtgcctatataggcgaggtcggcgccgagcgcgagcgcggatgcgatgctccagccgtcggagatcgcgcccgacagcaggatcgtgcccttgaaccattgcttgacctcgcgcaccagcgcgaacggcgacagcgtgccggcatggccgccggcgcccgcgcagaccaggatcaagccgtcgacgccctgctcggcggccttgcgggcgtgcttcacgttgatgacgtcgtggaacacgacgccgccataggaatgcgcggcctcgacgatctcggacggcgggcgcagcgaggtgatgatcaccggcaccttgtgcttcacgcaggtttccatgtcgcgcatcaggcggtcgttggaggcgtggcagatctggttgacggcgtagggggcgaccttcttctccggatgcagcgcctggtgctcgccgagctcgttctcgatccgggtcagccactcgccgagcttctcggccgggcgggcgttcaacgccggaaacgagccgacgatgccggccttgcactgcgcgatcacgagctcgggcccggagacgatgaacagcggggagccgacgaccggcagttcgagcttgttggcgagcgaagcaggcagcgacatgttcggatcctccatgcgcgccgctcggcctgcggccggggcggatcgcgatgtgttgtgatggcgggagcggcggctctcctggcgcggccgcaatataaggctggacggccgcgcgatcgcgttcaatattgaacggctgattggccagaattgaacacgggcgcaggcggacggcgcatggactgggagctctgcaagacattcgtcgcggtggcggagacgcgcagcctcgcgggcgcggcgcggcggctgcgcatcagccatccgaccgtcggccgcaacgtcgcggcgctcgagaagcagctcggcacccgtctgttcgcccgttccactgacggcctgtcgctgacctcgcatggccgcaagttccgcgagcacgccgaggcgatggcggcggcggccttgcgcgcggaagcctccgcctccgcgaccggtgagcaggcgcgcggcgtcgtcaagctgtcgatcggcgcgacgctggcggcgcactggctgatgccgcggctcgggccgttcctgcgcgaccacgccaatatccagctcgagatcatcacccatccgtttccggccagcgtccgccgtcgcgaggccgacgtggtgttgcgcccggtcgatgcgggcgacgaaaacctgatcgggcgcaggatcggccggctcggcgccggcttctatgcctcgcgcagctatgcggccggccgcaagcttccggagcggccggacgaatggaaaggccacagcgtgatcggctttgccgaccaggcctcgaatgcgcggctggcgcgctggagcgacgtgatcacccggcagggcacgacggtgatgcgctgctcctcgcagggcgacatgcttgccgcggcgcgcgccgggctcgggatctgcgcgctgtcctgcctggtaggcgccgactatcccgatctggttcgggtcgcgccgcaaaaactctcgagcctctccgatctctggctgctcgcgcatcccgatctggtcgagcttccgtcggtgcgggcggtgatcggcttcgtcaccgattgcgcgcgcgaggaccgtgtcaggctgcgcggctaaagcgcgatgacatcgggctgaatcgtcatcgcgctttagattcttgtttaagcatgatcttttcggaaaaccgctacgcacttttccggatcatgctctaggacgcatgttcatcaatccgagatgtctgctttggagaagatagcggccacgcgatctgaccggagagaggccgccttgtgacccccaaacggacatcaaggttgagtgccgggcggagcttgcgcggtgccccaaaatagcgatgatcacgcttggcaaggcgaccatttgcaactgcgcacgggagggctacatcatgactgcattcaacgcggtacgcttccgggtgaagcccgggcgtgatcaggatttcatcgacgcccacaagaacgttagctggcccggcctcaaacactcttacatgataaagaccggcgagcgcacgtattgcgtcatcgccgagtggccggacatggagacgctggcaaacgcacgtccgaacatgatcgcaacgcttaattcgttccgggatactttggaagatctcggcaatggacttggtgtaacagacgccgttgctggatcggtcgtcctaacgctcaaatagcctccaaagtaccctgaagagaggagccattttatggcaacgatcgagatgggctgctcttgacccttgacggaccttgccgtcaaatcagtggtgtcgttcaaggacaatcaatggaagtccatcagcgagtagccatttcgaagcgaaatagcagtactcgccggggaggtcttcaagcgaggctggcttatcggcaagtcgtgactttacctcagtcttccagaactcgaacctttccgcaggatcgatccaacggggccgcagtccaacgtcagcgacgacgaatgtcgccccttctttaattgttgccattaattccgatgcgttcagcccagtggagatgcgttgcgcgttgaatatctgttcttggtcccacaactcctcaagagggagcttagtgaccagcttcttggcaatgtccatctctcgctcaacgcaaggtcaactgggccaaccttagaacagccgaaaaatcaatggaagcaggatggctgtgagtacgccattcaggcccatcccgagcccggaaaaggcaccggcgacctcgttgatctggaatgcccgcgcggttccgattccgtgggaggcaatgcccatggtcagcccaacgacacgcggatcgtcaatacgagcaaggcgcgcgataagtgggccgaggacggctccggtaatgccggtcatgatcacgagcacaatcgtaagcgtttgcagaccaccgatctgctcggaaatgccgaccgcaattccggcagtgaccgacttgggcgccaaggaaaggatggtctgcgaccttgcccccataacccaggcaatgccgacagcgcttaggaccccaacgggcaatccgacacccaatccgaccgcgatcaaccgtgcggaagcgcggattacggcccgctgacggaatagcggtacggccaacagaacgaccgcaggccccaacatgaagtgtatcgggtcagcgccgcgcaaatacgtcttgtaggggatatgtgtcgcttcgaggccgagcgagatgaggacgatcgccagaagggtggggttgagcaacgggtgattgccgccgaggcgcgatatgcgagttgctgccaggaaagcgaatacggtcgcacctgtttccaggatcggctggtcagccaggctgacccaggtcaaatttgtcagatcaagcgttgacatcgcgtgctgctccctcgacgcgttcggacccgggctcccgacttattgcaatcgttcggccgagccggttcacgacaaccatcgtgacaaaaagagtaatggcggtgcctccaatcaccgcggccaaaattggcgttgcttcggtcttgaagacatccaaataggcgatcacgccgacgcctgccggcacaaacaacatgcccagaaactgaagcagtcggtctgcaaggatgcccagatcatcgggcagccgtccccgaatggcgagttcggcatagagcagaatgaggccggtgactggcgcgggaagcggccacaagccggacttggcggcaatttcacccagggaaagccacaagagtacgcgagcaatctgttcaagcatcgcaatcatctccaacatcattttgcgcggaataatttttcgtgtccgtccattcgcggaccaccatgcgcatttaggggctcatgccccagagctgctttcgttcgatggaatcggaacggacctcccgattcccgtttgaagcgcttcttcacgcgggccggtattcgcttcgctcgaagacgctttagttgcgtgcggccatttccgacgacaaatggcgccaggagtgttcggttcggctttcaggcgaaccgatcaaggtccatacgcagaccgccgtgatgatggatacagcaacgcaccacgtggtcagtcgcaggcgatcattggtcacggcaataccgttgcaatcgcgagctcagcttgggtgacacccgactgccccgctgccaagtagatcgcggcgattgcgacgagcgccaaagccacgtatccgacggtgatcaagccgccgtgattgccgatcggcagtgtggatcgaatcgtagagtggggaattgcgggaattgcaatcttcatgacaactctcctgcaaattacttccattcaaatacgcaaggcatcatcgcttggcaggcacaacggcgcagtgaaatcgttcacaagcgcgcccgcaccaacgggattattcgccctcgaaggttcggatgacagctcaattttttcgcagcacctgcaacggcgataggcagcccattcgagaaagtatcttttgatcagcctccaccgtgatcgaccgatggcgaaatctcacgagtacaatgcgcccaatctgttcttggataatttcgcagctttggagaagtcgtttcgtccggcggcgattgtttcgccgataccgagccgctcgaaacgcgttcacgacatcgcgagccgcggcgccgaatttgttcctgagccgatgtcgcctggtggcgcataacgaaattcgccctgagcatcggaacgccggcttgttgatgtgaagcgaacgcaattctccccgatcgagatgggctgctcttgacccgttgcggtctctcagtccggccagcgctctgcttcgattgcggcgaccacgtcgcttactttgaaactctgatatacgcgcggctcgatgccgagcagcctgcggacccggtcgcgcacttgcttgaaggggtactccccgggggcatattttgacagatcgacttttccctcaatgcagaattcccgcgtggcccacagcaccacatccaaggcgaaatcgtcgccatagatacccaagtcgccatacagttctgtgtggggcgttatcgtcgtgccgcgagcccaaggtcgaagacgctcctcaactcggcgaaaaacctcgttcatctcggctaagtctttcaatctaagttacttgatcatatcgaggagcgggccgcgctagcgccgttactccaccgctaccattctcgcgattgccatctaacaagcttttggcgggccgccccagttgggggcttctttcatatcaggccaaggtcgcgatgtcgtctgttggcccttcgcggacattcagtctgccatcgttgacgtctgcttgttagggcaatccggaccccgccatttccacacgcccgtaccggattcatgagtacgcgccctgaagccggaacgcttcacgcacgcgcccgccacagcgtcaccgcaagcagcatgaagacggcgcacgtccacagcgcctgccagttctcaagtccttcgttgaggaccgtatagatcgcggctccgacaaagatcccggcaaagatcgattccgccagcgggcgggctcccttggtgggcggattgagcagcgtcatcgccgcaaacggcacggccgccatggtgagaggtgcaaagggaaaatcgatgaagcgcggatcgaacacgaggccgagcgctgccgccgtcccgaccacgacggtgacgatcagcgccaatccgtgcatggtcaccagcaccgactccgtgtgggagcccttcggacccagcaattccaggaagcttgagggcacgcggcccgacatcagggcgttggcgccgaacaccggcgaggccgttgccgccaccagcagcgagccccacaacagccagcctccggtgccgtagctttcatagaccatgcgctgcgcggcgaccccgagcaggattccccctgtcgtcgcggatacgccgaccgccaaccatgatccgaactcgggcggcctcggcctgcggcgcaaggtcagccatgcgacgccgaacaccaggatcgccagcgccatgccgctgcacatctgcagcttccaggccggaaaattgctgaccggctggcccggcggatatttcagcgcgcgctgctcggaatcgaacaggccccaggagccgccgatcgtgccttcgatctcgcgcttccacccttcgtcataggcctcgaacaggttgacgcggaaatgctcgcgccgcgccaggtcgagcacctccgcgaccacgcgcgcctgattggtgcgcgacggcagcgcggactcgcgcatccgcccctcgctcggccagccgatttctccgatgaagatttccttgcccggaaacgccgccgcgacctgcttgcgaatctcgtctgcgtgcgcggcggccagatcggcccggattggaatgttctcccaatagggcaggatatgaatcgtgacgaaatcgactgcgtcggaaagctcgcgattgctcagccagaactcccagacctcggcataggtgacggggacggtgacctgcgccttgatcgagcggatcagggcggcgaggtcggacgccgccatttccttgcgcagcaagacctcgttgccgaccacgagtgcgatgatcgtgtccggatattccctggcgaggcggatcgcggtttcgacctgcgttgcattcttcttccggtcccgatcgaggaagatgccctgaatgactttcagccctgccttggccgcaagtccgggaatctggtcgaggccgagatcggtcgcataggtgcggatgcagtgcgatatcttggcaagctgggccagatcttccgcgatctgttccggcgtgacctgcgtcgccggcgagagcgacgtctgattgtcgcggaacggggcgtaggagatgcactgaaccttgtcgttcggatcgatcggcgcgcgcggcaggttgaccgggatgcccagccaccaccacgcggtggcgatagcgcccaaggatatcaggagaagcgtcagcggggtgcgaagcgataccaggtcggtcccccttgcaggaaggatgtgctgggcgtgcgaaatggcgaggccggcaaattgaaaaactatgcgtcggttggtgctatatcacgcgatgacacagttggcgtgtctttctcgacggcctacttcgcaccggcgatcacgccttcgcgattcctgagtacgcgataataggcccaccacagatgggcggcggcgccgcgcagcggccgccacggctcggccagcggcgccatctgcttcggcgtcggccgctccttcaagccgagcccgaccttgaccgcctcctgcaccgcgaggtcgcccgcgggccacgcatcgccgtggccgaggcagaacagcagatagacgtcggcggtccacgggccgatcccgggcagcgcggtcagcgtgttgtgcgcggcatcggcctcctcgttggcaagcacgtcgaggttcagccgctcctcggcgagctcgcgggcgatgtgtttcagcgtcttgatcttcgcggcggacaatccgagccggccgaggcggtcggcgcgcgccttgcggatcgcatcatggtggaacgggtcgaaagcctggctgacgcggccccagatcgcggcagcactcgcggtcgacagctgctggccgcagatgatcgcggcgagcccggcaaaccccggctcgcgctgccggatcgccggcatgccggtcgcttcgaggatcgggcgcaggcggcgatcctggtcgaccagtttgtggacggcgtcgtcgaggtcggcctgggtttcgagatgaatcagcattgcgggctcttcgtcattgagcatgggccgtctgaacgatggcatcgctggcgcgcccatcggcgacgttctttttgtcggagttagttgtaagagcatggatgcccgggacaagcccggcatgacgagatcaattggatgccgccacccgttttccgttttgcgccgagtccgaacggttatctgcatctcggccacgcctactccgcgttgctcaatttcgatctggcgcggcaggggggtgggcatctgctgctccggatcgaagacatcgattcgatgcgctgtcgtccggaattcgaagccgcgatctacgaggacctcgcctggctcggcatcacctgggagaccccggtgcgacgccagtcggagcatttcgccgcctatcgcgcggcgatcgaccgcctgtcggtgcaggggctggtctatccgagcttcgagagccgcgccgatatcgcgcggctggtcgccgaacgcgaggctggcggtgcctggccgcgcgatccggacggtgcgccgctttatccgggggcggcgaaatcgctgtcggccggggagcgcgaccggctgatcgggcagggcgcgccgttcgcgctgcgactcgacatggccgcagccgccgcgcgcgccggcagcctctcctggcaggaggccggcgaggggccgggcggcgagagcggtgacgtcgcggcccggcccgaggcttggggcgacgtgatcctggcccgcaaggagaccccaaccagctaccatctctcggtcgtgatcgacgacgccttgcaaggcgtcaccgatgtggtcaggggcgctgacctgttctggtcgaccagcgtgcatcggctgttgcaggcgctactcggcctgcccgcacccgcctaccggcaccatgcgctgatccgcgacgcggcgggtcaaaaactgtcgaaatccacccgcgcgaccgggctgcgcgaattgcgggctgcgggggcaagccccgccgacatccgccgtctggtcgatttggagtagtccgccaccgacgtgctgcgcggctctctaccctggcggaggcgatggggcttgcgcgatttcggaataatagaaaagtaccaccgatttgcccgacatgtcaagttgcggcgttggacgccggctgctttgcatggggttgttttcgacattttgctcggaggcgcccctcgcggcagctggcgccgcaagtagatggaccgcttaccatcatcctgatttggcttggctcctcccgaacagcgccgtgactccgccactcctggcatgccatgttgcctccggggcggggtcacgagatcatggcggcatcatcgcgcggagggcgcagcaagcggcgagcaaagggcgcgccgtcgacgacccgcgccgccaagacgcgcaaggccaaggccagcaagtcgaagacccgcaagtccaaggcggcggccaagccgcgccgcacgcggaccgcgccaaagacatccgccaagtccggagccaagtctggagccaagtccggatcgaagtccggtcccggcatggtcgagaccgctctcgccgcctttgcccatgaggtgcggacgccgctgaccggaatcctcgcgatcagcaatctgctcgcgacgtcggatctcggagagcgcgagcggcgctgggtcgacaccatcagggccggcgccgagcacctggcgagccttgcgaccctgttggtcgatgccgcccgcagcgaggggccggggctcgagatccggcaggacttcttcgacctgcgcacactggcgcgcctcgccggcgattcgctggcgggccgggcggcagccaagggactgcgggcctcgatcgaggtctccgccgagttgcccgccttcgcggtaggcgatcccgtccgcctgcgcgcggcgctggaaaatctgatcgacaacgcggtcaagttcaccgagcagggcagcatcgagctgcgcgtcgcaccggtgcgcgccggcaagcgaagggcgaacggcaggatcggcattgcctttgcgattgccgacagcggtatcggcctgacgcttcctgagctcaagcgcctgttccggccgttctcgcaggccaatgtctcgatcgccgcgcggttcggcggcgccgggctcggcctgtcctcggtcaagcagcttgcgcgcgccatgggcggcgacatcgtcgtggcccagcgctcgggcggcggcaccgtcttcacgctcaacgtggaactggtttcagccgaaggaccggccggtgcgtcgtcgcgcgaaggcgcaacagcgccgttatcgcaggggctgcggctgctcagcgtcgaggacaatccgttcggccgcgtcgtgctcaacaccatcctgaccgagctcggtcaccacgccgaatttataggtcagggcgagggcgcggccgacaggctcggacagggtgccttcgatgcggtgctgatggacatggtgctgcccggcatcggcggcgtcgaggcgatcaagcgcatccgcgcgctgccgccgccgcgcggccggatcgcgatcgtcgggatctccggccgtgccgaggacgaagccgcggcgcgcgccgccggcgccgacgccttcctggtcaagcctgtttctccgcgggcactcgcaactgcgctgcatgaagcgatacgccgcgcggcagccgcgacttgatgatcgcggcgttcaattcgccgccgaacacgaagatcgcggcgatgaaatacatgaacaccagcgcgatcaccaccgaggcgagccccgcatacatcgtgacgtaattgttggcgaagcgcgccaggtacatgccgaagccgatgcctgagatcagcgacgccaccacggtaaagatgatgccaggcaggatctgcgtgaagccgcggcgccccgccggcagccaggcatgcaggatgaacagcgcgacgaccagcgccaggatcgtgatgccgtagcgggcgatgttgagcaggctctcgttggattcgacgaagaacgggatgtagcgccgcgccgcctcgatgatcagcggcccgagcacgatcaggaacgccatcgcgagcgaggtgaaggcagccaccagcgtgtagccgatcgattccaggcgcagccagtaccagcgccgcggctcgatcacggcataggcgcggttcagcgccacccgcagcgcctcgacgccgttggaggcgaagtacaccgcgagcaccgcgccgatggtcaggatgtcgccgcgggtgttggtcagcacgtcgtggatctggcccgacagcgccccggcgacctgatccggccagacctggagcagcagcccgaccgcctggtcggcgagctccttggagccgaagaagccggccagcgacgtcagcacgatcaggaacgggaacagcgccatcagggtcgacagcgcgatgtggcttgagatcgcccagccgtcatcggcgaggaacgtgtaaaaggcatccatcacgacgtgggtgacgtaacgaagctgcttcacattccacccggcattgtcgaaaacggctcggtccgagaacggacccagcatctgatattacgcactgaaaagccagttggttgcatcggccgcctgtgtggaagtccgcgtcatgcggtgttatgtaccgcagatgacatctcttctcagcacgatcattcttcccatcgccgtcggcgccgtcgcgctggtgctcctgctcggcctcatcaacatgatgaagggcggctcgccgaacacgtcgcagaagctgatgcggctgcgcgtgctctttcagttcgtcgctatcgtcatcgcgatgctcgcggtctgggcgatggggcgatagatgcgctatcgtacacctctcccattgggagaggtcggatcgccaaaggcgatccgggtgaggggctttggtttatcgttagactgtaacccctcacccgctcgcaagatgctcgcgacctctccctacgggagaggtgtcaacaccggagctcaccatggtcgttctcaatcggatctacacgcgcaccggcgatgacggcaccaccgcgctcggctccggcgagcggcggccgaaatacgatctgcgcgtcgccgcctatggcaccgtcgacgagaccaacgccgcgatcggcgtggtgcggctgcatctggctgatagtcccgaggtcgatgcgatgctcggccggatccagaacgatctgttcgatctcggcgccgaccttgcggtgcccgagcgcgagggcaaggccgaacgcctgcgcgtgctggcgagccaggtcgagcgcctcgagcgcgacatcgacagcctgaacgatcagctcgcgccgctgacctcgttcgtgctgcccggcggcacgcctgccgctgcatatctgcatctcgcccggacgatatgtcgccgtgcggaacggatgatggtggaactcgccgcccggcccgacgagccggtcaatcaagctggcatccagtatatgaatcgcctgtcggatttcctgttcgttgccagccgcttccagaacaataaaggggcgggggacgtgttgtgggtgcccggccagaaccgttagactggctcaaaaccgggtgacggttttttggcgttggcgcgttgaccgggggaaacgggacctttaggttccgcgccagccaaccgaaacccataaaatcaaagcgaaagaggatcgatgaaggttcttgtgccggtaaagcgggtcgtcgactataacgtcaaggtccgcgtcaagagcgacgggacgggcgtggagctcgccaacgtcaagatgtcgatgaacccgttcgacgagatcgccgtcgaggaagcgctgcggctgaaggaagccggcaaggcgaccgaagtggtggtggtgtcgatcggacccgcgcaggcctccgagaccatccgcaccgcccttgcgatgggcgccgaccgcggcatcctggtcaaggccgaaggcaatgtcgaaccgctcgcggtcgccaagatcctgaaggcggtggtcgaggcggagcagcccggcctcgtcattctcggcaagcaggcgatcgacgacgattcgaaccagaccggccagatgctggccgcgctgctcggctggtcgcaggcgaccttcgcctccaagctcgaagtcgaaggatcggacttcaaggtcacccgcgaagtcgacggcggcctgcagaccatcaagctgaagggcccggcgatcgtcaccaccgacctccgcctcaacgagccgcgctatgcgtcgctgcccaacatcatgaaggcgaagaagaagccgatcgacgacaagagcgtcgcggactacggcgtcgacgtgacgccgcgtctggaagtgctgaagaccgcggaaccggcaggccgcaaggcgggcgtcaaggtcaaggacgtcgccgaactcgtgaacaagctcaagaccgaagccggggttctctgatgacgacgctgttgattgccgaacacgaccacgagaccctgaaggactcgaccaacaaggcgctgaccgcggcgagccagctcggcggcgacgtgcatgtgctggttgccggtggcggccagggcaccaaggcggcggcggaagcagccgccaagctcgccggcgtcagcaaggtgctggtggccgaaggccccgcctatgagcacgatcttgccgagccgctggctgcgctgatcgtcgcgctggcgccgaactatgacgccttcgtcgcgcccgctacctcgcgcttcaagaacgtgatgccgcgcgtcgcagccttgctcgacgtcatgcaggtctccgagatcatcaaggtcgtcgcgcccgacacctatgagcggccgatctatgccggcaacgcgatccagaccgtgaagtcgaaggacgccaagaaggtgatcaccgtccgcacctcgaccttcgccgccgccggcgaaggcggcagcgcggcgatcgagaacgccgcttccgccgccgatccgggcctgtccacgttcgtcggcgaggaggtcgccaagagcgaccgtccggaactgacctcggccaagatcatcgtctcgggcggccgcgccatgcagagccgcgagaacttcgccaagtacatcgagccgctcgccgacaagctcggcgccggggtcggcgcctcgcgcgccgcggtcgatgccggctatgcgccgaacgactggcaggtcggccagaccggcaaggtggtggccccggaactctatgtcgcggtcggcatctccggcgcgatccagcatctggccggcatgaaggactccaaggtgatcgtcgccatcaacaaggatgaagacgcgccgatcttccaggtcgccgattacggcctggtcgccgacctctaccaggcggttccggagctgaccgaagcgctcggcaagctcggaaagtaagcgacaagacaccggccgggtgggtaagctccggccggtgttatgattttcgaggcaatgatccggaaacgtttttccggaaggatcatgcccgacaggggaaatgggaccccggtgtgatgacctgtcatcacaccatggtctcgggaaacgttttccggcggattgggcaacccggaaggctgcacttcgggtatcgttgggattgggcaggcgcgacatgcgcgccgttccggtggatgacaagatgacggtggcaatcaaaaaggtcggcgtgatcggttcgggccagatgggcaatggcattgcccatgtggcggcgctggccggcttcgacgtggcgctcaacgacgtgtccggcgaccggctgaagtcggcgttggcgaccatcaacggcaatctgacccgccaggtcgccaagaaggcgatcagcgagaccgaccgcaagcaggcgctcgaccgcattacctccgccgagacgatcgatgcgctggccgattgcgatctcgtgatcgagaccgcggtcgagaaggaagagaccaagcgcaagatcttccacgacgtctgcgcggtgctgaagccggatgcgatcgtcgcgaccaactcgtcgtcgatctcgatcacgcggctcgccgcctcgaccgaccgcccggagaaattcatcggcattcatttcatgaatccggtgccggcgatggagctggtcgagctgatccgcggtatcgccaccgacgacgcgaccttcgacgccgccaaggcgttcgttgccaagctcggcaagcaggtcgcggtgtcggaagatttccctgccttcatcgtcaatcgcattttgctgccgatgatcaacgaggcgatctacacgctgtatgaaggcgtcggcaatgtcgaggcgatcgatgccgcgatgaagctcggcgcgcatcatccgatgggcccgctcgagctcgccgatttcatcggcctcgacacctgcctgtcgatcatgcaggtgctgcacgagggcctggccgactccaaataccggccgtgcccgctgctggtgaagtatgtcgaagccggctggctcggacgcaagagccagcgcggcttctacgactatcgcggcgacaagccgatcccgacccgataatcaccgcgtcttcagatcagtgcccgcagcagcgcaagcgtcgcgggcacgagactgacaaccatcgtcacacccgttccaagcccgagcagatgcgccgtcagcgcgagacgctggctcttcgcgtgaggcgtcattggagggcctcgcaggcgcgcttcagccgtcttgcagcctcctcgatggtcgatgacgggttggcgaagctgacgcggatgtagggcgacagcccgagatcctcgccgggaaacaccacgacgtccgcttcctcgagcagataggtcgagaagtctcggtcggtctcgatcaccttgccgtcgggtgtacgcttgctgatcacgccggcgcagttgaccagcaaatagaacgtgccctcgggcggcgtgcaggagagcccgttgcatccgttgaccagttcggcaaagcgatcgcgccgcgtgcgaaggatcgcggcgcgctcgagcagcacatcctgtgcgccatcgagcgcggcgaccgccgcggcctggctgatcgacgatgcgccggacgtggtctgcgactggatcgcgatcatcgcgcggatcagcgccgcaggtccggcggcatagccgatccgccatcccatcatggcgtagctcttggcgaggccgctgacggtcaatgtccgaggcttcaggcgcggttcgatctccgccagcgtcgtcgccggcgcaccatcgaacgcgatgtgctcgtagagcccgtcggccagcacccagatctccggatgccgcgacaggactgcggcgatctcggccaggtcctcgcgcgaatagagcgcgccggagggattgaccggattgttgatcacgatccagcgcgtccgcgccgagatcgccgcctgcagatcctccgcgcgcagcttgaagccgttgttctgcgcgcacggtacgaccaccggcgtgccgtgcgaaagccgcacctgatcgagatagggcgcccaatagggcgcggggatgatcacctcatcgcccggcgccagcgtcgccagcagcgcattgaacaacgcctgggtcgagccgttggtgatcacgatctcatccagccgatagtcgagacgatggtcgcgcagcagcgcggcctgcaccgcccgcttcagctccggcgtgccgtcgacgtcggtgtagcgggtctcgccgcgcaacgccgcgtcatgcgccgccgcgatcacatggtccggtgtcgggaagtcgagattgcccgacgacagctcgatgatgtcgcgcccggcggcgcgcaactcgcgggcgcgtcgacgcagcaccgatgcgggcgacgccttgatgccgctcatgcgcggcgagaggatcggtgttgcggtcatcggacgtactgtgcctcgccgttgccgaacgaccagttctcggggagcacctcgacgaggttgatgaagatgtcctcacggcgcaggccgggactttccgccagcagttcggcgatccgccgatacagcctctgcttctgcgccaccggacgggtgttgctgacggtgatctggatgatgaccaggtcgtcgctccgcccgatgccgaggtaatcggcgccatagacgaagtcgtcgccgtcgtgctcggagatcgtcatgaagcgatcgccctccggcacatcgaaggtctcgcgcatcgcgcgataaaggttctcgagaatcgatttgcggtaggcggcgggcttgccccgccgcagtgagacgcgggtcagcggcatgatgatggctctcctggcggcgatcgttgcgttcagccgaacctaggggcttcttgatcattgaaaaaccgtatgataaatgattttaatgatattcattttaaatgaatggccatgaaggcgctcgacatcgaggcggtgcaggccttcgtgctggtggcggacctcagcagcttcacccgcgccgcgcaggcgatggagaccacgcagtccgcggtcagcctgaagatcagacggctggaggacgggctcggccgccggctgctggagcgaacgccgcggctggttcggctgtctgccgaaggcgccgccttcctcggcgcggcgcgcaacctggttgccgcgcatcagtcggcgatcgggtcgttcgcggccgaacaccggcggctgatggtcggtatcagccaccacatcgtcggatcggagctcgcatcgctgttgaagcggatgaacgccactgatccaggactggtgatccagctgcatgtcgatacgtcacgcgcggtgctcggcgcattcgacgacggcaggctcgatgcggcgatcgtgctgcgccacgacgccaggcgtcgcgatggcgacgtgctgttcgaggagccgttcggctggatggccgccccggacttccaccaccggcccggcgagccgctgcggctcgcgacccaagccgagccgtgcagcgtgcgggccatggcggtcgaggtcctcgacgctgccggcatcgcctggaccgaggcgtttgtcggtggcgggctttcgaccatcggggccgccatatccgcaggcctcgcggttgccgcgctggcgcgccgggtggcgccggccgataccgtcgacctcgggccgcggcttggcctgccgccattgccgtcgcgcgacgtcatgctgcactcgaaactgtcggacgcacggacccggcaggcgctgcgcaccctcggtgcagccttcgcggcgaacgcagcctagacgtccgtcattcggtcaagcgacacccggcacgcttgagcatgtcgcggatgatcagcggcgtggccggcgtcccgtttgcggcagccgcaccggcgatcgcatcgcgggcctgctgggcgtcgagcgtcagccgccgggcacaaggcggcaggccgcgggcggtatcgagcagccagccggcggtttcgcctgacccagccagataggccgtcaatgtctggcgcgcggtcggattggtggcggcctgatccagcatcgccctgacctgcgccaccgagatctgtccgcgtgatgtcgaaggctgtgccggcgcggccgtggtcaggaagaggagggcgcagatgacgcacgtcggacgattgagcatgaggtgacctttcaatgcatgttgacttgcagatattaattatcataaaacaataatatcaggtcagcacccgaggtcgagcatgtccgtgaccctctcatcagaaccgtcccagtttgcgcggccggcccgcctcgcgcgcatcagcgcgatcagccgcctgcttgcctatgcctgcaccggcatctcgttcctgctcgctgtgggattgctggcctattggctggcgagccccgacgaggcgatcctgcgcgatgcggggctgaccggcttcgcgttccatccgatcggctggctggtccgcctgatggctctcgcggtctcggcgctgccgttggccggtctgatctggggactgtcgcgggtgcggcgctgcttcaattcgttcgcggcaggacgtttcttcacggcggataacgttgcggggttgcgcgatctcgcgatcgcgatgctggtctcgaccctgctgaagccgctgatcggcgcgctgctctcgatcctgctgagctggcagacctacgcgcagggccagtccatcgtcatcgcgctcggctccgacacgctgctggcgctgttgtttgcgggtctggtcgcggtaacggcctgggtgatggccgaggccaatgcgatcgccgacgagcacgcgcaattcgtctgaggcatttgcgatgccgatccgggtccggctcaacgtgatgctcgccgagcgcaacgtgaaatcgaaggagctcgccgaatatgtcgggatcaccgaggccaatctgtccctgctcaagcagggcaaggtgaagggcgtccggttcgacacgctggagcggatctgcacctatctgaagtgccagcccggcgacctcctgcgccatgaagacgacgatgcgtcagcctgacacggccatccattacccaagcattaactttcgcgcgctacctaaggtcgaacttgcaagttggacttgggagtaccgcgtatggacacgatgagcatggtcaccagcatcctctcgatgcagcagggcaatctgcagggtgagatcgcgacccgcgtgaccaagcagaacctcgacgcggaaaagttcgcggttcagaccctgctcggtacgccgtcgaccgccaatctcggtgccggcatcggtggcaacctcaacgccgtcgcctgatcagaacccggccgccgcaggctgtagcgccgccttcaccagcttgatcgcgtcgtcgctcgcccattcggcggggccggcgatgttggcgatttcgcagcccttgccgtcgaccagcaccgaggtcggcatgcccaaggccttgcctatgttcttaagatcctgaaacaccttggctttctggtcgctgaaatagccgagattggtcagattggcctctttcaggaagtttttcggcttgtccgggtcgcgggtgtcgatgttgatcgcgaccacctcgaaatccttgccgccgagcttggtctgcaggctgtcgagcgccggcatctccttgcggcagggcacgcaccaggtcgcccacaggttcaccagcacggtcttgccgcgccagtccgaaagcttcttcggctgcccattggcgtcctcgaaggccaggtcgggcagcctcaagggagtggtcgccatggtcagcgccgcgacctcgccatgggcgagcggggcgatcttcttcgccaggtccaccgcgctgttgcaggcgatatcgccgccggcgggatgcctgaggccggagatcccgacatagccgatcacggctccgaccagcacggcgccgatcaccagcgggatgcgccatttggccgtcggcctggtggtcgattcgggtgggggcgtctcgggcatatcgtttgtcatcctgggtcagatatggctatgcaatgccgggaatacgttaggaaccgccatgctgtttcgccgccacgggcaatgaaccagcacggcctgaaatacaaattcgtgagcgagaagtcatgagcaacaagatgtggggcggccggttctcggagcgtcccgacgcgatcatggaggaaatcaacgtctccatcgacgtcgaccggcacctttatgcccaggacattgccgcgtccaaggcccacgccgcgatgctcgccgcgcaaggcatcatcacgtcagctgatgcgaaaaatatcggtaaaggtctagacacgattttgtcagaaatcggcaagggcgatttcgacttcaagcgcgcgctcgaggacattcatatgaatgtcgagtcgcggctgtcggagctgatcgggcccgcggcgggccggctgcacaccgcgcgctcgcgcaacgaccaggtcgcgaccgatttccggctctatgtccgcgacaccatcgatgagacgaacgcggcgctggccgcgttccagcgggccctggtgacccgtgcgctggagcatgccggaaccgtgatgccgggcttcacccatctgcagaccgcgcaaccagtgacgttcggccatcatctgctcgcctatgtcgagatggccggccgcgaccgtggccgctttatcgacgcgcgcaagcggctgaacgaatcgccgctcggcgccgcggcgctcgccggcacctcgtttccgatcgaccgcgccgcgacggcgaaggcgctcggcttcgaccgtccgatggccaattcgctcgatgcggtgtcggaccgcgatttcgtgctggagacgctctccgcggccgcgatctgcgcggtgcatatgtcgcgcttcgccgaggagatcgtgatctggacctcgccgctggtgggcctcgtcaagctcagcgacaagttcacgaccggctcgtcgatcatgccgcagaagcgcaatccggacgccgccgagctggtgcgcgccaagaccggccgcgtgatcggtgcactcaccgcgctgctgatcgtgatgaagggcctgccgctcgcctatcaaaaggacatgcaggaggacaagcagggcgcgatggaggcgttcgaggcgctgtcgctcgcgatccgcgccatgaccggcatggtcgaggatctggtgccggacgaggcgaagatgaaggccgcggccggcgagggctatgccaccgcgaccgacctggccgactggctggtgcgcaccctgaaaatgccgttccgcgatgcccaccacgttaccggccgcatcgtcggcctggcctccagcaagggcgtggcactgcacgagctgccgcttgcggccatgcaggaggtcgagccgaagattaccgccgacgcgctcaaggtgctcagcgtcgaatcctcggtgaaaagccggacctcgtttggcggcacggcgccgaagaatgtgatggcgcaggccaaggcctgggccaagcggctggaaaaagagcgaaaattgggctgatcgagaaaatttggccgtgatttcatcgtcctccgcctctcgccagagcacgccaatgtttgtatggtgccgcccgaattggggaattcgtcgtgattagcaagaaccgcctgaccccctcgggatgggccatcattgtgctgagcgtgtcagcgctggcgctcggcggctgcggccgcaagggaccgcttgacctgccgccgaccgcgaacgctgcgccgggtgcggcagcgagcgacaccgatagcgagcgggcggcgcagcccagcgtgttcaatccgacctatggctcggatgccgcgccggccgcgacgcgtggcaataaacggcccttcgtcctcgatccgctgctcggcaactaatatctggagcatgatccggaagagtgcgaagcggttttccgacgagatcatgttcaaacaaaccagcgtgtcatgaaccatttcgactatcgcaacggtgtgctgcatgccgaggcggtcaatctcattgagctcgcggaagccgtcggcacgccgttctattgctattcgacggcgacgctggagcggcactaccgcgtcttcaccgaggccttcgccggcgagaaggcgctggtttgctacgccatgaaggcgaactccaaccagtcggtgctgcgcacgctggccaaactcggcgccggcgccgacgtggtgtcgggcggtgagttgaagcgggcgctggcggccggcatcccgccgtcgaagatcgtgttctccggcgtcggcaagaccgagggcgagctgcgtgccgcgctggctgtcgacatcctctgcatcaacatcgagtccgagccggagctcgagatgttgtcgcgccttgcggtcgagatgaagaccaccgcgcggatctcggtgcgggtcaatcccgatgtcgatgccggcacccatgccaagatctcgaccggcaagtcggagaacaagttcggcattccgatcgcgcgtgcccgcgaggtctatgcccgcgccgcgaagctgccgggcatcaaggtcaccggcaccgacgtgcatatcggcagccagattaccgatctcggcccgctggaggccgccttccggctgctcgccgaattcgtgcagacgctgcgcgccgacggccacgacatctcgcatgtcgatttcggcggcggcctcggcattccctattacatggaccgcgccgcgccgccggaacctaatgcctatgccgcgatggtcaagcgcgtcacgcacaatctcggctgcacgctgatgttcgagccgggccgcatgatcgtcggcaatgccggcatcctggttgcccgcgtgatccatgtgaagccgggcgatgccaagaacttcgtcatcatcgacgcggcgatgaacgacctgatccggccgacgctctatgaagcgcatcacgacattctgccggtgcgtcagccagccgcgggcacgccggtcatggtcgccgacgtggtcggcccggtctgcgagaccggcgactatctcgcgctcgaccgcacgctgccgcagccgaaggccggcgatctgctggcgatcatgaccgccggcgcctatggcgcggtgcagtccggcacctacaacacgcggccgctggtgccggaagtgctggtcaaggacgaccagtacgccgtcgtgcgcccacgtatcgacgtcgacgccctgatcgcgatggacaagcccgcgccgtggctgtgaggctctgagcgtgccgcatcaatagtgtcgtcctggcgaaggccaggacccataaccaccgcccttgattgttacactgagctggggctccagctcagctaccccacaaaatcctgtggttatgggtcccgggtcgcgcttcgcttgcccgggacgacagcgtttgtttggtcgacagagtcacttcgctgcgtgactgccgcccttggctccgccgacgatcacgcccgcggccttctcgatcggcttgattgccgcagtgaaatccgactccggtccctcgtcgcggatgatgacctcccagagccggccgaccgcttcggcgacttccatcgacagcccgagcgcgcgcatctcctcgacggcgaggcgcacgtccttgaccatcaacccggtggcgaagccgaagtcgaagctgcgcggcaagaccgcgcgcggaaacttgtcgcggctcgcggtgttcagccccgagcccgcattgatgacgtcgatcatgacggccgggtccagcccggacttcacgcccatcaccaccgcttccgaggtcgcgaccatcgcggttgcggagaggaagttgttggccagcttcatggtctggccggagcccggcttggtgccgatgaagaacaccttgccgatgacgtcgagcgcgcccttcaccagctcgaaatcggcgcgcgggcccgacaccatcaccgcgagcgtgcccttctcggcgcctgacacaccaccggagaccgggctgtcgatctgcacgatgtgcttgttcgccagcagatcgtggatcttcaccgccatccgcgagccgacggtggagagatcgatgaagcgcttgacgcgcgtgccctcgatcacgccgcccgcaccggtcgcgacctcgagcgaggcttgcagcgacgggagactcgccatcacggtctcgacgcggtcggcgatgtccttgggcgatgtcgcggcctgggcgccgagcgcaaccagcctgtcgagcgcgtccttgctggtgtcgaatacggtgagcttgtggccggcctcgatcagccggcgcgccatcgggaagcccatcttcccgaggccgatgaatccgatttccatgggtcgtttccttttcttcgttatgcgcgatattccgcgccccacacgcgatgtcgtcctggcgaaggccaggacccattaccccaggagcttgttgtttcgccgatcaggggccacagctttcgtagcgatgacgttcggtggttatgggtcctggccttcgccaggacgacggcggtaagacagcagcgcctcacgccttgttgtcgagttcggcgaacacttcgcgcgcgatgcggaagctgtcgacgccggcggggatgccggcatagatcgagacctgcatgaagatctcgcggatctcgtcgcgggagacgccgttggtcagcgcgcccttgatgtgcgccttcaattcgtgcggccggttcaggatcgagatcatggcgaggttgagcatgctgcgggtcttgcgcggcagttcctcgcggccccagaccgcaccccagcaatattcggtgacgagttcctggaacggcttgttgaagctgtccgagttcttcagcgcattgttgacataggcctcgccgagcaccgccttgcggatttcgagccccttgtcgtgcgtcttctggtccatatcgtttcctcgtgcgtttaggcttgggttcggtccgggaagttacggggtcgaaccgccgcagtcacgccttcgtgttatgcgtatttcccggtgtgggttacgtcggggaacgggtgcctcaaagccgccgccgtgctaggctgacctgcgggctaccccggagattttattgagcggagccaacatcgacccgtctgccaacccgtcaagcgccgcgcgcgacagtgatgcgagtgcacggctgaagctgacgcaacagaggctcaccgaggccctgcagcgggcaaaactcgcgattgcgtgggaacgggcctggccgcatctggcgcggttcctgacggtcgtgggtctgttcctggtcgcgtcctgggccgggctttggctggtgctgccgtttgccgcacggctggccggcgccggcctgtttgggcttgccgcgctcgcgacgctgttgccgctgctgcgcttccgctggccgagccgcgaggaggggttgagccggctcgaccgcggcgtcggcgtccggcatcggccggcgaccacgctttccgatacgctcaccaaccaggatccgttcgcgctggcgctgtggcaggcgcagcgcgagcgcacgctggcgtcgatcaagcgtatccgtgccggcctgccgcggccgcgcgtctcgctgcacgatccctgggcgctgcgcgcgctggtcatcgtgatgctggtcgcgagctatgtcgccgccggcgacgaacgcggcctgcgcgtcgcctccgcgttcgactggaacggcatcatggcgccggccaatgtccgggtcgatgcctgggtgacgccgccgaactacacggccaagccgccgatcatcctgtcgagttccaacaaggacgccaacgcggccgatgcgaccccgctcgcggttccctcgggcagcacgcttctggtgcgctccagcggtggcgccatcgacgtcgtcgtgggtggcggcgtcaccgaggtcgcgcccgaagggcaggcgccgaaggggaccaatgagcggcatttcaagatcaccgccgacggcaccgcgcatgtccgcgccccggccggccagccgcagtggaagttcaccgcgacgccggaccgcccgccgtcgattgcgctgaccaaggatccggagcggcaggcgcgcggcgccttgcagatgtcctacaagctcgaggacgattacggcgtgaccgaagcacgcgcgcagttcgccgcgcggcccgccgatgtggcgaaggatgccgacggcaaggccgcgcagcggcggccgctgttcgagccgccgcagtttccgctggtgctgccgaatgcccgcacccgtaacggcgtcggccagaccgtcaaggatctcagcgaagatccctacgccggcgccgaggtgacgctgacgctgaccgccaaggacgaggccggcaatgagggcaagagcgagcccttcaacatgcgcctgccggagcggctgttcaccaagcccctggcgcgcgcgctgatcgagcagcgccgtatcctggcgctcgacgccaaccagaacggccaggtctacgccgcgctcgatgcgctgatgatcgcgccggaaatgttcatgccggagaccggctattatctcggcctccacaccgtggcccgccagctcgaggccgcgcgcaccgacgatcagctgcgcgaggtcgtcgccagcctgtgggcgctcgccgtcaccatcgaggacggcaacatcagcgacgtcgacaaggcgctgcgcgcggcgcaggacgcgctcaagcaggcgctggagcgcggcgcgagcgacgaggagatcaagaagctcaccgacaatctgcgcgcggcgctggacaatttcctgcgccagatggtcgagcagttccgcaacaatccgcagcagctcgcccggccgctcgatcccaatgccaaggtgctgagccagcaggacctcaagaacatgctcgatcgcatggagcggatgtcgcgctccggcgacaaggaggcggcgcggcagctgctcgagcagatgcagcagatgctggaaaacctgcagatggcgcagcccaatcagggcgacgacgacatgcagcagtcgctcaacgagctcggcgacatgatccgcaagcagcagcaattgcgcgacaagaccttcaagcagggccaggattcccgccgcgaccgcatgcgcggcaagcagggcgatcagtcgatgggtgacctgcagcaggatcagcaggcgctgcgcgaccgcctgaagaagctgcaggaagagctcgccaagcgcggcatggggccggagcagcgcggccagaagggccagaaaggtcagaagggcgatcagggccagcagggcgagcaaggcgacgatcagggtgacgatggcgacgggctcgaccaggccgattccgcgatgggcgatgcctccgggcggctcggcgaaggcaatgccgacggcgcggtggattcgcagggccgcgcgctggatgcactgcgcaagggcgcgcagaacctcgccgatgcgatgcagcaaggcgacggcgaccagcagggcgacggccccggcaaccgcgtcggccgccagcagagcggcggcaaccagaccgacccgctcggccgtccgttgcatggccgcgaattcggcgacgactacaccgtgaagatccccggcgagatcgacgtccagcgcgtccgccgcatcctcgaagagctgcgccgccgcctcgctgatccgtcacggccgcagatcgagctcgactacatcgagcggctgctgaaggattattgacatcaccgcacattccactggatcgcccggttcaaccgggcgatttagtctcccagagacgtcagtgcttgaatcgagaagccgcggcgtactggatgcctcgggaaagtcgcgcgccgcggtcagcgccagcgcgatgccgtccatcacgggcatctggatgtcggtgagcaggaggtcgaaggcgccgtcatggcgcgtcaaaacctccagcgcctcggcgccgtcctgcgcggtcacggtctcgtggccgtccatggcgatggcgcgcgccaccagcgagcgcatcgaatcttcgtcgtcggcgatcagaacacgcgtcatggtgagtgtcggttcccgcaagtgttggcgcgcagcctcaggcgcggccgccggtgaggtcatgcttgttgaagaagcgtacgtcgatattgcggccttcgggcggcggcgaggcgaggcgcgacttgaagaaggcgcgttcgccgggattgagcaccggctgctccagcaccgcgttccaggcatagatctcggcaccctgcgcgtcgcggaccgagaagcgcagccgcggcagttcgaccggtttcctggtctggccgacgatcatgccctcgatcaccaggaccggcttgccgtccacggtctcgttggtgatcttgaggtccttgaaggcgaggccgcgcagattcacgtcgagcccgaccatcttgtagaacagcgcggtctgcggcagcagccgcaccacgtcgttgcgccagacgaacagcgcgatgatcagcgcggccatcgcggcgcaggtggtcggcagcgcgccgatcaccggcatgaacggaatccggggcagggagggcaggcggaacaggcggggaagcaggtggaaacggcgctttccggtcgcctccgcgccgtcggtatgggcagcggcgtccgcctcggccaccgccggccacgcggtcgctgcgtcgctcccctcgggcagatcggccgaaatcgaggggctctcgaccaccggggtctcgtcagcctcctcgcggcccatcgcgtcccattcggcggccagatcggagcccgcggactgataggccagggtcggcgccgtcgccccgatcgcatcctccggccgggccagccagacctcgcggcaacgggaacaacggacggtgcgtccggcctccccgagggtcgccggattgatggcataggatgttgtacagtgcgggcaaacgatatgcatggagccgaatctccaccgtgtggtatgcccggatgctaccgagcgaccgttaacgaatcggaaaccataaccgacgcacaagctttctgtgcggttcgcggccggtcgggccgccagtatggggtatcgggccaaaggccctctcgaacggagctagcgcattggttcggttcgaaaatgtcggtctgcgctacgggctcggcccggagattttgcgcgacctctccttcatgatcccggcgcactcgttccagttcctcaccggtccgtccggcgcgggcaagacctcgctgctgcggctgctgttcctgtcgctgcggccgacccgcgggctggtcaatctgttcggcaaggatgtctcgctgctgagcaaggaccaggtcgccgacctgcgcaagcggatcggcatcgtgctgcaggatttccgcctgctcgaccacatgaccacctatgagaacgtcgcgctgccgttccgcgtcatgggccgcgaggaatcgacctatcgccgcgaggtgatcgacctgttgaaatgggtcggcctcggcgagcgcatggacgcgctgccgccgatcctgtcgggcggtgagaagcagcgcgccgcgatcgcgcgcgcggtgatctcgcggccgcaattgctgctggcggacgagccgaccggcagcgtcgatccgacgctcgggcgccgcctgctgcggctgttcatcgagctcaacaaatcgggcaccgcggtcatcatcgcgacccacgacatcacgctgatggatcaatacgaggcgcgccggctggtgctgcatcagggacggctgcacatctatgagtaggagcggcgacgagaaagtgtcgttggtcgatctcgggcgcgagcgtccgcaggttccggccacggcgcgcaacatgtcgccgatcgtgccgcgcgcctcgatctccggccgcgcgctggtcgcggtggtcgcgatcatgaccttcctcgcctcgctgaccacgggcaccgtgctgctggtcagcgcgtcggcggccgagtggcaatcggaagtctcgagcgagatcaccatccaggtgcgtccttcgccgggccgcgacctcgatcgcgacgcgcaggcggctagcgatgcgatgcgggcgcagtccggcattctcgaggtccgtccgttcagcaaggaggagagcgccaagctgctcgagccgtggctcggcagcgggctctcgatcgacgaactgccggtgccgcgcgtgatcgtggcgcgggtgcagcccggcaccacgctcgatctcgcgagcttgcgcgcgcgggtgacgcaggtggcgccgaccgcgagcgtcgacgatcaccgcgcctggatcgagcgcatgcgctcgatgaccggcgccacggtgttcgcgggcgtcggcatcctgatcctcgtgatcgtcgccacgatcatttcggtgtcgttcgccacccgcggcgcgatggccgccaatcgtccgatcgtcgaggtgctgcatttcgtcggcgccggcgacagcttcatcgccaaccgcttcctgcggcacttcctccggctcggcctcgaaggcgggctgatcggcggcggcgcggcgatgctggcgttcggcttctccgagtcgatcgccaactggttctccggcacgccggtgggcgaccagttcgcggcgctgctcggcaccttctcgctgcgtccgtcgggctatctggtgctggcgctgcaggcggtgctgatcgcggcgatcaccgcatgggcgtcgcggcgcaccctgttcgccacgctcgacgacatcgactgacggccgcgtcacgatggcggcgatttcgtgatcgcggtttcgcggagcaggtgtgatccggcgtgcgcgcgcgcaggtcccggccggcggcaaaaccggtttccacttttccggatcatgctctaaaatccccggggggaagggtaaccgcatcacatgagttcgcagcccgacgatacgtcgccgaatggccatgccgcgcgccagcgcggctggctgcgcgccgccgtcgtcgcgccgctggcgctggccttcgtggccgccgccgtcggcttcatcgccttcctgtcgcaattgcgcggcgtcgagaccgatccgccgcacaatgccgacggcattgtggtgctgaccggcggctcgtcgcgggtgtcggacgcgatggagctgctggccgcgggatacggcaagcgcctgttgatctcgggcgtgcatccgaccaacgaggccagcgatatttcgcgttcggtgccggacagccaggggctgatgcgctgctgcgtcgatctcgaccgctcggcggtcaacacccgcagcaacgcggcggagacgcggcgctgggcgcgcgagcgcggcttcaagtcgctgatcgtggtgacctcgaactaccacatgccgcgcgcgatcgtggaactgtcgcatgcgatgccggacgtcacgctgatcccgttcgcggtggtcggcgacaaatggcgcgacgaaccctggtggacgagtggcggaacgttccgtctcttgctatcggaatacgccaaatatgtcgccgccgaggtccgggtgcggctcgccgacctcgggctcgacctgacctccgatctcgccgagccgacagccacgccgcgccgcccggcgaccgcgcaggcgtcaaacaaggactgaaatgatcttcctgcgctcgctgatcttcaacgtgctgttctatctggtgctggtgctgctctgcatcgtcgcgctgccggcgctgctgctgccgcgcggggcgctgatggcgatcgaggcggcgtgggccaacaccagcctgttcctgatgcgcgtgatctgcaacatccggatcgagttccgcggcgtcgagaagattccggcgggaccgctggtcgtcgcctccaagcaccagtcgttctgggagacgtttgcgctggtgcgcttcttcgagcatccgctgttcatcctcaagcgcgagctgatgatgatcccggtgttcggctggtacctgaagaaggtcggcatgatctcggtcgagcgcggcggcgggccgcgctcgctgatcaagacgctgaagcgcgccgcggccgaggtgaagctcggccggcagctcgtgatcttccccgaggggacccgcaccgcgcccggcgccgagccaagctacaaggccggcgtcgcgcagatctatgccgagagcggcgtggcatgtctgccgatcgcgctcaattccggcctgttctggccgcgccgcaccttcatgcgctatcccggcacactggtggtcgaattcctcgatccgctgccgccgggcctgccgcgcgacgagttcatgacccgcctgcgcgaggcgatcgaaaccgccaccacccgcatcgtcgaggccggccgcgccgagcaggcgaagctgttcggcggcgtgccgggtgcgaaggggtagggctggaagtcaccgcatcacgaacggattggccggcacgtcggtcgcggtcgagatccacacgctcttggtctcctgatattcgcgcaccgcgtcgatgccgctttcgcggccgacgccggaaaacttcatgccgccgaacggcatcatgtagctgatggcgcggtaggtgttgacccataccgtgccggcgcggagctgcttcggcacgcggatggcgcgggcgaggtccttggtccagatgccggcggcaaggccgtagatggtgtcgttggcgatccggacggcgtctgcctcggtgtcgaacgagatgatcgacagcaccggcccgaacacctcctcgcgcgcgatccgcatcgaattgtcgacatcggtgaaaatcgtcggctcgacgaattgcccgcccttgatgccgtcgccggaggcaggcctcccgccgagcaggcagcgcgcgccttccgccttggcgatatcgatgtagtcgagcaccttcttgtattgcgcgggtgtggtgatcggcccgacattggtatctgcttgcatggggtcgccgatcttggcggacttggcgagctccagcacccgcgcgacgaattgctccttgatcgagctctgcaccagcaggcgcgagccggcgatgcaggtctgccctgtggctgcgaagatgccggagatcgcgccggcggcggcggccgtgaggtcggcatcctcgaacacgatgttgggcgacttgccgccgagctcgagcgagacgcgcttcaggctcttggccgcggtctcgtagacctttgcgcctgtggtgtccgaccccgtgaaggtgatcttggcgacgccgggatgtgagatcagcgccgagccggcctcgggaccgaagccggtcaccacgttgaagatgccgtcgggaattccagcttccttggtcagcgcggcgaattccagtgtgctggccgaggtgaattccgagggtttcacgatcacggcgcagccggccgcgagcgcggcggcgcatttccaggcgacgaacagcaacggcgaattccacgcggtcagcgctgcgacgacgccgaccggctcgtgcgtcgtgtaggcgaaggtctccgccttgtcgatcggcaccaggccgccctcgagcttgtcgacgaggccgccgaaataccaccaccattccggatggtagcggagctggcccagcatctcggccatcagcttgccgttgtcccgcacctcgatctcggcgaggcgttcggcattggcggcgacgaggtcgccgagcttgcgcatcgccttgccgcgggcggaggccgtcatcttcgcccacgggccgttccacatcgcctcgttggcggccttcaccgctttgtcggcatcggcggccgtgccgcgcggaatcttcgcccaggcctcgccgcgatagggatcgatggtgtcgaaccattcgccattgaccgggtcgacatactggccgttgatgtagagctgataggttttcatgacatcctcccgcagcgattggattgggtttcccaaacgctatcacgccttgcgcgacgccgtcataacgcggccgcgggaatgggttgcagccggctggggcgtcgcgcgtgcggcgcggcaagctcggtgcgggtctgtcaacgactggcggcgcttgtcgccgcgcggcgggcacggcgtgccgcccggcgccgctgggtccagagccgcgcgcggtcgagatagagatagaccaccggcgtggtgtagagcgtcaggatctggctcaggatcaggccgccgaagatcgcgtcgcgcgacgacagcccgcgctggcgctcggcgtcgagcgcgaagtcgatcatcatgatcgcattcttcttcacgatgccgaccaggaggatcaccccgatcatgccgatgatgtcgaaatcggtgtgcgacaccatcaaggccgccaccgcgccgacgccggccgaggtcaaggtggagaggatggtcagcgggtggacgtagctctcatagagcatgccgagcgagatgtagatcgtcgcgagcgctgcgagaatcaggaacagctcgttcgccagcgcctgctgaaagaccttcgcggagcccgcaaacccgccggaaatgctggccggcatgttgatcgcgtgcatcgcattctcgatcgtggtggtcgccgtgctcagcgagacgccgggcggcaggttgaaggagacggtgctggcgaccagcaggtcctggtgattgaccgcgagcggcgtctcgccatgctcgaagcgcgcgacgctcgacagcgggatcatggtctcggcgttagtcgagaccgcggttccggtcgaggcgacgcccttgccggtggcgccgatcgagttggtggcctggttgcgcaccacattggcggcgatcgaattgagcgagctcttctgcgacgaggaggcgaccgttccggccaccgcattggtgctctgggtgccggtcgccgacccgcccgaggtcgagatatagacctccttcagggtctgcgggtcctgcgagaagcgcggcgcgacctccatgatcacgtgatactggttgcgcgcgacgaagatggtcgagacctggcgctgtccgaacgcatcatagagcgtgttgtcgagctggctgacggtgatcccgagccgcgaggcggcgtcgcgatcgatcacgaggttggcctgcaacgcccggttctgctgatcgctgttgacgtcggcgagcgtcggctccttctgcagcgcggcgacgagcttcggcgtccactcgttcaattcctcgaaggtcgagcccttcagcgtgtactgatacgcggcgttgccggagcgcccgccggcgccgagatcgccgatcgattgcaagaacagggtggcgccggccacgcttgccaacggctcgcgcagccgctcgatcaccttgtcggcgcgcagcctgcgctcgtccatcggcttcagcgaggcgaacacggtgccggtgttggtgccgcccggtccgacgccgccgccgccggtgaagccgaccgcggtatcgaccgccggatcggccttcacgatgtcgatgaactgggtcagcttctgctgcatcagctggaacgaggtgctctggtcggcctggatcgagccgatcaggagcccggtatcctgctgcggcacgaagccctttggcacgacccgatagaggtggaagttcagatagagcgtcgaaccgaggatcagcatcaccagcagcgggtggcgcagcgcgaggccgagcgtcgcgcggtagccgcccagcatcagctcgaacacgcgttcgttgatgcggtagatccggccgtgcggctggccttcctcttccttgcgcagcagcacggcgcacatcatcggcgtcgtggtcagcgagaccaccagcgagatcacgatcgcgatcgtgatcgtcacggcgaagccgaccaacaggcggccgaccaggccccccaccagcagcgacagtccggcatccatgtggcgggtaatgttttccagcaccacgatggcgtcgtcgaccacgaagccggtcgccaccgtcagcgccatcagcgagaagatgtcgagtgtgtagccgagcagatacatcatggcgaaggtcgcgatcagcgacacgccgaccgccaccacaggcaccagcgtcgcccgcgcattgcgcaggaaggcgaacacgaccaggatcaccaaagcgaccgcgatcagcagcgtgatctcgacgtcatgcagcgaggcccggatcgtcttcgagcggtcgaccgcgagcgtgaggtcgatcgcgggcgagaccgaggccttcagctgcggcatcagccccttcacaaggtcgaccatcttgatgatgttggcgccgggctgccggtacacgatcatcacaacggccggcttgccgttggcgaggccgagcgtgcgcgcattctccacggagtcgatgacgtcgccgacgtcggtcagccgcaccgctgcgccgttgcggtaggcgacgaccagcggcttgtagtcggcggccttccgcgcctggtcgttggcgtagatctggtagcgctggtcgccgacgtcgatgccgcccttcgggctgtgcgcattggcgctcgacagcgcggcgcggacgtcctcgagcccgatgccgtatttgtagagcgccggcgggatcagctcgacgcgcaccgcgggcagcgagccgccgccgaccgagacttcgccgacgccctcgacctgcgacagcttctgcgccagcacggtcgaggcggcgtcatagagctcggccggtgtcagggtgtccgaggtcaaagtgtagatcaggatcggcgccgaggccgggttgaacttgcggtaggtcgggttggcgcgaaggttggtcggcaggtcagcccgcgccgcgttgatcgcggcctgcacgtcgcgcgcggcgccgttgatgtcgcggtcgatgtcgaattgcagcgtgatgcgcgcggagccgagcgaggacgtcgaggtcatttcggtgacgctggcgatctggccgagatggcgttccagagggctcgccacggtggcggcgacgtcggccgggctcgcgccaggcagggtcgcctgcaccatgatggtcgggatgtcgacgtcgggcagcggcgacaccggcagcttgaagaacgcaatgacgcccgccaccaccagtccgagagacagcagcgtggtgccgaccggccggcggatgaagggggcggagaggttcattgcatcagtgtcgatgttcgcggatgagcttctatccgtccgcgccgcgatgcaaaagcctaaatgtcacagcgcgctgccttagagaagccgcgatgtgtcggatgcgcagtgccgcggaccgaaaaagcgcgatctggcaacaagccgtttacaaagcccgatcgaggcagctgatggagagggggcgcgcggacgatttgcgtaggatggatggagcgaggcgatacccatcgcctcattgcgtggatgcggttgatgggtatcgctgcgctccacccatcctacgagatcagcctgatgcagcgatatcgccgtccggccgcgcctcagttcggatccacgtcatccgccgcacgcgcatcccgatgcagcgggcctgcgtcgtgcagcatcgccgcgagctggtgcagctgcgcgtcgcgcaggccctgcttctcgatcgcggcgacggtcgagagcacatagtcgcggttgttgccggagcggccatagccctgcagcaccaggcgctgctgctcggccagcgacagccgcccggcatattgcacatggccgcgatcgaccacgtaggccagcgccgagacccgatcgcgtgccgcgttctccagccacaccgagcgcatcacctcgcggtagacattggtggtctgctcgcgcgctcgcaaataggcgatggtgtcgtggcgcaggcgggcggcgacgcggaacgcgatgccgcggcaggcgccgccgcggtcgagcccgagcaccaggcctggcttctccggcgtgccgcgatggtcgaacgaatagacgcagagcgcgcgatgctcgccgatcagccgcgccggcacctgctccaggaactcgaagcccggcttccacatcaacgagccgtagccgaacacccagaggtcgccgtcggtttcggaatggggaggatttgctgacatcgcgcagatgggctagcagaacgggccgtcgaagcgaagcagattccgtgatgtttccaagggttgcgggagggttgcgcgaaggttgcgtaaggcttgcccgcggcctgctgccgcttagattttgacaaattcgcgctccaaaggacgccgcatgtccgattcgacctctgctccccgccgccgctcgcgcttcggcctctatgccgtccccgtcgcggtcctgatcgccgcggtgctgtggagcggtttctggttcttcgccgcctcgcaggtcggcgtgcaggccgatgcctggcgcgcgcaggaggcgaaagccggccgggtctatgattgcgacaggcgctcggtggcgggttacccgttccggctcgagatccgctgcgagcagccgagcgtgatgctggtgtcgcagaccgcctcgccgcagatgtcgttcgtggcgcggctggccgagattctggtcgtggcgcagatctacgatcccaaactcgtgatcgcggagttcaagggcccggccacggtcgccgagcgcaacgcgcagccgacgctgtcggtcgactggcgcctcggacgcgccagcgtggtcggcctgccggcggtgccgcagcgcgcctcgctggtgttcgacgatctcgccatcgatcgcaccggcggtgccgcgccgacgccgctgatgcgcgtcaatcacatcgagctgcatggccgccaggtcgagggttcggcgccggataaccccgcgatcgaggccgtgttgcagattgccggcggtaccttgcaggaggtgcatccgctgctcacccagccgttcaacgccgacatccatgcgcgcctgaacgggctgaaggatttctcgccgaagccgtggccggatcgtttccgcgagatccaggccgccggcggcagcgtcgagatccagcagtcgcggatcgaacagggcgacgtgctgtcggtcgcggccggcacactgcgcctcaacgcgcaaggccgcatcgagggcgagttgcagatgacggtcgccggcctcgagcgtgtcattcccgcgctcggcatcgacaagatgctggaggacggcgtgccgcaggcaacgctcgatcgcgtcgcgcctggcgtaaagagccaggacctcagcaatctgttcggcgcgctggatcgcgcgatccccggcctcggcaaggtgatcaagcagaacgccaatgccggcatctccgccggcatcaattcgctcggcaccgaggccacgctcgaaggcaagaaagcgcgcagcttcccgctccgcttcgccgacggcgcggtgtttctgggcccgctgaaggtcgcgcagatcccgccgctgttctgagcagcgtgctcagtcggccgggatgaagcggagcgtgccggcgcgacgcgtcggcttgccggtgtcgttggtgtgattgacgccatccatgaccggcacgtcagggaaatcgaacgggctgaccccgtccaggcaggccacgttgacggcatagaggttctggtcggaccgccgttggtgatgggtgtagattccgcagcgggaacagaagaagtgctgcgccgatccggtatggaagcggtagcttgtcagcgcgtcctcgccttgcaggaatctgatcccgcccatctcggccatggcgacgacggcgccgcgcatgcggcagtaggagcaggtgcagcggcggatcgagttgaagccgtcgctgagcgccacctcgaagcgcacggtgccgcaatggcactggccagtccgaatgttcgtgccgtccgccatgttgtgtgcccctgttgatcgcctgaccgcgacatggacgtaccgccaaaatccgagccggacaatccggtaaaaactcgcgcatagcgcgagaaaaactcacgccaaggcgcgacgtcggccttgccgcttcgcagggcggatttgccgcaacgcgtcatccgccgtccttcagcgccggctgtgcggcgcattgcgcttcgctgatccaccccacgattcattaaaccctcgcgcgcgatatcgtccatcacggcaatctattcccgcggccgcgatgagaaaaacgtgaccgcaatcttgcgggccgccgcgaatatcattccccgagtaccgctctctctcgcctgaggaaacaacctcgtgtggaggaagcgatgcgaattctcgggggaattctgctcggcagcatgctgctgtcgacaggtccagtgttggcggaagacgatgcgtccgagctgcgggccctgaaggcacgtctcaggcagctcgaacagaagatggaagtgcaggcccgcaaggaggaggcgctggcagcacgacagagcgcgatgcaagacacgaggatggcggccaaggcgccggtgccgttcgatccctgcgcatcgggcaagctctgctacaagggcgtgaccttcaccttcggcggctgggtcgatctcaccggcatctaccgcacccgcaatcttgcttccgacacgggctcggtctacgccttcattccgttcccgcagagcaagaatttcaacaccggcgagtcgcgcttctcggcgcggcaaacccgtttctcggtgcttgcggaagccgaggtgttcgccaacacccgcgtcgccggctatggcgaactggatctcgagggagccgcacagacggcgaattcggtcgcgaccaactccttcaacccccggctgcggcaggccagtgtcgagatcagccgcagcgatctcggcttgcacgtccttgccggtcagagctggtcgctgaacgcgccgagcaaggcgggtatcgatccgcgtggcgtcgatgcgcccggcgtgatcgatttcgaatcggtgcccggcttcctcgcggcgcggcagcccggcatccgcgtctggcaggatatcgggcccgaattcaagctcgccgtctcggcggaaaatccgcagacctcgttcttcggcggcaacgcgccgctggtcggcacgcccgcggtcgggccgcagggcgtgctcaatccgaacctgctggtcaacctcaccgggccgggcggcagcttcttcaacaacgccaataatgtcagcctcaatcacgtgcctgacttcaccgtgaagggcgcctgggatccgcggctcggcgcttacaagctgcatgtcgagggctgggcgatgtaccgcgacttctacgatcgcttcaacttcgccaatcacgacgtcagcacggtgagcttcggcgggcatttctcggcggagatcgtgccgaagctcttggagctgcaaggctccgcgtcgcacggcgcgctcggccgcttcaccgcggcgccgttcccggacgccacggtgcgccaggacggcacgatccagccgctgccgatcaccgcattcctgctcggcacggtctggcacacgacgccgtcgctcgatctctacgcctatgccggcctcgagaagaccaagccgacgttctccaatgtcggcacggtgccgttcggctacggcaatccgctctacaacaatctcggctgcaacatcgagaactcgccggccgcgacctgcaacggcaacacctcggaggtcaggcaatacaccgccggcttctatgacacgatcttcaagggcgattacggggcgatcaaggccggcatccagtactcctacaaccagcgcttcgccttcgcaggtgtcggcggcgcgccgaggaccgacgaccacatcatcatgtcgcagatccgctactacccgttctcgccgtagcaacggagagcgcgcgcagggccgtcaaaggagaccgcacatgaggatcgtgagcagaaaggagagggccatgatcgctcgcgagttgctgatggtcagccgcgccgcgcatgtgctgcagcgaaccggcctggcgatggccggcgccatgggcggcaccttcgttgccgcccagctcgcgagggggcacatcgcattcttcggtacgctggccttcatcgcgacgacgatcgtgatcggtgccgtcggcttctatctcggcatcgatgttccgcggccgccgatgcgcgccaccgggcgcatcgatgccgtcgagctcatgagcgctggcggcatcttcctcgccgcgctggctgcgctggtgtcggtctacggcatcatcttcgacgagattccgccgcgggcctgggagttcgtgatcggctcgtggtggttcggcggcattgtcatgctggcaaccgccggcctgctcggtcgccggcggccaacgcagaaggttgccgcgatgtcggcggggccgatccgggatcaacggttgcgacggtgagcgtgccctgctgcgccaatctgtcccgtagctgcgacccgccgatacgataccctcaccgaaaaatcggggaggaaccagaatgccagcgaagattagccgccgtcacctcatcacggccggtgctgcggcggccgcgatgccttggctgtcgcgcggggcctcggcgcagggcgcgtggccgtcgcggcagatccgcatgatctgcagctacccggccggcggacagaccgacctcctggcgcgcgccttcggcgagttcatcgcgaggcaggtcgggcaaaccgtcgtcatcgagaacaaggccggcgcgtccggttcgatcggcgccgcggaagtcgcgcgctcagcgcccgacgggcacactatcctgtgctcgatctcgactacctatgtgatgaaccgggcgatgatgaagaaccccggctacgacatggacaaggatctgaccttggtcagcgtcattccgggcggcgggttgctgctggtcgcgagcccgaaactcggcgtcaagacgctcgcggaattcgtcgcgtatgcgcgcagcagcggcaaggtgaacttcggcacctacagcgcgggctccgccccgcacatgacgatcaacgagctcaacaagcaatacggcctcaacatcgagccgatccattatcgcggtgaagcgccgatgtggacgggcttggcggaaggcacgctcgatgttgcgatgggcagctacaccgcggcgcagaccgtgctgcaaagtggccgcggcgtcgtcttcgccgtgcacgcgaagaaggttgatgcgatccccgagatcaagacgctgcccgaacagggcacgacatcgaaattcttcaccgtgagcggcttctccggctgggccttgccgaaggcgacgccgcagccgatcgtcgatcggctcgccgagctctgcgtcgccgccaacaacgatccgagggtgaaggaggtgctcgcgaccttcgtgctcgagcccgcaatcggcttcaaggacagcaatgcgctctatcagcgcgaattgccggtctggatggaggccgcgcaatcgctcggcctgccgccggcgtaagtcgttcggaattgtaggatgggtagagcgcagcgaaacccatcgatcacactcgctgcgccaatgatgggtttcgctgcgctctacccatcctacggtgctgcgacgacgccgtgtgtttgatatcttgaatcgagaaccatcctcatcgtcgtcccggcgaaggccgagacccattaccccaaatcgcaattgttgtgcgacgctgggaccacgatccccgttcgcaagcaaatgcggtggttatgggtcctggctttcgtcaggacgacgatgtggggaaagctgcgtgcccgactgctacttctgcaaattcgcgtgcggacggccgaagtcgggcgcggcggagtcctggccggtctcgacgatgccgcggcggatggcgcgggtacgggtgaagtggtcgaacagcgcttcgccgtcgccgcggcggatcgcgcgggtcagcttcgacagatcctcggtgaaggtgccgagcatctcgagcacggcgtccttgttggcgaggaacacgtcgcgccacatcgtcgggtccgaggccgcgatgcgggtgaagtcgcggaaaccgccggcggagaacttgatgacctcggattccgtcacctgcgccagctcgtcggcggtgccgacgatggtgtaggcgatcagatgcggcagatggctggtgatcgcgagcacgaggtcatgatgatccggcgtcatgatctcgaccttggcgccgagcgcggcccagaacgcgcgcagccggtcggtcgcggcgggatcggcgccttccggcggcgtcaggatgcaccagcggttgatgaacagctcggcgaagccggaatccggaccggagttctcggtgccggcgaccggatgcgcggggacgaaatgcacgccttcaggcagatgcggcgccatgtccttgacgacggcgcccttcaccgagccgacgtcggagacgatggcgccgggcttgagatgagcggcgatctcggccgcgaccgggccgcaggcgccgacggggatgcagaggatgacgagatcggcatccctgacggcctcgacattggttgcgacgacgcggtcgacgatgccgagctcggcgacccgcgcgcgcgtcttctccgagcgcgcggtggtcacgatctcgccgacgaggccctgcgcgcgcgcgccgcgcgcaatcgagccgccgatcagcccgaagccgatcagcgcgatgcggttgaaaagcggagccgtggtcacgtcgtcactttccggttccggccaggaagtcgcgcagcccctcgaccacgaggcggttggcttcctcggtgccaatggtcatgcgcagcgcatgcggcagcttgtaattgttgagcgcgcgcagcacgaggccgcgtcgcgtcagataggcgtcggcttcggcggcggtcctgcccttgtcggtcgggaagtggatcagcacgaaattggcgacgctcggcgtcaccttgaggccgagcttgccgatctcctcggtcagccagttgcgccattgttcggtgtgggtccgcgacatctgcacgtgcgcagtgtcctcgatcgccgccaccgccgccagcatcgcaggggtcgtgacgttgaacgggccgcggatccggttgcaggcatcgacgatatgcgccgggccgaacatccagccgacccgcagcgcggcgaggccgtggatcttggagaaggtgtgcgtcaccaccgtgttgtcggtggtcgcgaccagctcgatgccgagctcgtagtcgttgcgcgagacgtagtcggcgtaagccgcgtcgagcaccagcagcacatttgagggcaaggcggcacggagccgcttgacctcgtcgaacgggatgtaggtgccggtcggattgttcgggttggcgagccagaccagttttgtgcgcggcgtcaccaccttgaggatggcgtcgacatcggcggtgaaattgctttcggccgcgatcacgttcctggcgccgttcgccatggtggcgatcgggtagaccaggaagccgtgggtggtcgagatcgcctcgtcgccgggcgcgagataggtgtgcgccagcagattgaggatctcgtcggagccggcgccgcagatgatgcggtcgggatcgaggccgtaggcgcggccgatcgcctcgcgcagcacacgcgaggtgccctccggatagtcctcgagatggtcagccgcggccttgtaggccgcgatcgcctgcggcgacggcccgaacggcgtctcgttggcggacagcttgaacaccttgcggcccggttccggcaccgggctcttgccgggtgtgtagggcgcaatatcgagaatgccggggttcggcacagggcgggacatcatctactccgatgggcggacgggccgatgcttaatctagctcttggccgatccgttagagggcaccgtatagcgcgttgcgtggctgccgacgagggccgaagagcgcaccgaggcgccggccttgatcaaggcgagcttgatggcctcgaaacccttgctctcagggccttgcccggcgaccgagaccagcagcgccgcgccgtcgaaggcggtgtcggggaccgccacgatctcggcgagcggcgccagcgcgcgggcgacgtcggcgttccagccggagacgcgcacgctccaggtctgcacctccgtcaccatggcgtcgtcggcgacccgcgagatcaggaacaccggcagcgcggcgggatggtcggcgcgttcgaggaacggcagccgcgcgatgatcttcggcgcgccatcggcctccagcgcattccaccacggcgtgcggctcgcgatcgcggagaccagcgcgagatcgcccttcgatttcgccgccgcctcgaccgcggcctgggcgctgaaatgcgagacgtagggcaccacgaagccgaagtgaaaccgcgccgagtcgcgcatcgcctgctcgccgacggagacatcggcatgcacggcgaatggcgcctgcacataggtgaaggtcgagatgatgacccgccagatgccctcgatggtgtcgagcggcaggatgccgcgatggcgctgcaccagctcgcgcatcatgctggcctcgcgcgccggacggaacgccgagcccacctcctgggtcttcttgacctggatcaggcggtcgatgatgtcgccgcgcgccatcagcaggcggtgaacctgttcgtcgatcgcatcgatctccttgcgcagctcctgcagcgtaggcggcgacgggggtgggttggacatgctctcaaaccttgtcgtccgagcggcccgatgccgcgtcagacagggctcctgattaggaaagacggccaccgaaagcaaagagaaacgtcgcagccgtgcgttgcgcaatcggttaaccaatcagccggcgatgcggctggcttgacgtcgggagacctcgggactaggtttcggctactccgtggtcatttgagccggccggcttgcagccacgttaaacaactcgctaaacaggccggggacagtcagctcccggccgaacctttgttcaggccgggttttttatggcctgaggtccgctgaggccctcccgcgcgagggcagggtcgcctagatgagcaacgtgcgtccgataccgagcccgcaaacccagagcgatgatcgcgcccatgaggccgatcatccgtcgtcattggtggcgaagttcggcatggatcagccgctgaggctcgactgcggcatcgatctcgcaccgttccagatcgcctatcagacctatggcgagctcaatgccgacaagtccaatgcgatcctgatctgccatgcgctgaccggcgatcagcacgtcaacaacacccatcccgtcaccggcaagcccggctggtgggacaccatggtcggcgccggcaggccgatcgatcccgagaaatacttcatcatctgctccaacgtgatcggcggctgcatgggctcgacgggccctgcgtcgctcaaccccgcgaccggcaaagtgtgggggctcgatttcccgatcatcaccatccccgacatggtgcgcgcgcaggcgatgctgatcgaccggctcggcatcacgacgctgttctgcgtggtcggcggctcgatgggcggcatgcaggtgctgcaatggaccgcggcctatccggagcgcgtgttcgcgacgctcgcgatcgcctgctcgacccgtcactcggcgcagaacatcgcgttccacgagctcggccgccaggccgtgatggccgatccggactggcgcggcggccgctatgtcgacgaggacacccatccgcatcgcggcctggcggtggcccggatggccgcgcacatcacctatctctcggacgcggcgctgcatcgcaagttcgggcggcggatgcaggaccgcgagctgccgaccttctcgttcgacgcggacttccaggtcgagagctacctgcgctaccagggctcgtcctttgtcgagcgcttcgacgccaactcctatctctatctgacgcgtgcaatggactatttcgatatcgcggccgaccataacggcgtgctggcgaaggcgttcgccggcatcaagacccggttctgcgtggtgtcgttcaccagcgactggctgtttccgacctcggaatcgcgcgcgctggtgcacgcgctgaacgcgtcgagcgcgcgggtgtcgttcgccgagatcgagaccgacaggggacacgatgctttcctgctcgacgtgcccgaattcctcgacatttcccgcgctttcctgctggccgcaggcaaagcgcgcggactgaaggatgacggccggtcatgagcatgcagcagacattgccgttgcccggtgtcgcgccggagcggaccggcggcggctatcgcagggatcatcttttggtcgccgagatggtgcggccgggctcgcgcgtgctcgacgtcggctgcggcgacggcgaattgctgcagctcctggagagccgcggcatcgacggccgcggcatcgaattgtcgcgcgagggcgtcaatggctgcgtcgccaaggggctcgcggtggtgcagggcgatgccgacaccgacctcgtcaactatcccgatgatgcgttcgactatgtgatcctgtcgcagaccctgcaggcgacgcgacagccgaaggtcgtgctggagaatctcctgcggatcggccagcgcgccatcgtctcgttcccgaatttcgggttctggaagatgcggctgcagctcctgatcggcggtcacatgccgcgcaccgagaatctgcccgcgagctggtacgacacggccaacatccatttctgcaccatcaaggatttcgtgcagctctgcgaggagatcaacgtcaagatggagcgcgcggtggcgctcgatctctacggccgcccggtgccgctcaacctgccatggtgggtgtggaacatgttcggcgagcagggcgtgttcctgctcagtcggggcgggggcaagtgacgccacctttggcgtcattccggggcgatgcgtagcatcgagcccggaatccatttatccacgaactctgcggcccaatggattccgggctctcgcttcgcgagccctggaatgacggcctacaccaccgccgccaccagcgaccgcggatcgcgcgccggccagcggccggcctcgaccagcgcgatgaagcgttccaccatctcgttgaacagcgccggctcctcgagattgagcacgtggcccgacttcgggaagaacgacagcccggcggccggcagatgctgcttcaggaacaggctcggcgcgatgcaattgtcgtcctcgtcgccgcacaggatcagcgccggcgtcggcacgcgtttgatggcatcggtcatggtgtagatcgagggcctcgcgccctgaaagctgcgcatcgtgttggccgagcccttggcgtcgtggcgcgccagcgcggcatagaaatcggcgtggccgcgcggatccttgatcaggaacggaatccggctcggcgcctcccgcgtcaccttggcgacctcgaccgcgccgatcgcctcgtattgctcggcattggcgcggcattgcgcgcggaacgcatcgagattctcgaggcttgagccggagccgaccgcggcgagcgtcatcgacagcgcgcgctcaggcgcgttgagcgcgacctgcagcgacgaataggagcccatcgaaaggccgacgaaatgcgctttcgcgatgccgagatgatcgagcaccgcgagcgcatcggtgtagaaatgcttgtaagtgtagacgtcggcgttcggcggcacgtccgacggcgtgtagccgcgcgcggaataggcgatgcagcggtgggcgcgcgcgaagtagcgcagctgcggttcccaattggtgtgatcagctgcgaactcgtgcaggaagatgatcggggtcccgctgcctgcctcctcgaaatgcagccggacatgatctttcgtcgtggcgtagggcattgaaattctcctctcgttggccacccccagacttgcaattaatttccgcggcggcaatgcggcagttctgactattttcgtcatggaatttgcgcggaatgacccagaaatcgttttggtgccgtcacaccaaatcctgctcccgccacatcccgactttcaaacccaccgccgcgtttcgcagggaacgcgacggggaagtgggggcgttacagaggatctcgtgaagtatggttcagttgcttgcgtatcgccggtcgcttcgagttttggcgctggctctgtgttcgctcaccctcgccgtcatttcggtttcttcggcatcggctcgtccgcaccatcagcgtcacgcgtattcggctcatgccggccatcacgcgcggcattccgcccatcatcaccaccggcacaccgcgcggctgtcgcgcgccgagcgtcgcgcccggatgcaggcgggcggttctggcgaggccaatgccgccgcaatacccgctgcgtcgaacattgaggcgagcgcgacaggcggcttcggctcatccggcatcgtcgacacggcgcgccgctatctcggcggtggcaacccgaccggccgctccagcctatggtgtgcacgcttcatgaacatggtgctgcagcagaccggtcatcgcggcaccgggtccgacatggcgagttcgttcgccaaatacggcacgcgcgtctcggggccgcaggtcggcgcgatcgccgtgatgggccgccgcggcggcggccatgtcggcatcatcaccggcgtcgacgccaggggcaatccgatcatgatctcgggcaacagcagtcaccgcgtccgcgaggcgccggtctcgcgcggccggatctatgcctatgtgatgccgacgaactgaggcggcactctccacctctccccgggaatgcggggagcggtggcaattcgttcggcttcacttcccgtgctccttcgcctcgatagtgtcgacgttggtggcctcgaggttgctcaagggaacttcgaccgcggcgggctgataccaggcgaattgcgagaagtagtttgccagcacctgatccttgaagaaccggccatgccgcgcgaaaatctcgtttcgcgcgacgcgcagctcgatcgccgacatgtccttgagatcggcgtcaccgagaaatcgccggtcggaatcgggaaacagaaagccgtcatgtgccttggcgcgctgggtgacggaggccggaacggcgggcggggtcgtgcgcccgacggtggcctgatcatcctgtccgcccgacttcaccaccgtatgttcgaacgcgggcccgacggtccagaccgccagcgccaacgcggcggcggcaacgcctgcgccgtacttccagtagcgcctgatcggcgaaacctgacgcagcggcgatcgcccggcttcgttcaggacctcgttgatcgtgtcgatcaggcgggtcatgtgcatgcgaaagtcctggcccgaatcgacccgggcagcgttgcagaagtgcaggaagcgaagcgattccggcagctcggccgcctccggcatggttgcgccgttcaccagcagcggcagcagcgtcttgttgtgcttcaacgccgtctcgatctcgaaacgcacggaatcggcggggtcctccagacgcgtgggtttcccgtcatcgctcctgccgatccagtgcggaccgatcacggcgatgacgacgtcgcaggcgacgatggccttggcgatccgatcgacgaagttcgcgccggtacgaatgctgttgacgtcgaagaagacggatcgctcaccgtacttctcgatcaaatggtctgcgatgcggcccgctgtgtcctgatcgacccgccggtacgaaaccatgatcatgctcatggcgaccccgtgcaatcaatttcgacaaatttgctgcaattcaatatgtcgagtgaagtctattgcacgcaaccaagcattgcaatgcgccgcgcgcctatgcagtcatcaaggaatatggaacccggcgtgacctattgcggttccgcggcaatcgtgtcgccgatggccgcgccgccatcgctgatgatctcggcgtaaatgccgcattcgttgttgccgaagcgctgcatcagcgtgttcgggaccgagaggtcgcgcgcgccggtctcgggatcgacattgaccgcggcacaacgtgtgatccgcttcacaacttttgcccgcgcactgccgatcgcaatggtctggtcgagcaggctggcctcatgccaggccggccagccctcgacatagaggttggcgcgaaagcgcagcggatgcaccggcgcctgcaccatctcctcgatcgcccgcaggctcgccaggttgatgatcgagaccaccttgcgcggcacgtcggagaaactgtgcccggggctcaccagcaccttgggcgggcccttgatctggccggcatgacgatcggcgaaatagcgctcgatcgccgcacgcccggcctccgtctcgagatcgccctgggccaccatcgcgccgtcccggcgcagcgtcagcacgtggctgtcgtcgtcgaaatgggcgcgcagcggcgccagccactcgtcccgctgcagcatcaggaaatgcggcttcgccagccatgtcggcgccgagggatcgaaaccgctcggcccgttctcgatcgcgtagcggcgatcggagcgcagcgtctcgccaaccttgagatcggcgcggggcagcggctcgggcgtcaggcccttgacgggatagcgaaagatgccggtgatcgtggcggaggaggcgcgtgtgttgtccatccgctcgctctagcctgtttggccggcgaggagaaccaccgccaatgcgaaggctgctagtcgggccgcgatgctcccggcgcatccagcacgcgctgcatgaagacgagttcgagccagcggccgaacttgcgcccgacctccggcatccgcgcgacctcgacaaagccggcttgggcgtgcagccgcagcgaggccggattgccgccgtcgatacctgcgatcatgacgtgcttgcccagcgcgttcgccgcagccaccagctcatcgacgatgacgcggccaaggccgcggccgcgatgatcgacgtggatgtagacgctgtgctcgacgctgtagcggtaaccggggaaggcccggaaatcgccgaaggtgccgtagccgagcaccacaggcccttcggccgcgaccagcaccgggtagcccagcgccagccgggccttcatccaggccaaccgctcggcctcggtatcctgcttctccgtccagatcgcgttcgagttgacgaccgcctcattgaagatcgcggtgatggcggggatgtcctgctcggtggcggggcggatcatcattggtcttcctcgacaagcctcttgaacgaaccccatcgtctactatataagacgatatgtcaattatagaagacaatgccgatgaagcgctcgggcggcgggttcgcgctgaacgggagggccgcggctggtcgctggcggaactcgccgggcgggcaggcgtgtccaaggccatgctgagcaagatcgagcgggcggaggcgagcccgacggcggcgacgctgtcgcggatcgccacggcctatggcctgaccatggccgcgctgttcgaggttgcctcgcacagttcccgcctgcagcgggccaaggatcagccggtgtggcgcgatcccaaggcggcctatctgcggcggcaggtgttcctgcatccggccaatccgctggagctggtcgaggtcgagctgcctgccaaccaggaagccggctttcctgccagcgcctatcacctgatccgccaggtggtctgggtgatcagcggccgcctcgtcttgatggaggggacggagcgccacgagctcgctgcgggtgaccgcgtcgagctcgggccgccgtcggacatcgtcttccgcaatgagactgctcagccctgccgctaccttgtcgccatcgcgcggcgctgagattcaccgggcgaaatcgcagagaggctcttccgtttcggaaccaagtgcccacatctgcggcaagcctgaaaaatgatggcgacgaccagaggctggttgaggaacgtcaacgcggcccgcggaaacccaatgaagatgccgttgtcatgcctgaaggggtggtgacggcaggccgagggaaaacgaatgaacattgagaagtacaccgagcgctcgcgcggattcatccagtctgcccagtcgctcgccatgcgcgacggtcaccagcaattctcacccttgcatctgttgaaggtgctgctggacgacaatgaggggctcgccggcggtctgatcgaccgcgccggcggcaattccagagcgatcctgaaggcgaccgaagaggcgctgaacaagctgccgaaagtctcgggcggtggtgccgggcaggtctacctgtcgccggaactggcgcgtgccttcgatgcggccgagaaagctgccgacaaggccggtgacagcttcgtcaccgtcgagcggctgctgctcgggctcacgctcgagaagggcagcgaggcggcctccatcctcagcaagggcggcgtcacggcgcagaacctgaacgcggcgatcgaagcgctgcgcaagggccgcaccgctgacagcgcgaccgccgagaacgcctatgacgcgctgaagaaatatgcccgcgacctgacccaggcggcgcgcgacggcaagctcaacggcgacgtgccggagagcctgaaggacaagaagctgctgtcgctcgacatgggcgccttgatcgccggcgcgaaatatcgcggcgagttcgaggagcggctgaaatccgtgctgcaggaggtctcgaccgccgagggcggcatcatcctgttcatcgacgagatgcacacgctgatcggcgccggcaaggccgacggcgcgatggacgcctccaacctgctgaagcc

SEQ ID NO: 31 - DNA, 106638 bp, Bradyrhizobium enterica
gcgagctcggcaggatgatgatacggcaagaggaagccgccgggcccgatgcggatgttcttggtctgcaacagcgcctgcgccaccagcagatcgggcgacgggtgcggctcccagggcgcggtgtgatgctcgccgatccaggcctcctgatagccgagctcgtcgagccagcgcagggtctgcaggtcccagtcgtggccctccttcaatccgcactccggcgggtgcgagggcatggtgaagtagccaagctccatgtgcgtttccttccttcgttgggttcagtcatgcaatgcgtcttgccgcgcattggcacgacaatcagcaagcgctgtgccagcaaggaaatcgcggggaatggatcagatcggccggatttcggccggctctggccgaacgcctggctgatgagcgctgcaaacgtctcaccgtcgcgagacgtgtcgcagccgtgagacgctgcgatagcgatgacctagtttactccctctccccgttcttacggggagagggtcggggtgaggggctgcgtcctcatatgcgatgacagatgaaatcgcggaggctccccctcacccgaattcgagctttgctcgaattcgacctctccccgcaagcgggcgaggtgaagcgaagcgcccgatcagccagccgcgcggcgcggcatcgtgttggtatcgggctcggagggcgccgggatctgcatcaggatggtctggcccatcgaggcgatctcgatgccctcctcctggaagcggcgcttcatgcggcggttgaactcgcgctgcaccgaccagcggccgccatcggtgcaacggatctggccaacgatggtgacgaccgagccgtcgaccttgtcgacgccccacaattcgaggtcgccgcggatcagcgcgcgatacgtggtctcctggcgcatccccgccacgatgtccttcagcacctcgccggcgcggtcggtgtcctccttgtaggacacgttgacgctgaccgcggcattgccggcgccgcggctggcattggtgatcgtggtcaccgcgctgaacggcacgacatgcacggagccgtcgccggcacgcagccgcatggtgcggatcgagacgttctcaaccacgcccgagaggcccgacaccgtgacggtgtcgccgacctgcacggtgttctcgatcaggaggaacagcccggtgatcaggtcctgcaccagcttctgcgagccgaagccgatcgcgatgccgacgatgccggcgccggcgagcagcggcgcgacattgacgccgatctcgctgagcgcggtgagcccgaccaccgcaacgatcatgcagaacagcgcggtgcgcagcatcggctggaaggtgcgcaggcgcgccgcgcgggcgtaatgcccctcgcgcgacagcgtgtcgacctggcgatccatcagcgcattggcgccttcccagatcacggccgcggcaagcgcggcgatgccgatcgtcatcaccgccgagatcagccgggagccgatctggccgccatagaaccagacgatggcatcgacgccccagacctcgagcagcgcgacgaaaccgatcacggcaatcaccgccgtgaccaccttgcgcagcagcggcagatagcggttggcgcgggtctccagccccgggaagcgctgcatcaggtccgggctgatgcggaagccgcgatcgatcaggctcagcaccaccatggtgacgaggcgggtgaccagcagcaccgcgacggtgccgacgaaatattgcagcagcagcgaatagccgttgcggatgttgagcgcccacaccgcccatagcgcgaggtcgagcgcgatcgccagcacatgccagagcgaggcgagacggttgcgcgtccgcgccgcaagcccggtgcgatcggccggggcgcggatgacatcggcgacctgccggcgacactgcagaatgatgacgacaacgaacagatgcacgatcagcatcacgagccgcagcagcgcggcatagccggcgcgatgcagcccgagcagcaacgcgacattggcaaagcagatgcccgatacgccgaccgctacaatgcgtcgcgcccagatctcgatataggccgcggtttcggcccggacgcggaacaggccgaacggaccggccagcgcccgcaccgcacagatcagcgcccgcgagagcgcataggcattgacgaccgcaaggatcacgagccgggtggtcgactggtcgccgatctcggtgccgagcagcgcggtggcgacgctgacaaagaccacgaccggcaacagctcgagcacgaggcgcccgagcacgaagggcagccggatcaccgactgccaggcccgcgccaggctgagccggcggcgatgcagctcgggctccggcgtgacgtcggcgaccgacgacggcggatcggcgctggcgagcgcctgcgccggcacccgcgccgtctgcggcaatcgctgctccaggaacgccaccggccgcttgatgaggcggaacaccacccactcgacaagcagcgcgcagccgaacaccagcgccagcttccaggcgatatcgatcagcaggccataggcagccggatcattcgcggtgcgcaggaaccagtagtagaacgacggaaagttggtcagcgtgcgcgcgacatcggcaacctcgcgcgacatctcgccgacctgttcggacaccatcagcaggagctgcgcgccgagactgtccgcggtgagcgggatcggcgaatgctgctcgggcacaggctccgcagccaccggctgggcagcagcctgcggcgaggccttggcgatggcgcgcagcgtgttgatgatctcgccgcgcttcttgtcgtcctgcaacgtctcgagcgcgcgcttggcttgctcaggcgtcagcgtgtcgctggtaacgggctgcggcgaagccggcttggcgcccggctgcgccagtgcgggagagatgagcagagtgaagacgagaagaatcgcaaaacggagtctgtgcgacacgaaggcctcataaaaacaatcgcgcgacggaagattcctgcaagagaatctgccccgcgctcgcgtcatgtcggattattccttttcgccccgatgatgtgtcggaagtttgccgctgtggcggccatgtcttggcatttgccgcaacacaatcgtcacaagtgttgagcggcgtttacgcatgcaacgcgcatcccgctgggccggccgagccgggtcaccacacgtcagggatgagacgccggaatctttcgcttgacgcaggccggcggccatgatgttcttattttgttcttttggttccgattgcgtttcgaggtgatcatgcacgacgtgttcagcgacgacggtccggtccggctcttcattcatgatgacgacgaaacgccgctggagttcgtgcaggacctgttgcgtacggtgttcgggaaatccgagcaggaagccattgcctgcgccgccttgatcgaggccaacggcgctattccctgcggcccctatccgggaccggtcgcacgggccatcttcaactcggcgaaatggctgatccgctccaacggccagccgttgatgattagcaccgaatccgccgacgccagccgcccctgcgatctctgcgaagccccgcgggccgtgacggagattctgatccccggtacgacgactgcatcgctgtgcagcgactgcctgctcgcggcacgccgcagttcggaagacttgccgggcgagacgtttcgatccgcttacgttgcgctcgactggcatttcgccggcgtgccgcgcaacctgatcgtgacacgggcgcgacagtttccgggccacatgcgcgccgatgttcaggtcgcgatcgacaagctgttcaccgatccgatccatttcttcggcatccatgaggaatatcgctacgagacgctcgacttcgcggcgctgatgaaggctggccgcaatgcaccggcgatcgcgccgccgcaatatcgcgatgtcgatatcggcgaggccgagccggtgaagtgcctcgtcaatggactatggctgtgccgaaccggcgagctgcgctacgccgtgctgctgacattctatcgcgaatacaatcacgagccgtcgctgcgcattgagattgcgttacctgccggcgcggccggcaatgctttcgtgcaacgcactttcgccgagctggaaacggccgtgcatgcggcgcgctcctatcgcggcaagatcctgtcgctggaggatggcgccaattatcgcggacgttcgcgtggtctgaccgtgcatcgcctgccgacggtcgcccgcgacgacgtgatcctcccggaccggacgctgcggctgctcgaccgcaacgtgctcgggttcgtcgacagccgcgatctgctgcgcaagctcggccagtcgacccgcaagggcatcctgctctacggcccgcccggcaccggcaagacccacaccattcgctatctcgccaccagcctgcccggccacaccacgctgatcatcaccgccgagcaggttggcctgctcggcgcctatatgagcctcgcgcgactgctgcagccgaccatggtggtgatcgaggatgtcgacctgatcgcgcgcgaccgcgaggacatgggcggaccgtgcgaggaatccctgctgaacaagctgctcaacgaaatggacggcctgaaggaggattgcgacatcctgttcgtgctgaccaccaaccggccggaagagctggaaggcgcgctggccggtcggcccggccgcatcgaccaggcgatcgaagtgccgctgcccgacgaggcaggccgcggcaagctgatccggctctacggccgcggcctgccgctcgtaccgtccgtcatcgatgcagcggtgcagcgcaccgaaggcgtcagcgccgccttcatcaaggaattgatgcgccgtatcgcccaggccagcatcgcccgcgacggtggccaggatgtcaccgctgacgacatcgacggcgcactgaacgagatgttgttcgacggcggccggctcaatctgaagctgctcggcggcgcgcagggaatgagcgcggggtgatcgccggtcaacgcgccaaacgaggcggcagcagcaactcgcgctcgccggcggcaacgcgcgcgagttcatccgacatccgcgccagcacgcggtcccaggcctgcggtctgtcctggcggaacagccgcatggtcggataccagggcgtgtcggcgcgatcgcgcagccagcgccagtcgagcgcatagggacacagcatccagaccgggcgcccgagcgcgccggcgagatgcgccaccgaggtgtcgacggcgatgacgagatcgagcgcgcagaccgccgccgcggtgtcggcgaaatcgccgagcgtcggcgcgaggtcgacgatatcggcgccgagtcgccgcagcaccggcgcatcgtccggtcgcggctctttctgcaggctgtagagctggacaccaggcgtgaccagccgcggcagcacggcgtccgccggcagcgagcgctggcggtcgcccttgtgcctgggattgccggcccagaccacgccgaccttcagcgcggacacgccgctgagcgcgtcgcgccagcgggcaagcttgccggcatccgcctgcagataggatgtcgccgccggaatggtctcgacggtggtgcggaagatccgcggcaggctgagcagcggcaattgcagatcgaacggcggcaatggctcgccgcgggcaaacaccacgacaccgggcagcatcggccgcagcagcgcgaccagcgccggctgcacctggagcatgatccggccgcctttgcccatcagcatcggaacgtagcggacgaaattgatgacgtcgccgagcccgtattcggcgaacagcagcagcgttcgtcccgccagcggctcgccctgccattccggctcgtcgaacacgggatcgccatcgctcagcatcctggtcttgcggcgccactgatactcttcaaagccctcctcgaactcgccgttcatcagcaggaaatgcgcgtggttgtagtgcgccaacggctgttcgggatcgagcgtgatggcccggcgcgaagacacgatcgccgcatcgatgtcgccggcattgcgcagcgcgaccgccagattggcgtgccccttggcatagagcggttcgatctcgatggcgcgccgatgcgccgcgaccgcagcctcgaccagattctgcgcctcgaagatgattccgagattggtgtgcgcggcagcgtaatccggcttgagcgccagcgcgagctcggcgcaggcgatcgcctcgtcgacttgcccaagctcgaacaggcaggccccgagattgttgaggatgacgtgatcggagggatcgcgggccgagagctgccggtagagacggaccgcctcctcgcgctcgccgcgttcgtgcagcaccatggcaagcaggcgctgcggcgcgaggttgcccggatcgagcgccgttgcgcgccggtagtgcaggatcgcgtcctcgagccggcccaggcggtagagcgccgcgccaaggccgccatgcagcccgggattgtcgggatccaagccaagcccgcggcgataggcggtgacggcagcgtcgtgctttttctgatcggtgagcgcattgccgagattgagccagacgccgcgataggccggatcgcgcgcgatcacctcacgataggcttgctccgcctcgaccggccgctgctgcccggccagggcaacggcaaggttgaaccgcgcccgcgtcaggccgccgtcgagcgcgatggcgcggcggaacgccgcctcggcctcgtcgaagcgcgacaggtcgcacaacgccacgccgagcttgatgtgcaggccggcatccttcggccgcagcatcacgccgcgctgaaacgccgccactgcgccttcgtgctcgcccttcacggcgagcgcatcgccgagcgtgccgaacgccggtccatgctgcggatcgaggctgaacacccggttcagcagcactgcgccttccgcggcgcgatcggtcacgaaggcgatgacggcggacagatgcagcgccggaatatggtcgggatcggcggagaggatgtcgccgcacagcgtgccggcctccatcgcgcgccccgcgccgtaatgcgccaccgcatccagcaacatccgatcaatcgccaccttgcccataccgcccccgccttcaagaccccgatgcggattaaacgcgcgacgttgccaaatccggcacgcgaatatcggatcgcggcccgccaacgccctcttgacgctcgccccatcatgtaacatatgaagttacatgatccgcgatagccgcctgtccagcgtcctgcacggcgtgctccacatgatcggggcgggcgagccggtcacgtcggagcaacttgcacaggcgatggccaccaacccggtggtggtgcgccgcgtgatggcgggcctgcgcgagcagggcctggtccattcggagaaaggccatggcggcggctggacactggcgcgcgcgcccgccgacatcacgctggcggacatctatcgcgcggtcggcgcgccgacgatcgttgcgatgggccaccggtcggaaaatcccggctgcctggtcgaacaggcggtcaacgacgcgctctccggcacgtttcgcgaggtcgaggcgctgttcctgaaacggctcaatgcggtgacgctcgaagcgctcgcgaaggatttcaagcgccggctcgccaaacacaaacaaggcctcgaggaccagatccatgcaacaaaatgagtcggcgaaacctcttccgttcaacgatcccgcgcactgggacaagatggtcgccacctatgaggcgcagtcgcagccgttcacgacgttgttcgccgatgctgcgatcgcaacacttccgatcggtccgtcatccagggtactcgatgtcgccactggcaccggtgccgcggcgctcgccgccgcacggaccggcgccgacgtcaccgcgatcgacttctccgccggcatggtggcgcgggtcggcgcgcacggccttcccaatatcgaggcacggcagatggacggccaggcgctcgatctgcccgatgccgccttcgacgccacagtctcggtgttcggcgtgatgctgtttccggactggcgcgccggactgcgcgagctggcgcgggtgacgcgccccggcgggtcggcagcgattgcggtctggaagagcgcagacggcgccgccctgcatctcttgctcgcgcaggtcatccggcggctctatccggacaacgtcacgccgatgccctgcaccggcctcgcggaactcgccgatcccggccgcctctcggctgcggtcgtcgccgccggcttctccgatcctgtcgtcattgaagtcacccatgacttcaagctcaatgtcgccaaccctgccgacatcgacaaactgttcgcgttcatgccgcattggagcgggctcgatgcggaccagagcacggcagttgcgcgcgccttccggagcgagatcgagcaacggcgggtcggcgacgtcttctcgattccttccactgcgctgatcgcgacagccctgcgccgatagctcgcgctgcccggtccaacatgcgagccggtacgttatcgatgaccagcttgcgtgtgttgaatgatagcgattcatcgcgcaaccgcgcgaccgtcttctcaaatcgtgcaatgaccgcgcgtctgccggcgccaggctgagctatccgctgacattgaccgacagtgtggtgctcgcgccgtatccggcgggctgaatcccaaactcgcgggcggcaccgtgctgggccttggggcggagtatggcgggctcggcggcaccacacggatctggacgttctcggccagggcgcgcgtgccgttcaactgatcggaaacgaggccgccggccccgcagcctcggcgctgcgggtccacggcagcgccgttctcgcttcacctgcgccggcgcttgtcgtcgtcacgcttgtcctcgtcacccggcggctgcaggccggggctgttggcccagcggtcgagttcctcgatcacccgccggtaactcggccgaagcacgggcggaccgccgggctcctgcgagagttttcggggcagcttgacctgttctggcatgacgaggctccagagctgggggctgtgcgcggcccgacgattggatcgccggccacgacggagggctgaagattacttgcggccttgcgactgcgcaggcgccacgaccggctgcggggaagcggcttgctcccacggcgcaggcaggatcacccgcgccggcggcagggtctgcgacgtgcgctgcatattcgcagttgccggctgcggtgcgtcgccgggattatccgcgcgggcgatcgcaatcgtgatgcccagcgccaatgctgcgagcccaagtcccgcgccgatcgaagcggcggtgatgccgggccgcggccggttcaagatggcaagatgagatgaggtcatcgcaactgctcctcacgcaatacgcatcgctcggcgccgtacaggacgcgaaggccctgcacggctcaaggcaggccggtcgtcaggtcttgatgtcggccggcagcttgccgccattggcggcgagcttggccatcacctgctgatgcagccagacattcatggtggcggtgttgttggtatcgccggtgtagtgcagctccttcgcgagctccttgcgcgccgcaaggctcgagtcgaggccgagcgccttcatcaggtcgacgatcgaggtgcgccagtcgagcttctcgccggtggccgccgccgccttgtcgacgatcgcagcgacatcgaccgtttgcgccgccggcgtccctggcgccgccgaggtggaagctggcgatgttgatgccgatgccgtgccgggcgcggccgtcgttgtgatctcagccgtcttggcttgtgcgccatggccgaagattgcacccatgatgcttccgaaaatgctcatgttctctcactccatgcgcccgggacggcgtggtcccgtggctggttccagtgacgagcaaacgataagcaggccattggccgagcggaagatgaccatcgtcactatcggagtgtgggacggcgtggtgcaatttggggcgagaatcgtgcggtcgtgcaccgcacgtcgcgagcgtttcatcgtacgccccacgtgcgatgaagtcagccgtcccggcccgattcgccagccccgagaagtcgggacggctgacaccaacgcgcgttgagctagagctggcggcggcggatggtctgggcgagctcgacaaagctttccgcgatgccgacgcctgtcttggcgctgaccgacttgacgctcgacttggcgagtgacttggcgagcccggcaatcgcgccggcgctgcccgcggcttccggcaggtcgatcttgttcagcaacgcgcggtagggccggcccggaaagcgctcctcgaaaccgcggaccaactcgaccatccgggtcacggtctgcggccgcgtgacgtcggagacgatgatggcggcagacgcgccggtgacgtagacggtgtcgaatatctgcgtgccgaaatcgccgtcggtatcccacagcacgaggcgcatcggatcgccgccgtcggccggcgccacgtcgtggctcaggatctcgacgcccagcgtcgatttgtactggccctcgaaccggttgtagatcagccggtagaggatcgacgtcttgccgacccccatatcgccgagcagcatgactttcgcggtgagcatcagcgggccacttcgcctcgatagaccgtctcgaacgcgacgcggcggttgccgccgacggtggcgtcgagccggtcggtgatcggcatcgccgcagcgcgcgacaccaggatcagtcgcgacggatcgacaccgagcgcggtcaacctgcgctggacctgctccgcccgcttgcgccccagcgtcttgttggtgccttcggtgccgctctgatcggcgtagccgacgacccgtatcttgagatcgctgttcgccagcagtccggcgagctcgcgcagctgctgctcggcctggtcgttgtagaggacttcatccgaattgttggcgaagaagatcgcggtcgaagagatgaagcggtcgagccgcgccgtcgggccgtcggcgacggattgcagcttcgtaaattgctcacccagtttcgcgtactgctcgccgagcttgtcatactgcgcggtcagcccggcgatcttctggtcgcccgacttcgcctgcgcgctcatcgcctcgcgcatctggtcgaggctcgcctgcaggcgcttcaggctttctgcgatgctggcctgcgatgcggcaagctgatccggcgcggacacgagcccgatccggttgacgatcctgtacggcgccgcggccgcagcgagcgcgtcgatcaatggcgcggtctcgagctggctcggctcgattcccgtaacggccacgcttgccttgccgtgatcgaagtcgagccgtagcgggaacgtggccagcaacggctgcttcgctgcgagctggtcgagcgccgcatgggtccgccgctcgaaaagactgcgcgacaccgaggtcgcggcaagccagagcagcagcgccagcacagcggcgagcacgccaaacaggatcactttgccgcgccggcctgcgatccgcggcggcgtatcatcggtctcgatcgcggctgcgagcgaggcaagcatcgggccatcgcaatccgcgccccggtcgatgcgctcgatcgcgtcgaagaatagcgaattgatccgggcattgtccgccgggcgcagcgggcccaggcactccgcggccaggatgaagcggggtgaggcgcgcagcgcgatctgccggccgccgaaatcgagcgtttgcagattgccctcgccggcgagcgcctgcaccgagaactccaggatcgcggccaccatcgcgctgagcagatcggcgcgctcgtcgggggtcgcgtcgcgcttccagtcggcgatcaggcggccgttgccgcgctcgatgatcagcagccggttgacccgcggcgggctgtcggccagcacgaactcgctgatcgggcgccccgttgccagcgacttgatccgccccacccacagttgcgccgaggtcagcgcgttgatgcgctgctcgagcgaggcaaccacctccctgaacgcattcgcaaccgcggcgctgaccagccggccgacgatcggatagagcgcttcgatcatctgctcgcgcgaattcttgatctcactgcggatcgcggagaccaccaccggcgcgatcgcgctggcgagctcgcgcggccggttgacctcggcgcgctccagcgcctcgaccagaatgccggcggtggccgtctccaggcgatcggaattgccgacatagcgctgcagcgagtcgaggtcggcctccagcgacgacaggcgcgtcgcctcgggctgaaacagcaatgtcttgagctgctcgatctcgcgattctggccggcagcagctgccatgcttatttgcccgtgcggccggatcccaatccgctgatgacggtgccgagctgggtgatggccgcgccgacatccttcagcgagtcgagccgcttctgctcggtatcccgctcgaggtcggagagccgcgcagaaagcgcggtgagctcgttggtgaaatccgcctgcatctgcttcagcgatgcccgcatctcctcgcgcagacccgaaaggttggtctcgagcgaacgttgcgcgccgccaaacagcaggtcgcggacctgatcgatcgccgccatgccatgcgctgcggcatccgcgccgttgccggccgccgcgtttgccagtccatccgaatccttggtctggcgctcgatacccttcatggtcgttccctgctcactcaaagctgcgcaatccggacctgccgtgtcgaaaagcaaatccggaacaatcctatagccaattttgtgggcgcggcccagagaaaggcgagcaatttcagccagatcagcggcctggttgtacggacaaggccaattatttctagtaagttattgcctttattgcgagttccgtgcggttcttgacctggcatttctccaggatggtgctgacatagttcttcaccgtaccctcggccaaatgcagccgctcgccgatctcggtattgctcttgccctcgacgatcagcgtgagaatttcattctcccgcgcggtcagcccgtcgcgaaccggcagcttcgccgagacgcgcgggccgcggagccgcttgaactcgtcgagaatgcgcgctgcgacaccgggcgaaagcccggactggccgttgatgaccgcgcggatcgtcgatgcgatctcctccatcctggcatccttgagcagataggccttggcgcccgcgctgaccgcttcgaagatcaggtcgttggtctcgaacgtcgtcagcacgacgatgtgggtctgcggcagctcgcggagaatccgctgggtcgctgcgatgccatcgacgcgcggcatctgcaggtccatcaggatgacgtccggccggtagcgccgcgcgaattcgatggcctgctcgccgtcggcagcaccgggaaggatctcgaaatcatcgttctgctgggcaagcagtgttgcgataccttccctgatcagggtctgatcctcggcgatcagcacccgtaccttctcaatcctgctcacgggcttgcgtcatcctctcgaaggtcctgaatgcaacggcatcaatcggccagcacaccgaccgatccggccggcggcaccgccacggggagcgatatccggaccagcgttccctgtccgggtgcgctctcgaccgcgcagcttccgccgacaagttcagcaaattcggccattccgatcaatccgaaatgtccgggatgagggaccgcgggatcgaagccgtggccgtcgtcgcggatctcgaccacgagcttgcggccgaccgccgccggtgcatcgaaggcgtgaaaggagacccggcgtgcctgcgcatgggcctggacgttgcgcagcgcctcgctgaggatgcgttgaaccgtcaatccgcaatcgcgcaacccggcacgcgcctcttcgtcgatctggatcgacacccggacgccgctgcgtgcggcaaagtcgctgagcagtccctcgacatcgggatcgagcttcaggtcgtcgggggtgcgcaggcgatcgatggcctcacgggcgcgcgaaaggccgctcgctgcggcatcttcggcggttgccaggctgtccgccacgcgcgccggatcggccgagagataatgcctgatcagccggatctgggtcagaagcgccacgatcgaatgcaccagcgtgtcgtgcagatcacgcgccagccgcagccgcgttcgcgccagcgaggcaaagcgcacctccgcgctcgccgcctcgagctgctgctccatcaggcgccgcgcccggcgctcgctgccgagcagcgtttcgacctgacgcccggcaaagtcgggcatggcgatgacgaagtagtgcgaccgcgcgccattccaccgcaccaccgccgtcatcggctgcgcgatgcccggcgatgcgccgcgcacgccggccagcgcaatgatgtcccgccggccgccggcaagcgccgccaactcggcttccatgccgaccagcagcatgcactcgcagcaatcgacgccgatcgcgggaagccattcgaccagccgcccgattttccgctgcatgctccggtcggccccgatgacggcgagaccgatgacatcggcttctgcggccgcaagcaaatccgcgctcaaatcgatcatgcgttgcccatcaactcagcgagcagcccactctggcgtaagccggctgcggtcgtaaacgaatatgactttcgtcacaaccgatcttgactttcgtcagatgccgccgccgcacgaaatgcggttctctctcggacatgagcaaaggcgcaatccacgatgtgccacatgccgtcgccgatggcgacgccagccgggccgcgccctgggagggtcgcgccagtcgaccggagcttggactgacaatgagggccgcgccacggaaatcgtcgcgcatcgaactgcacatgttggcggaagcagagaagccagcgcggcgccggcgcctgagcgcgacccagaaggtcgcgttgcgggaagccctcgcaggccgcttgcagctctatccgcgcggatatgctgcgagcaagaccggaccgttccactcacggcgcgccattctcggcctggtgcgcgccggcctgatgagcctcagcgccacggcgcgctatgcggccgtgaccaaacgcgcccgggaaatctacgcggctgcggccgacaacgcagcgagcgaataggccggcgcaggtcgcggctgacctccggcgcgccgttcgcgatcccgctacagcgcgatgagattgggttgaatcgtcatcgcgctttagctccttgtttgagcatgatcttgtcggaaagccgcttcgcacttttccggatcacgctttagaacgggaacgagaactcccggaccggggacttgctgtcaaagcccacccccttcgccggccccttgcgatagtggccgttgtaatcaccgacgcgacgcccgtcggtcgagagacaggcgaggtcgtcgcggccggcagccattggccggcgcccctgatagcgcgttcgccaacagttgcagtcctgatcgcagaccaccctgatccgctcaaccgccggctgccaggtgcgatccgcagccggaccggcgggactgatcaggacaagcgcgacctgtgcgaaaccgacgatcaggttaaccatgacggtatccaccccttgagagcgcctcggatcggcatgcccacgaaagtcgtgccgtctttcatagcagcttgcccttgaatgaaccggccgtcatgaggccgtcgcactgcacaaacttgtgcagatgcttattttgttgccggattcgtgctatagttcgactcgaacagagtgatggctggcacgcctatgcggtttctcggtctcgttctaaggacgctttttctgctcgtcgtggtggtaacaacggcccgggtggccatgccccagaatgagagctttgcgactttgtacgacaccccttctgacctgttccgcatcctgctcggtgccgccgtctgcttcttcgtttgcatccagatcttccgatattcgcgggatcctgttgacatgcgcagatgggttccgatcggtcttgcggtcctgccgctggcgctgatttgcgcacgcgtcatctggtagcgcgcagcgtcccgcctcggcgcccataccgcccgccacgcgctgcccttgcggatcattctccagatcggacaggctgagctggcgtgcgcggccgaccggcttgacgaattccggattggtgccggaaagattgatctcgttgccgagttcgaaggcggccagaacgatgcccttggcttccaggcgatcgaggaccggctgcaatgtcgcgtggaattgctcggggtcggcagcggacagcggcgtgcttccgaacggatcgtagccgccgaaatggtagatcagccactcgatcctgatgccgcgctgccaggctcgctcggcgtagtcgatgcccttgtcgtccagcgtgatggaggcgcggatgaccgacacgccggctgcatggatcgcatccagcatagcattctgatccgcgacgctgagcacatagggattgatgacgttgacgccgacggcggcctcgccggcccgcgccgcggagatcgcgcccagaagagccgcgagcgtaagcagaacgcgcgttgaaccaagcgcgagaagcaagcagaaagccctcgccatgactgctccgtcagctgttcggcaggggcgcgccccaaactgccgtcacgttgccaccgagccttggattgttgaatggccgtctcgcgcggatgatcgccggcaagtccgggctgtgaaaccgggcgtagtacggctccatccaggcgagatcgccctggaaggtccaggggaagagttgctgctgaacctgggtgcgagcgccgaaactgcgctcatccttgacggcgcgcacgatcaggccagcgagccgatggatcgctccattgttctcggcatagaggtcgatgttccgccggctcgcgagttcggcgcagaacaccagcggcgtgagcgcaaaattgtggtagtgcagcgcgcgctcgccgcgcttcaactcgcgttccagttcgccatgcgggccgatatccctgatgccctgacgcgcccgggagatgccggcatcgaccaggtcaccgcgatccgtcagggtgccgatcgacatcagatcgaggccggcccaatagaccagattgttgccgaggtgattgatgcgatccgcatcgcgggtttcctcggcaatccggatcagccacggcttgatctgctggaagcgatgatcggccttggtgggtgccgccgggaagcgcagcagcgcgagcgcgaaatcggtcccggcccaggagcgctcgaaatcgctctgataattggcgcctgatgtcagcagggcgcttcccctcgcccagcctgcaagcaagtccatgacgcaatccagatcgtgttcatcggcggccttgttgacctctgcaatgaacgcgtgcagcggcttgatcgcttccgcgtatccgcctgcattctggtagaagcccggtggatcgaccgacgtcagtgccggtggcgcctcgcacgtcctggccgcggccggttgcgcaaggcagacaagagcgatcgacacgccgatcgccgcgaaacggacgtcatgcttcattgaaagaactccgcgagccaccgcgggaagacaccccacgtcgtgagcgcggatacagtcatcgagaaccgcacgcaacaagacaacaaaatctaaagtgatgcgccgcagaaccgggttcaggcaccgttcagatttgaacccccgttcagcgcgagcgccgacgatcacggcaatatgaagattagctgcgaaggcaagctttacagtttacctgtatatgtgtcatcacaccggcatgaacagttcaccggcccgtgccggctcagcgcggacatccgcgctcgccgaagatcttcgcctgttgatcggaacgctgaagcgccggctgcgcgagcaggggcaacgtgacgacctgccgccgtcgcaggtcgcggtgctgctgcgcctcgagaaggacggccccgcgaccgtgtccagcctggcgcggtcggagagaatgcgtccgcagtcaatgagttcggcgatctcggcgctcgaggccgcaggcctggtccgcggtgcgccggatccggacgatggccgccagacaatcatgtcgctcaccgacatttgccgcgagcgactgcgcaccggccgcgccgcgcgacaggactggctggcgcgcaccatcgcggcgcggctgtcggcgcgggagcaggatgaactcgccgccgcggtcggcttgctgaagcggctggtcgcggactgacgccggtcgccgccgccaatcgcgaagaacatccggttgaaaaggtaacaatcatggccctcacgacgctcgatccgatcaccgcgctcatcgtcgtcgatctgcaggccgggctcgccggcgcgcccttcgttcatccgttcgccgacgtcgtggcgcgcgcccgcgccctgctcaatgcgtttcggcggcgtggactgccggtcgtgctggtcaatgtcgacggcgttgcccccggtcgaaccgagcgtccgcgccacaacagtgcatttcccgacggctggaccgacctgctcccggaacttgaccggcagccgggcgacatcgtcgtcaccaagcggacctggggcgcctttgccagcaccgatctggagatgcagctaaaggcccgcggcgtcacgcatgtcgtggtcgcaggcgttgcgaccggcaccggcgtcgaatccacggcacggcaggcctttgaggccggcctcaacgtcacgctcgcgatcgacgccatgaccgatgcgcggccgaacgcccatgactacagcatcgaacaggtattcccccggctcggtgaaaccggctcgacccaggcgatcatcgatctgctcgaaaggatccacgcgcatgaactggcttgacctcgtcgcctacttcttcggcggcgccttcctcaccaacgcgatcccgcatgtcgtcgccggcatcatgggcgaaccgttccagaccccgttcgccaaaccgccgggagaaggattgtcgacgtcgaccgtcaatatcatctggggcttcttcaatcttttcgtcggctatctgctgatctgccgcgtcggcgaattcgccctccgcaacacaagcgatgtcgcggccgtcggtctcggcggacttctattcggtatcgtcatggcgcggcggttcggacggttccacggcgggaatgatccacagcgaacatgagacgcgtctttcgatcactcgcaagcttcaactaccgggtctgggcggccggcgcgctggtgtcgaacatcggcacctggatgcagcgcgccgcgcaggactggctcgtcctgacccagctgacacatcacagcgcatccgccgtcggcatcgtgatggcgctgcaattcggcccgcagctcctgctgatgccgtggtccggactcgccgccgatcgcttcaaccagcggcggctgctgatggcgacgcaggcgacgatgggcacattgtcgctcatcctcggcgttctcaccgtcaccgggctggtgcagctctggcacgtctatgtgttcgcgtttctgttcggctgcagcgccgcgctcgacgccccggtccgccagactttcgtggccgagctggtcggtgatcgggacttgtcgaacgccatcgcgctgaactcgacctcgttcaacgccgcgcgcatggtcggccccgcgatggccggccttgtcatcgcctcggtcggcaccggctgggcgttcctgttcaacggggcgtccttcatggcggtgctgacctcgctgtgcctgctgcgcaaatccgagctgcgaccgaatgcgcgcgcagcccgtgccagcggcggcatcatggagggatttcactatgtctggtcccgccccgatctcagggcgaccctggtcatgctgtttctgatcggcactttcgggctgaactttccgatcttcatctcgaccatggcggtcggcgtcttccataccgacgcgcgcggctttggcctgctgtcatcgatgatggcgatcgggacgatgtcgggagcgctgctggcggcgacacgcgaccagccgcgctttgtcgcgttgatgctgggctcggcgatcttcggcgtcggctgtacactggccgcgctggcgccgaactactggctgttcgccgccgccctggtcgtgatcggcatcgcctcattgacgatcctgaatacctcgaacgcactgatgcaactctcgaccgagcccgcgatgcgcgggcgcgtgatggcgctgcggctcggcgtcgcgctaggcggcacgccgatcggcgcaccgatcgtaggctgggtcgccgaccatctcggcccgcgctgggcgctcggcgtcggtgcggcagcagggtttgccgccgcgctcgtcgcgctcggcatgctctcgcgggcgaacgccgcggccggacagcgcagcggacatggcagcatgccgccggccgaatgagccagggtcgcattcagacgtacccgtagcgtgacgtcattcacgtcattgcgagccgccgatcggcgcgaagcgccgccggacgacaggctcggcgaagcaatccatcatttccgcccggccgcgccggcgtgcgggccgacgatctcaggccgatttgttcggacggacgctggcgcggaactcctcaaaactctccttcatgcgatcctggatgatcttgaccgcatctgatgtcgattgccgcgcggtcgacgcgctgtcctgggcacccttcaccgcaatgtcgaacatcttccgcgcgaattcggtctgcaaggcgaggttctcctgaaccttgccgagcggcttgtactcgcgcgccagcgtcgaggcctcgcgcaggccggcctccagcacctcgcgctgcttctgcgccaccgattgcgcgccctgtgcggcgaccttcgcgctctggccgagcgcctcgaggttcttcttctgggtctgcagcaattcgtccacgttcagcttcggcaagccgagatcagtaccgaatttccgcagcatatcgatgtatgagctgttatccgtcacgatatcctcctgtggttacgagttctggcgccggtctccggacgttggaatgagatccctgaggtaactggtggtccgcgagagcagggttggcgacgcggcctgtcggctctcgtcggcgagaaacgcctcgatcaggcccgcggtctccgccggccgcgtcacgatgaacaggtgcccgtcgtcgatcaaatgcagctctgcgttcgggatcaggctcgccatgatgtgcccgttgatcggaggcaccagcggatcgtcacggcccatcaggatcagcgtcggctgcggcagcgaccacagccagggcaggctggtccagccggtcatcgccagcagctggtagaaatagcccatgctgcgcgcgccatgcatcgcagcggcgtgccggccgatcagtgagggatcatcgcgaaacgccccgccatagatatcggcggcgatccggttcatgtaatccttgtcggtatagcggcgcggcgtcgccatcttccacaacaccgacggacttgccggcaccatggtgaaacccggcgcggtcgccgcaagcaccagccggcggcagcgtttcggaaattggtgtgcgaattgctgcgcaatcccgccgccccaggacacgccggcgacgtcgacctcggcgtagcccagctcggcgacgagatcggcggcaagccgcgccagcgtcgacgggcgatacggccacgccggtctcggcgagccgccgacgccggggacgtcgaagatgatggctgacgtgccggtgagcgcgtcgaggaacggctttgccagctcccaattggcgccgatcccgttgaacagcaggagtggcggccggctgccgctgccgcgcctgatcgcgacctgaagcagctggccgtcgatcgtgacctgccgcgtctcgatcgcgcctcgctgcctgtcgggcgatgggcttgcggtgtcggcgctggtgagatcctcagtcaaagacgtaggttcccggcgctttggcgaggatcggatggcgcgcgctgccgagcgcggccggcgcactgacctcctcgcccgagcgcggctgcagccagtcgcgccagtcgagccaccagcttcccttgcgcttctcggccgaggccatgaacgcatcgggcttgttcgcggacgccggcccgatcatgaaggaggccttcggattgctcggcggattgagcagactctgcaggtgcccgctgttcgacagcagaaggtggtgccctcgcccatgatctgggcggtcttgtagacgcccttccacggcgtgatgtggtcggtcatgcccgcgacgacgtagctgtcggccttgaccttgctcatgtcgatggtcttgtcgttgagcgtcagcttgccggcgttgacgaacgggttggagaaatagagatcgagatagtcgccgtgcagcgccgccggcaggcgggtggtatcggcgttccagtacagaatgtcgaacgccggcggctggttgccgagcagatagttgttgacccagtagttccagatcaggtcgttgggccgcatccaggcgaacatccgcgccaggtcgtggccgtcgacgatgccgcgcaattgtgacgacgccttcgccgcccgcatggtctcgggcgtcatcaggcagccgaacgcgctctcggatcgagcaggcagaccgccagcacgagattcttgatcttcttatcggccgcggagccgagcgtcgagaaataggccgtcgccgtgatgccgccggagcaggatcccatcatcgagacgtcttcactgccggagatctcgcgcgccgcgtcgaccgcctcgtccagcgcggcgacgtaggtgtcgagcccccagtcacgatgcgccgcggtcggattgcgccagctcaccgcaaagacctggatgccgctctccagcaggaagcggaccatgctcttgtccggcgagagatcgagcgcgtagtacttgttgatctgcggcggcgtgatcaccagcggccgcttcccgaccatcggcgtggtcggcgtgtactggatcagctcgagcagctcgttgcggaagatcacggcgcccggcgtggtcgcgaggttctcgccgaccttgaaggccttcatgtccaccatcgacggcatgccgcgattctgcgtgagatcgccgatgtagttcttcaggccgctccacaggctctgtccaccggtgtcgatgaacttgcgtactgccgccgggttggtgaccatggtgttggtcggcgcaaccgcgtcgatcaggatatccgtgatcagatgcgcgcgctgcttgtcgatgtcgctgaggctggtcttgtcgaccaggccgctgaccgcctcgccccaggccagataggccttgagcaggcccgaatgcagcgagctctccttccaggttggatcgttaaatcgcttgtcgcccgccttcggcgctcgctccgacttgccggcggcgatcgagccgagctcgctgacgaatgacagccactgctcggtcgcgaccttcggttcgttgatgacggccttgaacaggatgccggcgccctcgaccagatcctggccctggatgccgaccagtggattgagcgccagcgtgttgcgcgacgcggcctcggacatgtcggaggccggctgatccggggcgcttttttccgtactcattgctttgctcccgctgcgggaatcaggagcgccagcgtctcggcgatcagagcaggcttctccgatccctcgacctccagcgtgttcagggttttcatgatcacctggccgccgtccctcggctcgatgccggacaagacaacccgcagccgcacccttgcgcccgcgggcaccggcgtcaggaagcggaccttgtcgaccccgtagttcagcccggcggcggcgtcgcgcggaatgatgccgacctgcatcgccagcggcgccaccatcgcgagcgtcagatagccatgcgcaatcggaccgcggaatgggctctcgcgcctggcccgttcgacgtcgacatgaatccattggtgatcgccggtgcaggacgcgaacgtgtcgatgcgttgctgatcgatcgcgacccagtcggagagcccgagctcctttccgacatgttcgcccaggccggccagtgtgaggttgctcattttgttgtcctcctcgatcgtttctttggcgtgcttgtcccgtcacatgtcgccgtattgctcgcgcagctccttcttgttgatcttgccgacgctggtcttgggaatgctgtcgatgaacatgatcgtgccggggatgccatatttcgagatcacgccctggtcggcgaattgcttgagatgctccttaatcgatgcatcggtgaggctgtcggcgccggatggcttcttgaccacgagcgcaagcggccgctcgccccatttctcgtctttgacgccgatcaccgcggcctcggccactccggcgcattgcgagatcaggtcctcgatctgcagcgaggagacccattcgccaccggtcttgatcacgtccttgatccggtcggtgatgtgaacatggccgcccggactgatcaccgcgatatcgctggtgtgcagatagccgccggcccagagctgctccgagccctccggattgttgtagtagccctgggtcagccagggcgcacgcagcacgatctcgccggctgacttgccgtcatgcgggatgtccttcatgtcgggatcgacgatgcgcagttcgaccagcggaccggcgatgccggccctggtgcggaattcgacctcgccggcggggtcgccgctgagatccctggagctgacatgggacaccgcggcgagcggcccggtctccgacatgccgtaaccggcaaagatgtcgatgccggcctcgagcgcctgcttggccagcgccttcggcagggccgacccgccgatcaccatcttcagcccatgaagatcgaccttggccgcagcggcggcgttgagcagcatctgcaggatggtcggcacgccatgggtgaaggtgacgccctcgctcttgatcagcttgaccagcatcgccggctcgtagcggccgggatagacctgcttggtgccggcaagcgttgccgaccaaggaaagccccaggcgtggacgtggaacatcggcgtgatcggcatatagacgtcgtcgcgcgagaagcggccttgcgagccggccatgccgaacagcgccagtcccgcgatcgaatgcagcacgagctggcggtggctgtagtagacgcccttcggcaatccggtcgtgccggtggtgtagaaggtggtggcctgggtgttctcgtcaaagtccgggaagtcgtaatcgggcgaggcggccgccagcaggttctcatattcaccgatgaaggacaggctgccggtctgcggcatcggccggtccgacatcacgatcatccgtttcacattcggcagctgtcccttcatgccttccagcaatcccacgaactcatcgttgacgagcagcgtcgaggcgctggcatggttgatcgtgtaggcgatctgctccggcgacaggcggacattcaccgtctgcaacaccgccgccatcatcgggatcgcgaagaacgcttcgaggaagcggttgctgtcccattcgagcacgccgacggtgtcgccgggctcgacgccggccttgctcaacgccgaggcgagacggccgatccgctccctgatctgtcggtaggtgaagcgcttgagatcgcgatagacgatctcctgatccggcgcctgcacgcgcggcgtgtgccagagctgcttgaagatgagcggatattgatatgcggattgggcagtctgaatcagccttccgaccatggaagcctccctcgacctggtatttcctccgaccgttgcgtccgccgttctaagcgagcggatcgtgtggtctgccgtcctgcgccacaacggtttgacgacgtgacattaggacgaagcctcgcgtgacgcccgagatttgtgaaggtccgaatcggacatctgccgggtctcaagcggacaagctgccctcatcgacagcaacggtcttgaccgaaacgatccgcttcgccgtctccagcagcttctcccccgctccgctttttgctgctctgcaacaacaatgccccattgataagcctcggataaggcttgggttgtgccgtgaaccggctatgtttccgcggtgttggtgggcgggaatcggctttgccctgctctcgcgatgtcctgcttccggaccgaaggaaaggctggttccctttgcaaccaaccatgcgactgaagaagcctgggggctctcgctccgacatcctgaccgtcggcacccgcgacaaggtctatgaagcgaccaagttcggcgctgtcttcgacatgctggccggcgccggcgtcccggccgaggccatcctgcgcgacaccaacattccgctggccgacgtccattcgccgcaggcgcggatttcgttgacgcagttgatgaccgtctgtcagaacgcgctgcgactgtcgcgcgaccgtcacctgccctatcgcatcggcgcgtcgatccacatctcgacatacggaatgtacggctatgcgctgctgtgctgcccggactttcgcaaagccatggagttcgcgatgcgctaccacgcgctcgcggcgccgctggcggcaatcgacttcgtcgaggacaaggccgcggcacgatggaccatcgaacccaatctgcacgcgcttgccgattcgacgctctaccggttcgtcgccgagatgcagatcggcatccacatctcgctgatgcgcgacatcatggggccgggcttttcccccaccgaaatcacgctcgcctatccgcaggcgacggacttcgatcttccgctcgatcatgtcggatgcccggtgcggttcgatcagccggccaaccagatcgtgttcaaggcgcaatggctggatcgcagcgccgatctcggcaacaagacgacgtatccgaccatcgtggcgttatgcgacgacttgctgggagatctgagattgcgcaccggggtagccggaaagatccgcgccatcctgcttcgcgatatcgcaaatccgccgacgttcgaggcgatcgcaaggcagctcggcatgaacgaccggtcactgcggcgccagctccgccagcaaggcttttcattccgcgtactgcacgacgagttgcggacccagattgccctgagatatctccgcaacacgacgctggccaatgaagacatcgcattggcgctcgggttcagcgacgcggcgaatttcaggcgcgcgttccaccgctggaccaacaaggcgccgagcgatatccgcggcgaatgattcggactgcggtttcttgccggcgaggacgccgaaaacggttctcgcgcgcatgaacgtcagtaggcgtaggacgtcttgcccggctgcacagtcagccgaaaggcgacatcggtcgagccgtccatcagctcgatcatgtggtcacacaccaggcaacgaaactcaccggcgacgccgcccttcgacgtcaattcgatccggcgatagccggcctggcaatgggggcacgtcacgtcagattttcgcatggaatcagcaaaccgttgctctctctattttccatatgcccatcgtcagaaatgtgacggcgtcacgatctgttcgagacggacgagaattccgcgttatctatcgatggctgaaaaccggcgccgccgggcgatagggaatcgccgagatcccgaagttgcggccatattgctgctgcactgccgggacgttgaccacgcccaccttgagatccgacgatttcgcgtcgatcggcggcgtattcgttaccggcggattgacctgatcgacctgcttcttcaaccgctcgttgatgcagccaagcgaggccgcatcgccgcagcgctcggtaccgctgccaccactgttgccaccgctgctgctacctctcgccgcagcccggccgggactgccgctgctgtcgcggttgagattgactgtcggcggcggcggcgtgccgacgacgatttccggcaacggcgtgtgctgcggctgcggtgtctgcgcttgcgcttgcatcgccgccaatccggccatggcaatcgccaaggtgaatgctttcatcggtgctgctccttgcagaaccagaactgtttcaaacgataggaagccgagggaggatatcaaggcaacggaatcagcttcggcgacgagcccgcttgctatttccctccccgggcctggatcacaagcgcgttcagcctggtgttgagcgcgaccagatcgacgcgcccgatgaggccgcccgcgccgagacatttgcggccgcatccaccgccgccaccagcgcgcccgggctcgccgaaggtcgcgaccggtacggttcccgtcacgcgaaagccgcgggcaaacagccgcgcgcgcactgcgacgcaataattcaccgacagatacgagaagcgggtctcgccatggcctgcacggtacttcatgactgcggtgcacaggtcaccaccggcaaggcgccacgcctgcgcaagatacatgacaccgaagtgaatgttgttttcgggaatcgcgagctcggcgagcgagccggaaaaaccgagcatgcgcgcggtcgagggcagcagctgcatcagtccgatttcgccgacgccgccgatcacatcgggattatagccgctctccacgcccatcaccgcctcggcgatctccggcgcaagcccgcttcccgcggcctccttctcgatcagtgcgcgatagcgcatccgcgcgtccgaaaccgcaggctggctcacgggtggagccggcaggtttttcccgccggcatccttcgctgtatccttcgctgaatccctggccggcgcggccggcttcgtcgtcgcctcagccggcggctttgccgtggtgtcgacggaaggttcggcctgctcgacggcggcgaagcgcgtactgaatgacggcgccgcgctctcacccccggcatgaacgggctgcgcaagacagagcgcgagtgcaaggccgccagccgcgatgcaggtgccccgacgacgcgcaggatcgatcagcttcggccatcggccaaagctgctcgcctgcatcgtgggggcaacatcattcatcgatcgcttgcggtcctgctggtcgcgcgtcagcgcgactactggatggtggggaccgcctccgcttccgcggcgcgctcgtgcgacggctgctggaccggcgcaccgggctgcggggcagcagccgccgcgccgttccgcgcggcgagcttcggcagctcctcgcgcagataggcgatcagctcctgaaccagccggtcccagatctcgatctgcgcgcggacgaagttcggcgccacgccgccggcgacggagatatccatgcagaacatcaggaacggatggctgaactgcagccgtccgaaccgccgcgtcgtgttccagcgattgacgaggtcgagcggcagctcaccctgcacctggagcgtggtgaccagcgtggtgtcgacaaagctctgttcctcgccgaccagctggtttcccggccggatctcgaaaccaagccccgcggtcgccgagcgcagataggtcgtgttggcgaccggatcggtcagcgtttcgacgcgatagccgacgctctggaaattgtcgcgcaatccctcgatggtgagcttggtgatggtctcggacattctgatctccgtactacttcttcgatccgtcgagcaggctcgacaacgcaagttcattgaggacgggcggatgctgcttcagcagctcggcgagataggcccggcgcatcatggtcgaccgctcggagcggatctgctgcaccagctggtcgcgcacctccggcaaggtgcgggtgtaggacgccttggtgtcgatcagcttgatgatgtgccagccgtcgtcgagcttgatcggctcggacacgctgttcttggcgagccccatcacctggctgcggatctccggacgaatctggttctcggcaacccatccgagatctgcggcatccttggcagcgttgttgtcgccgcgcgcgatcgccgcaaagtccgctcccggcgccctcagcttgcgctgcacgtcgtcgagctcctgcttcgccttgtcttcggcggccttgtcgccctccttcggagcggcgatgtagatctgcgtgagctggaactgccgcggcatcaggaatgcggcgcggttggcttcatagaccttctgcaggtcgtcttcgctcgggaagctcgccggcggcgtcgacaccgattgcaggtaaagctcgaccaccgcgccctcgcgggcccgctcgagctgcgccgcgacgctgggttgctgatcccacttcttcgcaaccgcctcctgcagcacgaggcggttggcaagcagaagccgcacggtctggctgagcatggccggatccttcgccagcgcagcctgctcgcgcggcgcaagtgccgcgacatagctgcgcaggtcatcggccgagatgttggtgtcgccgacccgcgcgacgacattctccggaacggtcgcggccttcggcgcggccgcgaccggagcagccggcgcaggggtggcggcggcttgcgcctgcgtcgcgggctggggctgcggcttcctgaccggagcctgcaccgtccgcggcgcgggagcctgcgcttgcgccgacgcatcgatcggcacaacgaaagccgcaacgacgacggcgaggccgatcgagcaaagcggcttcacgataggggcggtcgtcatggattcaccttctgatcgaggaacttgtcctggctttcctgcagctggttctggatttcgacccggcgctgctggatcatcggctcacgcgaaaccacgatctcgccgatggtcaggtccttgtagcgctgcaccatctccttgccggccttgaccagcagggtgttcttggcgatgcagctcttggtgctggccttgtaggcagtggcctcaccctcgaacttggcgcgctcggcgtccttggtgcgggcgactgtggccgcctcctcataggccgacttccacttctccaaggtctcgtcgcgttcggcgagccgttgattgaactcgtcgaccgcgtcgcgatgttccttgtcggccttcttcagctgcgccttgaggtcatcgacctccttcttggccgccgccttttcgcgatcggcgtcggcgactttcgcttgcagcgccgtgcgctggtcttccagcgcacgggtctgcgccgtcgcgctgcgcagggcctcgcgcaggcggtcggtctcggactgggcggatgcggtgccggagctcaatgctccgaccaccatcatcaggacaaagagtgcgatgcgcatggtcagaacttcgcgttgaggtcgacttgcaggacgtcgacggcatagggactgccggcgatgctgttggcgctcatccagcgcaagctcgcccagacgttctcgccaagaccgatattgccgccgacgaaatagcccttcaggttggtgccgccgagaccgaaatcggagtctgcgaaggcatcgatggtggcatccgactccaggtatttgtagccggcgtggacgttccaatcccagagatgcttgatctcccggtcgccgaccgtgacgcggccgagccaaccctgattgccgccgttgaagggaccgggcgtgttgccgccatccggactcggcccgcgattgttcatcagcacgccgtaagttgcggccgcagcgttcatagtggagcggctgaacgcggtgttgttgacgtactcgccgtcgagcacgatgtgggtcggatggaaatgtccgagatcgagctgtccactgacgaccaccgggcgatattcgctgaccagtccgaaatactggtacaggaaggaggtaccgccattgttgccgattccgggggcgtcggcgatgatcctacgcagcgggaaataggtatttcccttctgcgcaaaggacggccgggtgatgtcggtgttgcaaacgtcggcagccacctcgacgatgcaggggctggaaagctggccctgcacattgtcgaagtcgtagtaggcgacgccgaaccggaacgcgtattccggactgaagcgcgcattgaagccgacctggcctccgaacagccacttgtcgtggctcgcgtatttgactggcgccccggtggccgtatcccccaggttctttccgaagttgaaatcggtgttgtagatcgggaatgcgccgccgaccgcgaacggcgtgaagccttcccacacctcgtgcttggcctgaacggcgaagccgtcgaagccgagctccttgtaccagaccagatcggtcggggaccagaacgggttgtcgaaacggcctgccgacaggctcagatcgccattccaacccttccagttgacgtaaccgcgatcgagccagagcgaatatttcgagaagttgcccccgctgccaccaagcgtctggttggtcgacactggtgaattgttttcgccggtcgcgatgcgcaagccagccgtgaacccgtacagcaggtcggcttccatgccgagccggccgcggaagcggaactggttgcggtcctgcgtggtgtcgtaggtcggcccgaaatacggattcgagacgagcgaaacgtcatacggcgaaccggtattgatcgcgttgaagttcgcggcgccggcctggtcgttgccggtcgggaagtaattgccctgatagcgcacgcgcgcgtcgccgtagaagcggatgcgctgcgcccactccggataggttccgggcgacgcccagttttccttctgtgccttggccatcacctcctgcttaatctcttcccgtaactgtcttttgacgacttcgggaacgtaggtgacgtgccttgtgccgggcggctgcgccgccgcagcggctgcggttgcggccttggtggcgtcgtcggccttggttgtggcatccttggcagcctggcgggagacataggcctcgtcctcggcctgcttgatcagcgcctgggcctggtcctccttgaggacgccctgctgcaccagcagattgacgaggttgacggtggcgttcgacgatgtcggcttggtgctcgacaccttcggcttcttggcatcggtacgcttcgccgcggcggcgggagcctggtcggcagcctggtccgcggtctggcccacggccggcgttgcgcaggcgagcgcgcccagcgacaccgcaagcggtaacgcgcgccattctgcgtgagctcgtttcttaaacatcagtcccccagttctcactcgcacatttaagttcgtaggttggtcgttggtcgtcttgtcggttggtctcgtcagctcggccggcgcgccgtgacgcgtgtgaccaccggcatcggcatgtccttgggtggcggctcgcgcagcgtcaggctgccgatcacctcgttgcgaagcgccgcatcgacctccggattgccggacgacggcgtcaggacgacgcgggtgacgtggccggagccgtccacccagagccgcacctggatctgcgtcgccatgttgcgcgtcttcgggttggcgcggatcgccgcttcgacctgcgaggtgatgatcgtggtgtaccaaccccagcggctgccaccgccgccgccgccgccatacgggctgccgccgggcttgccgccgagattgaacagatcgccgggtccggtcggcttggcatcaagcgacagcggaccgggcggctcgtcgttcttggcgtccttggccggctcgtccttcggcttgtcgaccggcttctcttccttgaattcgggctccgccatcttgggctgctcgatcatcttctgctcgggctgcggctgtggcggcggaggcggaggtggcggcggcagcgtcacattgacgatggtgagatcgcgcacctggcgcggcggcggcatgtcgtcgtggccgaggaagaaatagacgatgccgcagaggaacaacgcgaccaccgccacgaccgcgccgtaacgcagcagcacactgcgctcgcccttccgggcggcagccttgcgggccggcgctgtggcggaggcgacggcaaccttctgatcgtcagctgccggcgttgtacgcgcggcctgcgcgttctggtcccgcatcggcgcgttcatggcgcggcctccaccgaggtgcgatcgcgcagcctttcatcgacatactgcgtgacgaagctggcgagcgcgtcgaaatccgtggtcttcaggatgaccttggtgtcgggacccgcttcgatcgccgcatgaaaggtctcgacctcgctcagataatccacatgggccatctcgtcgatcgagaggcggacccacgggcatcgcgagatcgtcagccacaacggatcgccagcgggctcgcggccggcgacgtacctgcgcagcacgtccgcgagcttcaccagcagggcctcgccatgaagggggaatgccaccacctcgccgcgcggctcctcgcgcaggtccgctgcaaccggcgccagcggaagctcggcactgccgcggatcgacacctgcgccacgggatcggtgcgcgtgacgtctgcggcaccgcagccatcatcgaatgcccgcatcatgctgctcagccaagaccgtagcgtccggcgctcggtcaatgagaaaggtgatggctgcgtcgtgatcatggcgtcgcttctcggctgcctcacttcacgagcggcttggtggcgagcccgacctggctcaggccgatgcggctgagcaggtcgaacacgtccatcacgctctggtactgcgcctgcgcatcgccgcgcagcaccacgggaaattccggcgtcagcgccttctgctggatcagccgctgctcgagctcgggcagcgtcaccggtatcgtgtcgaggaagatcttgccgtcattggcgaccgtgatcgccttagtggtctgggtcgcaaggctcggcgccgccgaggccttcggcagattgaccttctggccctgcacggtcgcggtcgtcatgatgatgaagatcaccagcagcacgtaggcgaggtccaacatcggcgtgatgttgatgtcgtcatagggtttggaatcggcctggatctgcatcgccgttactccgcggcgatgcggcgttcgatcgggtccggccggtcggcggaatagaattccgccatcttggtcacgaactcgtcgacgaagacctggatgtcgctggtcaggtccttgatccgggagatcaggtagttgtagccgaacagcgccgggatcgcgacgccgagaccggcgacggtcgccaccagcgctgcagcgatgccgggcgcgatcgcgttgacgttgacgtcgccgctggccgcgatcgccgcgaaggtgatcatgacgccgaccacggtgccgagcaggccgagaaacggaccgccggagatcgcgatcgtcaacaccaccatcaggcggttgagccgctgcatctccttgacgacgccgctatcgagcgccgcgcggatcgccgcgatcgaagccgccgagagcaccggcacgcgctgcggattgttgccgaagcggtggcggatttccgccgcgccgatgtgatagatgcggtagagcgaggacgagcgcatcatcttggcgtcggcctcggtgaggcgtccgcccagcgtcgagatgtcgtcggcatcgccgcgatccagcatggtgagatcggcggcgatctcacggaagcccttcatgaactgggcattcgccttggcctgcctgctgagatacgaggcccggtcgaacatcaccacccagctgatcgcggccatgatcaggagaatgccgatcacaacccagccgtcgagcgtcaccgacttcaggatcaccgcgaagtagccggacagccagctggcggtctcctcgtcgacgctgaaggacatcagcttgccctggtcggggccctgcccgatcgccatcaccttgatcagtccggcgggccgcgcgaccttgctgatctgcagctcgtcgacatcgccgacgaagccggccatggcggcagcgggcgctggagccggagttgccgccgcgtcgggcgttgccgcaggcgtggcgccaccgtccgcagccgacgcatcagggggcactgacggtgttgctgcggacggggccgtcgcaggcgcgatcggagaagcgctggaggtcgacgtgtctcctccgatcaggccaacagtattgagagccggcaggctcgcgctgagcgcggcataggacacgccgtcgaggtagagcgtgacctggccgtttccggcaacgacggcgacatgatgccagctgccggccgccaccggtgccccggcgctcgagcgctgcaccgtgcccgccttggtgacttcgatgaacgggctcccattgtcgacgccgatgaccagcgcgttggcgccgtcacgccggctgaacagcgcggcgttcggctgtagcgcggccggcttgatccaggccgaccaggtcagcgcggcgccatcgggcgatgcgagcgacggcgaggcgggcacggtcaccggagcgcggccgtcgagccgcaagccggtcccgatcagcgaaccgtccgccggctggccgacgctttgggcgttgttggcccacaccgaggaatcgatcgccggcgtgccgcgctcgttgaagtgatagaccgtcagggtatccggatcgtaggttcccttggggtcgctggtcgcgagcgctttcttgttgccgtaatagagccagatatcggtccgtgcgcccggcgcgatgttcggcaccgcaacccagaccagaccctcgccaagcagcgaatcgaacttctcgatgtgatgcttcagcggcgtcttgtcgtcaccggcgacgaaccgcaggtcgctgccgtcatcctttgccgagctgaagcggaaattgccgacatgcagccgcaccagcaccgccgtcgccccgatcggatcggtgacgttggcgcccgacgcgctgacgtcgaccgtgatcttcttgcgcagcgaccattcgtcgttccaccaggcgttcgccggcgcgagcgatgtcaccaaggcgacgagcccgaacaacaatgccgtcgcagcgttcgcaatgccgcggcgcagcgccgcccggcgcgtgcgtcgctcgagagtaagacccattcccatcagaattcaccccagattcgaaagttcacgcgcggaacgtttgcgtgcgtaccggttagcaagactcccggcagcgcgactccgggaagtcccggcagcgattccggtggagtagtccccggtaccgcgagcacgaccatgccgttgaaatattcgaacgtcttgaagcgcgtgccgacgccatagctccacgccgcgaaagaggacacctgctcaggcagcggctgctggaccgccgcgtagccgacgtcggcgaagatgaagaagcgccagtcgttgaacgtgacgaagcgcggcttgccatcaccggtctcgctcttcagctcgccttgcagcatgctgccgacgttgggcgtgcgcagctcgatattggcgacggcgccgttgtcgccgagcatctccgattcgagataaccgcgaactgtatcgagaccgccgaggctgaactgttcgctcgagaccagcggaccgtccgccatctgtccctgcaccttgccgtagagctggaagccttccggcagctcctgggtatgcgagacgtccatattgaaatgggtgaagctcggcgaagccttgtagcgcttcgcgtcgaactcgtcccaagggctgctcagcgtccggatgttgtaggtgatggcggcattgaactgggtcgtgaatttctcttcctggaacgtcgcaccataggtcgcgacgagaggatagtaggtgacgggtgacgagaaaccgccggtaccgaccgtcacgttctggtcgaagtgcttgtagtccatgccgagcgacagcgtgtggaacaggccctcgcgggtgggcagcgtaatcacggcccgttcgccgatgatcataccgggaccgaccacattggtgccgccgatcgtcgcgacattgctgttcgacttcacgccgtagaacagcagattgagccaatcggcgttcggtatccgcgccatgtaggagccggagaacacctcggcgtcgctcggccgttccggcgcgacctgataggtgaagctcagcgaatggccgagctgccacagattgtcgtagtgcacggtggcggagacgcggctcgccgtagtggagggcgattgccggttgttgacttcgaggctggcgtggaacggcgccttgtcctcgacattgagatcgacgtcgacggtgccgggtgtcacgccggcacgcaacgccggggtgacacggcgatccggccactggttgagcgacacgatgtccttggtgacatcggtgaaattgggaacactgccctccttcagcgaaggcgcgctgtccttgatccggtcgagatcgaaatagcgcgagttcttcacccgcaaccgcccgaccttcagctcggacaccttgagggtgaccacgccgccggtcacgttctgctgcgggaccgcgacgctgacggtctggaatcccttgtcgtgatacgccttctccagcgcggcccgcgctttctcgacgtcctccgaagtcttgcccggaccaaggaacgggtagatcgcctcctcgatctcgacctgcggcagcttttcggcgccctgtacggcgaagtcgtcgatgtcgaagcgctgcagcggcgcggacggcttttgcgccggcgcgttcgcctgagccggctgcttgcccgctgccggcgctgcggccgcagccgcggaatccttcgccgcctccttcgctgcatacaccggaacgacggttgctacggatccaaccacggtgagtgccgcagccgacacacgcaacccgcctcggcatcgcgaacgatacccaaaaaccctatgatctcttcgactacgcacagacgtcccactcagttcgcgcagatgcgcgccatcacgaccggaaggccgtgatgacgacgccttactcagaagacgtctgggcgggtgcaaacccgcaaaagaatctgcggcgtcgcggaataaatttttggtttgttaggaaatcgagcgcgcggcgtcgattcgttcgactttagtcagctcatcagcaccacaccgcctggcagcgatgtgatccgcgcgccgaacagctgttcgacctgggcgacaaaattgtcgagcttgtcgacctggaaggtgccgttgacgagccggcgcttcagttccgcattggtgatgatgatctttccggcgcgataccgattcacctcgtcgacgacgctcgccagcggccggtcgcggaagatcagcaatccggtctgccaggctgcgacctgcctggcatcgaccggcagcgacgcctgcagaccggcccgcgagtaggtaacctgctcggccttgcggagctgcacggagcggccgtcctgctcgacggtgacgatgccttcgagacacgttaccgaaacgacgccgtcgaggcagcgcgcgttgaaatcagcctgcagcgcactgatgcgtccgtcgcgtgccagcatcaccagcggcgtcgacgacgaccttcgggcgaccaccgaggcctcgcccgagatcaattcgacccgcgtttcgttcggcgcaggccgcagcgccaggctggtctgggtgttcaattcgaccgaaatgtcgggcgccagcatcaccttgcgctgctcgccctttccggtgcggtagtcggctgagagctcctcgatcgacggccacatgtcgagcggcgggcggattaccagatagccggccgcagccgcaatcgcaccgccgagcacgatacggcgcgtcaataaccgcgccggccgaggcggcaatgcaacgacggaggcggtcgcggcctgttcgccggcaagctccctggctgccgcgctggcggtgcgaaacagccgagccgccctcctgaaggcatcctcgtgatcgggactttgcgcgcgccagcgttgcagagcatcgacgtcggcgcgtgtcggcgcaccggctttcagccgaacaacccagtcgagcgcctcatccagcaacggatcgggcccggaagtgcgggtcggctcggtcacgacggattgctcatcacccagttcgccaaacctcaacctcccgatcgcgtcgagcacatagcgaaggtcgctatataaacgattccgacggcagcagggcaccgcattcggccgttgcgcacaacacaagcagaaacatccggcaatcgcagctggcgccgcatcgcgcatggcaaggcagcgcggcgattgcacgccgggccgatcgggtttgaacctgttttcaagcggctcaacacttccagcgaacctttcccaggcacccaaacggtccttatgagatcgctctctactctatagacgacggaaagcctgctatcccgcagaacagaggttgaaaatcctgccgcgtgtgaccgcagatttcaggtcaagcacctgcaacgactggaaatagttctccgcaacaaatttcgacgagcccgccgcgcaggacgacgcgcgcgtcaggccgcggcgaattcgatcacgaacggggacgaggaccgccgagacgacggatcaacgtatagtcgaggcaatcggcacaatggctcagggccagcttcaaatcgctttccaccgttcgcacgctgacgccgaggcgagttgccacatcgtgcggcgtccgtccctcgatcgctatgctatggagtacgtcgcgcggccgcgccggcaattcggccaacgcccgcttgaaagcatcgatatctgatcgcgcctcgacgattctcgccgggctcggtccgtcgtcgctgacgtcgagcaatgaatcgatctcggcggcgctgacgcggagcttctgcgctttctggcgatccctggcgatgttgatcgcaatacggaatatgtagtcggcggggctgcggatcggaacggcgtccgtgactcgctccagccgcaggaacgtctcgtgcagggcttcgtacgcgaagtccgacgatcccagacggcgggtcaatttcttgaccagaccgtcgtagttgtctgcaagctggccccgcagccgcactcgattgatttcagccacgttccgcggccccccagacaccagcccgatatccagattgcattgttcttaaaactgccaatctcgtaacggccgggcacaacacatttatgacggcaacaagtcgacaccgaacgacacgcaaggctgatgcgccgcggtcacatccaagcgatgaacggggaagccagattggccccgccctcgatcaggacaggtcgaactccagccagatttcgaccttgaggtcgtcgggcaatccccatggaatcgatggcagcggctgagcccgtcgaatagcgtccaccgcggccttgtcgagcgcggcctgccctgaactggtcttgacccagacttccagcacggtgccgtcccgctgcatggagaataacgtctcgaccgcaccgtgcagtcctttcggcggcaccgcgtagcgtgccacgtgacgaaacagtttctgctgaaacttgatggcgacgctgttgggcggcgtatcggcaggcgacggcatcggacgcaggctcggcgccgtcggcactgccggcagcggctccagcgccgttggcgatgtcgtgttgtcgaggggcggctccgagatgtcctgggacgcctcggtccggctggcgaggggcgcgatctgcggttgcgagacgggtgcaaccaggatgggcgcgggcgaggggctcggcagtaaccgaacctgtacgatcgaggtctcctgcgggcttgccgatccggccggcggccgcagtcggaaccagtagattcccccgacgaacaacatggtcgcgacggtcggcaccagaagcaagcggaggacctcgcccgaggtccacgcgctcggatcctcgggatggaacagcagcgtcatcggcctcatgccgcgcgcgtcgccgggtccgctggtgttgttggcgctcattggaacgatttcacccggatcgcgatccgcaccggctgcgacgcagtcgcgggcgtcattcggcttacggtcagtccctgcagtgccgcggtcacggctgcatcgcgcttctgatcgccggtcgagcgcaacagctgggttcgctggatcgtccgcgagggatcgatccacagatcgaccacgagctggtagctgccgccacgaggcccgatattcttctgcagcgccttttgaatgtcgaactgcaggctttcgctgtagtcacgcagcgcaccggtgtcgttgccgtcactgttcgcccgcacccgcaacgtgcccagtgacagatcggcggtcggaagcgggctcgtcgggggacggtcggggcgcgcgctgcgcgaagcgagcgtgatggcatccggacgaacgtactggaccttcaggtcggaccccttcagaagcagattcaatgcgtcctcaggtgtcagggttccctcgaccgacgtcgacgtgcggccggttgcggaattgctttcatagagcacctgaacgccggttcgctcgccataggcctgcagcgcgctcgcaagttgctgcgcgggaatgctgaactcgatgggcacggcggcggtaacggcctgatgctgctccgcggtgacggcgcagatgctgccgatcagcaggacggcacaaatcccgaacggaagccgcgaccttgtcgaggccgccggagcgtcgcggctgaccgcagcgcccgcacgtgcaccatatgatccaactgccgtcataaccttgcttcggcccaaagtgaccgcgggtgaaattcggccagcatgtctgtgcgggttagcctttcggccagcgaacctgcgttctttatatctggaatgtgacggccgtctaaccggcaattcgatcggctgggtgcctgggatttgtgctgacctttcagcgcgaaaggttcccgggcatcgccagagcggcgccgagcgtcggcaggcggcacagcgcgccagaaaacgagcgagcgctctctcagaaaatttgctcggcccccttttccgaacgccggttcgtgggttaggaattaggcaagggcgtaaagcccagcctggaccggcaacaaaatgaaaccgtccgggaatagagccagggaggcaatttgggtctcgcgcgccagcggccggggacgaatgcgttcgcgatggacgtgctttgcgcacgcatcctcgaacggcatcgggattccgtgcgagtccagaaaccgcatctcgccgtccccaacctcacgcgcatcatcggcgccacgctgacgctgtccaacaagcacggttttcacgccaccacgctgcgccagcttgcggaggcctccggcctcagcatgggcggcctctatacctatttcgacagcaagccgacgctgctgtcgatgatcctcggcgaggtcgccgagacggcggcggaggtcctcaaccaaccgcccgccgacgtcaagcaggatgcccgcaagcacctgcactggatcatcgccacccatgtccgcatgagcgaggcgatgcagccctggttcgtgttctgcttcatggaagcgaagtcgtttccacctgcggaacgccagcgtgccatcgagatggaggtgatgaccgagaagatcatcgccggcgtcctcaggcagggcgtcgccagcggcgtgttcgcgatcgatcagatcacgctgacggcctcgctgatcaagccgctgctgcaggattggtacgtcaaacgcgcgaaataccgccggcgcggcacgtcgatcgaggcctacatcaacgcggtctgcgcgcttgtcgacactgcggtcgccggcaggacgcggcccggccgcgtcgcgagcggctcccgtaccagaaccaggcagacggcgcacccatagacgcaagaaggacgagaccatgaagcggctgcgattcaatcaacaggagatcgtcttcgccgtattcgccgtgctgttcctggcgttctcggttttcctgcgcggcttcctcacgccggagaacatgctgacgctgctgcagaacgttgcggtgctcggcatccttggccttgccatggcgatcgtcgtgatcggacgcggcatcgacatctccctgatcgcagccctcgcggtgcctccggggctggtgctgcagatggtgcagaacggccactcgctgccggcctcgctgctgacggccgtgctgctcacgatcgcgttcggcctggtcaatggctggctgatcgcctacgccgaggtcccttcgctgtttgcgaccttggcgaccggcctgctgctcgccggcctcggccaggccgcgctgtttcagctcgacgtcgtgcagtggagcgacggcatgaagggcttcgagcggctcggacagggcaccatagcaggcatcccgacctcgatcgtgatgttcgcgatcgcctgcgtggtggtcgccttcctgctgcgccagacgcgctggggcgcctacatctacgcgatcggcgacaatccctatgcggctcgcgtcaccggcatcccctcgcggccgatcatcgtgctgcaatatgtcgtcgcggcactgatcggctgctttgcgggcctcgtgatggcggcgtcggtcaactcgatgccgacccgcgtcttcaattcgaccctgatctacgacgtcatcctcgtcgtcgtgctcggcggcatcggcctgtcgggcggccgcggcggcgtgctcaacgtcgtcatcggcacgctgctgatcggcaccatgctgaacggcatgaccatcatggacatttcctacgccggacaaaacctcgtcaagggcgtcgtcctgctgctcgccgtcatcacggattcattcctgaacccgcgcaacgaagaaacggcacagcagggcgacatctgaaccaagtcgaagaacgatcaatcacgaccaaggaggaagcaatgaaatacgctgtcaggaatgcaaaggtgatcgccgcagcgctcgggctcgcggccatcgccgccgccccggctctggcccagcagggcctggacgagccgttccagaagccgttcaaggagtcgctcgccggcaagacggtggcttatgttccggtcgccatgaacttcgacctcaccgaaggctggtacgccggcatgaagaaggagctcgagccttacggcgtgaagttcgagatccgcgaccccaactggaacaccaacgccggcgcgcaggcggtgacctcgctgatctccgagaagccggccgtgatggtgatccacaatccggacgtgcagacctacgccaagctgctgcaacgcgccgagaacgaaggcatctacgtgatccagatcaacatgggatcggcctatcgctcatcggccttcgtcggcgccaactggatcgagatcggcgagaaggacaccgaagccgtggtcaaggcctgccagggcaagtcgaacaaaatcgccgtcgtgcagggcgcgctctcggcagctgccagcgcctacacgctcaagggcgtcgagaacgtgctcgccaggcatccggagatcaaggtggtctcgagccaggcggccgactgggatgcggcgaaagccaaggcgatcacccagacggtgctgaagcagaatcccgatctctgcggcatcgtcggcttctgggacggcatggacatcggcaccgcggccgcggtgaaggaagccggcctgaccggcaaggtgttcgtcgcgacctccggcggcggcgagcgcaagggtgcctgcgagctcgtcaagtcgggcgccttcgacctcaacctgagctacgacgtgccgacccaggccgcgcagatggcaggcaccatcaagtggctgctgtcgtcgggcgccaaggccggctcgatcaagggctcggaatacaccacgctgattccgatcactaaggagaacgcagacagccagaccgcgtgctggaatctcagtgacctgaagaaatagcccggccacgtccgcttgacgtcccgggtgtaccccgcccggggcgtcgatctcccaaaatcgaacgccttgctggaatgccgatgcgcgacaccttgacgagcctgcgttaccgctactggccggatcatctcctcggcgagatcctgtccaagcgttggaccgagaccgcaattccggtgatcctgctcttgatcgtcggcttcgcgctgagccgctcgatcgaccatttcctgtcgccgtcgagccttgccgacaccgcgcggcaggccggcgagatcggcttcatcgggctcggcatggcgctcgtcgtcatcgtcggcggcatcgatctgtcggtcggctcgatcttcgcgctgacggatttctgcgcgctctatctgctcgacgtgctgaactggccggtgccagcggtggtggtcgccactctcgcctgcggcgcactgctcggcgccgtcaacggcgtcctgatcggctacttgcggctccgcgccttcatcaccacgctgatcaccctgatcatctaccgttcggctttcgatctcctgatccagcgctactccaattcgatcgccgccgcctttcccgacatcccgtcctggaatttcatcggcggcggcgacgtgttcggcattccgagcgtcgcgctcgtctacatcgcgatcgcgatcttcggccacatcttcatgacccggctgcgcccgggctggcacatcaccgcgatcggcggctcgcgccgctcggcctataattccggcattccggttcgccgcaccatcgcgctgtgctatgtcgcaagcggcgtgctgaccagcatcgccgcgctgttcttcgccgcacgcctcggcaccgtcggcggcgacatcggcgtcggcctcgaggtgatcgtgctgaccgcgaccgtgctcggcggcatcacgctcggcggcggcaagggctcggtcgccaagtcgctggtcggcgtgctgatcgtgctgctgatcaccaacggcctcaccacgctcaatgcacgcggcggcatcaaccgcatggcgctcgcgggcatcctgctgatcgccgcgatggtcgatatccgctggcagaagaaccgcacccgcatcatcagcaaggtctatgtcgcgccgacctatcacgcgttgccgccaccgcctccgaccgagatcggccagggcggtccgttcgaacagaacgacaagctgcgcgacgtcgaactgatcgggctcggacgcatcgaagcgccggaggacgtgatcctcgatcgcaacgacaacctctacgccggctcgcgccatggcgacatcatgcgcttcctcgcgcccgactatcagcggatggaggtgttcgcccatatcggcgggcagccgctcggcatggcgttcgaccggcaggacaatctctatgtctgcatcggcggcatgggcctctacctcatcaaacccgacggcaccgtcgagaaggcgaccgacgagaccaaccgcagcatgcattcggtcaatgacgacagccgcctgcgactggccgacgatctcgacatcaccgatgacggcctgatcttcttctcggaagccaccgtccgctacgagatggacgaatggccgatcgacggtctcgaagcgcgcggcaacggccgcatcatctgctacgacaccaagaccggcgccacgcatacggcgctgcgcggcctgaaatttcccaacggcatctgcgtcgccagcgacggccagtcgatcctgttcgccgagaccttcggctgctcgatcaagcggctgtggttcgcggggccgaagaagggccaggtcgaggtggtgatggacaacctgccgggctatcccgacaacatcaatctcgcctccgacggcaattactggctggcgctggtcggcatgcgcagcccctcgctcgacctcgcctggaagatgccgggcttccgccgccgcatggccaagcgcgtgccggtcgacgaatggctgttcccgaacatcaacaccggctgcgtcgtcaagttcaacgaacagggcaagatcctcgaatcgttctgggacctgcgcggcgagaaccatccgatgatcacctcgatgcgcgagcatcgcggctatctctatctcggcggcatcatgaacaaccggatcggccgctacaagcttgataacgccgatccgaacttcgtgcagtatgacaagcgctgggggaagctgtcgtgatcgcggccgtcagggaattcgccaaccgctttctcggccgtggcgaggccaccatcaccgtgccgtcgttcgacggcgcgctgaagcccaaccagaaactagaggcggcaaccacactgctggaatgcgaggcgcccgaggacctcgcaaccgatggccgcaacctctacgtcgccgacggccggcgcctgctgcgactcgacggcggcacagctgtcgagctgcgcagcttcgagcagccgatctcggcgctctgcgcactcgccgatggcggcctcgcggtcgcgctcggcggccgcgaggtgcgcctctatgccaatccctcgtctggcgagccgaccgtgacgttcagcgacgccgccttcaatgccgtcaatgcgctggcgccggcggacgacggcacgctgatcgcgaccgacggctcgacaacgtgcggcgtcgacgattgggcacgcgacctgatggagctcaaccggagcggccgcgtattccggctcgatcccaggaccagaacggtgaagccactggcttcaaagctcggctacgccttcggtgcctgcgcgcgcggcgacggcgttctggtcagcgagagctggcggcatcgtctggtcctcatcggagacggaaaagcaccgcagatcgtgctcggccgcctgccggtctatccgtcgcgactatcgaaggccgccggcggcggctattggctcaccgcgttcaccgcacgcacccagctgatcgaattcgtgctgcgtgagccggcctatcggcgccgcatgatggccgagatcgacccggcctattgggtggcgccgcggctgcgctcgggcttctcgttcaaggagccgatgcagggtgcgcacatcaagacgatgggcgtcatcaagccgtgggcgccgccgcgctcctacggcctcgtgatccggctcggcgaagacggcaagccgctctactcgctgcatagccgggtcgacggcatcaatcacggcgtcgtcgcggcgctcgagctcggcagcgacctggtgctgatcgccaaaggaccgggccgcgtcctgaaactgcccctcgccgggctcgccgaggagacaggctcatgagcgacaccgtgctgtccctgcgcaaggccaccaagctctacgccggcgtgccggccatcgagggtgtcgacttcgacctgcgccgcggcgagatccacgcgctggtcggcgagaacggcgccggcaagtcgacgttgaccaaggtgatggccggcgtcgtgacattgacctcgggcagcatgacggtcgacggctccgacgtcgcgccgcgcacgccgctcgaggcacgcaacctcggcatcgccatggtgttccaggagaacagcctggtgccgaccatgacggtggcgcagaatctgtttctcggacaggagaagttctacaaccggctgcgcggcatctacatcgccgcccagcagttcctgcaatcgctgaatttcgacgtgacgccgaccgcgaccgtcggcgggctcggcgccgccaagaagcagatggtggaaatcgcgcgcgcggtcctgcacaaggccaaggtcatcatcttcgacgagccgaccgcatcgctgacgccggaggagaagaagtacttcttcgacctggtccgtgatctgaagaagcgcggcgtctcgatcgtcttcatctcgcacgcgctggaagaggcgctgctgctcgcggaccgcatcacggtgctgcgcgacggcaagcacgtcgtcaccgacgacgccgcgaagttcgaccgcgccgcgatcgtgcaggcaatggtcggccgcgatctctccaatacgctatatggggcgcggaaggcgagtgtccggccggccggcgcgcgcgtgctcacggtgcagaatctcaagatggcgccgatggtgaagaacaattcgctgtcggtgttcgccgggcagatcaccggcgtattcggcctggtcggcgccggccgcaccgagaccttcaagatcgtatccggcgtgttgaagcgcgacttcttccacggcggcgagatcctgctgcatgacaagccggtgcgctatcgggtgccggcgccggcggtgaaggccggcatcgcctatgtgaccgaggaccgcaaggtcgagggcttcttcgagaccgcctcgatcgcccgcaacatctatctcggcctgctctccaagtttccccgcggccggatgctgttgtcgcggcgcgagaccaatagcgtgggcaagagctggatccagcggctcaaggtgcgcgcgatcggcgatgaggccaaggtggtcgagctgtcaggcggcaaccagcagaaggtggtgatcgccaaatcgctggtgcaggatccggagctgatcatcttcgacgagccgacgcgtggcgtcgacgtcggcgccatcgtcgagatccacgagctgatcaaccggctcgccgacgagggcaaggcggtggtggtgatctcgtcctatctgcccgagatcatggcgctgtccgaccgcatcctggtctcgcgccagggcaaggtggtggaggaattctccgcgctcgaagccaccgaggagaagatcatgtacgcggcgattcattgatcgccgcaacggacatccgtcatggccgactggccacgccatggcggagcacgatcgcgcggccgaacatgatcatcgggcgctccaccagccggtacaccagccaggacaccagcaggacgaggccggagcagatcagcatggtggcgatatcgccgatctgcccggtcaacggcaggacgcggtagaccgtgatgttcaccggccagtggaacaggtacatcgaatagctgatcagcccgatccgcgacagcagcagcgaacgcggccggtcgaacctgacggctgccatgaagatcacgaaagccagcgcgtaggccgtgaggacgggtgtcagtccctccatgatgaaattgtcgccgcgcgccagcgaaaaggctgcaaccgacggcaccgcgacgacctgcgcaacaaccagcgccagcgcggcgatgcgcgcccccggtgcccgctcgaccagccacaggcgtagcagcagacccaggaacaggaatgagaggtgcatgccgagatattgcaccggcagattggcgatgccgtggatgcgcaactgaaccggcaacgccgtcgcggcgaccagcgccaggctcagcagcgacagcaccgcgacacgcctcagtgcgccggccgagaacagcagcgcaatgaggatgtagaacaccagttcgatgaacagcgtccagtagatcggcgagagccagggctggccgaacagcgtcggcgccatcgtcatgttggcgagcacggtgatcgcgcgcggcggctcgccgccaagccacgccatggtcgcgagcaccgcgagcgcgagccacagcgcgggatagagccggaacacccgcgagacggcgaattgaaacaacggccgttcgccgccgatgctgaacggcacgacgaagccgctgatcaggaagaacagcgccacgccgaaccggccgaggctgacattctgaaccagcagatcgccggcgacattgagcggcccggcggcaggcggggtctgccggagcaggtcgccgaacatgtgctcgaccatgacgccgagcgccgcgatcgctcgcaatccgtcgatattggcatagcgctgcgttgtcatgcctggcctcactccggtgcttctgacggcgcgagtccgagcgcgccgcgggtcgccgcgtcgaagcccgggccggcctcgttctcggccagtgcgaagccgcccgtcgccagataagtccagcacgaccaggtgaagccgtaagtctcggcgagctcgcgcatgtcccgcaaccagctcgcgcgcgcggccgcgccctgagcggtgtcttgatagggcgtcttgtgcacgccgaactcgccgagcaggatcgcctgcgccggcaggtgctgcgccgtgcgccaggccgccacctgctgaaacgtgcgctcgaggttcgatcgattgaagcgggagctgacataacccgcgagcgtctgcctggcctgctgcgccagatcgagctcggcgccggcgagcccgagcgccgtcacgcgctggtcggtcgcctggttcatcgcgtcgacagatgcaggcgccggatagacgatcgcatccagcgcataggcgggactgccgcgcacgccctgatgggtgaactgccacggcgaatagtcgtggtaggtgtagatcaggcgtggatcgccggcgaatgcgctcatgttgatctgcgtgagccctcccggagcgttcatcgaaccgccgccgaggacgagcggtagcgtcgctgagccgcggcgtgcggcggcgtaagcggtctccagcatcggctgccatgctgccgccgatatctccggctcgttcatcagctcgagtgcaatccgtggcggaatggcatcgccctgctccgccgcgacctggcccagacggccggccaggcgggtgagcaaggccagcaccgcctggaatttcggcgtgttcacacctgccgtcagctctgccggctgatagaccggattcatcgcgctcggatgcatatccacgatcacgccgagatcggcggcgagcagattgcgaaccgtcgtgacgacgagatcgtcgagtcggtcccggctcgcgccatcaaaggccaggaaaggaccgacatcgacgaccagacgcacgaaatcgaaacccgcggcacggatcgcccggcgctggtccgcaccgaacagaaagcgcggcgcggaaaacggcggatcgacataggagccgtcggcttggacgtccgcccacccgaacgcatgcgcgacgccgatgccgcgacggaagctgggaatcgggctgacgggatcggccaccgcgcgcaacgctgcgaaaggggcaagcatcgcgacgccggcgatgctgcggagaatggaacggcggctggccacggcgcttctcccgatcgcgttcaaccgctgcccctgccctgacggcgcgccgtcagcgcaccgtcgagcacgatcatgtcgtcctggcccgcaaagggcgcggcgagacctgcgagcgagatgtcgcgaagcgcgggctcgatggttcgcgacggtgcgaaccggacgtcgctccacgcctcggcctcgaagattgcgatgtagtcggccgggcgcagccggttcggctgtccgggaaagcggaataaccggtagatcgcctccggatagcgatagatgttgttgggatcgtgctcgcgaatccagcgcgaatgcgtctgcagatcgatgatgtggatggcctcgcagccgggtcgcgccacctgcgtcaggccggcaacggcagccggaacgctgtcataatgctcgaacgccgcgcagctcacgatcaggtcgaaggttcggccgccggcgaggcgcgggatgtcgaagtcccggccgaccgcatagccgaattcgcgggcaccggacgcggacgcgacggcgcgtgcgcgttcccggtccgtcgcggtgccttcggcgaagcgatcgagcagcaggtcgtagaagatggaatcctcatcgccggcgaggttgaacacgtcgatcgcgtgatacgaccgcgcccccatcgcgagaaacagcacgccattgccgcgcgatgcgccgggactgagctccagcacgtcgcgcccgcgcaggtcgaaccccggcggcatgaagcggcggagcgagccgaaggtgtcgagcagataggcgatctggccctcgatatcgaatttcgacacggtgttcggcgtggcatagccgcgcagcttgtccttgctccatgccagcccgaggaaaccgaggccgagcaccgtcatttcgagttgccgaagcgccggcgtcattgtcggcctccgaatccgagatggttcttgagctcggcagcgccgcggttcgcatgtccgggcttccaggccgccagcgcgctctcatagacctcgatggtacggtcgacgatcggatcccaaccgaagcaatccagcgcccgcgcggcacgctcgccgcgttccggtgcgctgtcgggtgcggccagcttgagccggatcgccgccgcaagcgcatcgaggttgcctaacggaaagtagctgtcgggcccgagatcgagcgcgagattggcgtcgatgtcgctcgcgaggcaaggcacgccgtggctcagcgcctcgagcagcaccatcggcatgccttcatggctcgacggcagaacgaacagcgccgcgttgcggtagagctgggccaggctctcgccggactggaagcccgtcatcaccacgcccggcgtcgccgcggccgccttctcgactgcgtgcagatagctgccgttgtgatcggccgtaccgacgatgatcagcttcctgtcgggatcgcccaaccgcgcgaacgcgccgatcagatcgagctgccgcttctcctcgacgatcctgccgacgcacaggatgtagcggttcgggatcacctcgatatggtcgagataggaggtgccgagcctcggaacgctgcgctccacaccgttcggaatgaaggtcgccgtaaccccgagccgggcgcggacctggtcgacgatgcccttcgcgacgccgatccgcgcatgcgcaaacttcattcccatccactcaccggtgcgcagcaccgacttcgccatccatccccatttctggcgctcgtaatcgaaaccgtgatgcgtcaccacgacgcgaaggccgagcaggcgggcgagcggcgtcagaagcgccggcccgatcgcatggatatgaacgagatccggattgcgtcgggcggcggcgaacagacccagggtggtgtgcaaaagcgcttcgacgttcttcgagcgcggtgcccagaccggcgtcaccgtgacgtctttccagacgtagggctccggcgacggaaggtacggcttgcgcccgagcacttcgacccgccagccgcgctgcgcgatccggaccgcgagcgcggcaacatgggtttcgaccccgccctgaatctcggggatgccgcgcagcccgaggaagatcacctttctcggaggacggtccgctccaccggctggtatcaacgtgtacatcagtgcaccaccgtctcgtagagcgccatcgtgcggtcgcgatatttctcgggagagaattcccgcagcacccagtcgcggcccgcggcaccaagccggtttcgcgccgtccgcggcagcttcgccatgctcgccagggcttcggccagcatgccgacattgcccggcgccaccagtacaccggtcttgttgtgaacgatgagctccggaatgccgccgatccgcgtcccgatcaccgggcgaccgagcgcgtaagcctcaagcacgctgatcggcgcgttctcgtaccattcagaggcgagcaccagggcgcgcgattctccgatcagctgcttcagctccggcttggccatgtggcccgcgaagacaatgtcggcgtcgagctcgaatgcgagctgacgcaaggccgcctcttcgggaccggcgccgaccaggaccagccgctgatgcgcgagcgccgcggcgcgtatcaacgtgccgagccccttctccggcgcgagccggcccgcatagacgaagtagttgccctcgttacaccagggcgtgaactgctccgcgtcgacgaaattcgggatgtaggcgatgcggctcgcgtcccaaccccattccaccagcttgtcgcgatagaagcggctcggcgcgatcaggcagtccagcgtgtcgcggtagagaccgaagctgcggtggaccagggtctcgaggaagacgagcccgctcaccacggcggaatccttgacgcagcgccgcagcagcaggttgtggatccgtccgccgcggcaacgctcgcagacctcgccgtggctcagcatcttgtaggctggacaggcaagcttgagatcgtgcgccgtcatcaccacaggcacgccttcggccttgaggacgtcgaagatcgagggcgagatgtgatggtagacgttgtgggcgtgcgcgaccgacggctggacgcgggcgatcagggcgcggatcttccggcgtgcctccagcgagaagatgatcttggccgcctgcctggccttggtgatcggcccgttgatccggccatactcgatctcggagacgaagtagtcggaccacgggctcggcagattgtcgggatgctccatcgcgaagggcacgacatcccagccggcggccgcgaacagatcgatctggtcgaggaagacgctctcggcgccgccgcgccggtagaagtagttgttgatggccagcaaccggcgctcgctcgtcatcgctcgtcctcccggaatcccatgcggttgagcgcggcatcgacggtcaacacgcagcagccgctcgcgaccgcatgcgcgaccagccgctcgaaggcagcgggcgtgcagccaaagggggtcggcgccggcgcgacgtcgtgcgtgaagaagatcaaccaccccggcttttcgaccaccgcgtcgatccagcgcgtcaatccggcgacatgcgtctcgggctggcgaatctcgacggccctgagaaaggtcgggtcggtcggcccgcggttgatcgcttcgccgcctgcgcggcaggtccggtacgcatgagccagcatcggccgcttgccgaagctgccggagttgtagggataggcgaagttgcgacggccagggcgcggatcgaccgaatcgagataacgtgcattgtccgcgaggtccgcggcgagcgacgcgcgatcgacatgcctgatatcccgatggccaaaggtgtggcagccgatctcgtgaccgcgcgcggcaagctccctgcagcccgcggcatcgatcagggtacggcccggctcgacgcgcccctcgagaccgccggcgatgtagaaggtgccgcgcacatcgcgcgcttccaggatcgtggcaccggcgcggagtgctgaatccggcacgtcgtcgaacgtgaaggagacgatcggttgccgggtcggaatcggaatcaaccgccagggcgtcgcccggatcagccggttggtcaggcggccggcgagccgatcgatcgtccccggcagacgggacgcggttgccggtgagcgcaacgcgacagcgggactatgcatgcgccgtctccccgacatgcatcacggtgtccgcctcgcgaatctcgtgcgcgctcgcctgcaggcgaaggccgaagatcgagacgatcagcatgaaccagacgagactgccggactggaagtacaggctctcgacgcaggcagagaacacgccgtagagccagatccgggtgaacagacgcgtcagcgccggatcattgccgcgcgcctccgcgcgcgacacgtcgcgcagcggcagccagacgagcagggccagcgtgagaatcaggccggggatgccggtcgtgatcgcggcatcgagataggcgttgtgggcgttgaaggcgccgaccgcccagctcgcgccgcctcccgccttgtagaccatctcgtcggtctgccagaacaattggaagccgtagccggtcagcggcctgtccgcgaccgcggacgcaccaacccgccagatgtcgatgcgattggtgaaggtcgggtcgatcccgaggcctgcgaccagttcccgcatcgccggcgagatcgaacagccgatcgtgatgacgttgaaggccgcgattcccagcaccaccatcggcatccggatcgcccgccagcgctcgaacatccaggcgatcaccagaatgccgggcagcgccgcggtggacgacttgccgccggtctgggtgaggaacacgaccgccagcagcgtgatcgcgccgcccatgacacggcgcccggtgccgtacaaatagaggccggcgaagctgatcagcaccatcgccgccgccgcgacgttcttgtgcgcgaaatggccgcgccacagcccggcgttcatcggctcgcggacctcgctcgcctgatggatcgcatgcaccggccacaacgcgacgccgagataggcgaacgccagcgtcccgacgcagcacatcgacagcatgccggcgaactgacgctccgagcgcggcagcagcaggaagatgccggcattgacgatcgtcagcgtcgccagcacgacccgcttcaacgcaaggtccggatgtgccgaaatggcggagacgaaggcgaaccacagcagcgtcgcgatcaggacgccgcgcgggcgcaccgcaagatgacgcaccggtgagctgatggcggtcagccacagactggcggtcaggccgaggaaaacgatctggttgatggtgttcgacttgtcagcggcggggtcgcccgcattggccgccgagaggtcgatgaacggcgtcagcgtgatcaggtagaacaacagcgtcgccacgaacagcggcggtcccaggacgccgatcgctccactctcgcgcatctcgcctgacggcatcatgtcgccctgctcctggcgacgcgcagcgcgtcgagataaccgaagccggcgagcgcggccgcgcaaagcagcaggccgagcgccgcgccggcggcggcggcgatgatcggacgaggtggccaggtcgggcgaatcggctcgacggcgggcgagataacgcgcacgtcggtggcatcgatctgttgccgctcggcggcctcgccggagcgcgtcaggaaggtctggtagagtgcggtcttggcgctcgcctcgcgttcgagttcgcgcagcttgacctgggcctggtcatcgaccgacacattgccgcgcagggtacgggtctcctcggtcagcgtatcgagcgccaccttggcttgaccgacctcaaagcgggcggcgctgcgcagccgctcggtctcggacttgatcgccttggtgagggcgtcggattcggccaacgcattcagcatggcaggatgacgcggaccgagggtctgggtcagggtcgcgatttgccggcgcagggctgcttcgtcggcgagcaagccggacaaggtctgcgactgcacggcgcctgcctgcacgccatagagcgacacggcgcgcgagacctcgttgtagcgggcctccgcctcggcgagacgcgcctttgcatcggtcagcttcccgttcatccgctccatggcatcggtgctcagcggctgcttggactgcccctgctgaaggccatgggcgcgacggaaggcttcggtgcggtcttccgcctcggtcgccgcggccttgagctcgccgagccgcgccgtcagcccctgggccacgcgtccggcccgctcggcgtcggcccgaacgacctcttcgcggaaggtcgtggcaattgaattcgcaagccgagccgacatcgccggctcgctcgcccagaccgacagcgtcacgacgtaggaccgctcctgtcgcacgacgttgatgcgcttggcgagcaggcccatcagatcgttgcgttcggccgcgtcggatgcgcggcgatcgaacagccagccgagatcgaacaggcgcatcttgtcggcgaattccggatcgttcctgaggccgagcttgtcgatcacgcggcgcagaacattcccggaggtgatcgtccgcatcttgctctcgacatccaggatctggctgtcgctctggatgttcgtcgcgtaaagatcgttcggggtgaccatcaggttggacggtgagatcgtgagatcggtgatcgcggtgaagcggggcgtcacgagttgcgttgcaccgacgccgacgatcgcgccggcgagaatggcaaccagaatccagcgccagccctgcagcagcaggccggcgacctgcatcgggctgatcacggccgaagccgttgcgctcatcgcgcggtaagcggcatcatctcgccgtgacctgttgctgtcggttgctgtgtacatgtcagtcgacttcactggggggcatgccggcctggcgggggcggtctagttggggctggaccaggcatcgccatcgaaagcgatgccgaccttgatccgcgcgatcggcacggagcccgatccgctgatcgtgccgtccggcaacacgtgcccggtgatgggtctcttgacgctcagagcggccaaatcgtccatgacgacctccgtgtcctgtcccgagcattcatttcgctcggcttggcccactatcctcgctccaagagcacagacaactttaagtggcctttagcgttaggtgttagcgttaaccttactatcaattccttggatattggcatgcgcagtgatagctccataaaagctgatgtccgacgacgaactgatgagccgcatataatcaacctttgattgcatcggcgatcgcgcgtcgttcacgaacacagcgcgggaggatcgcacctcacagcttcttcgccgcgctcgcggttgcgcgaccttgcggcttcgttgagcgacggaccgcaacgctccgctcgagaccacgagcaagcgctcgaggacgcgggcgtcgcgtcaggcgcgacgtcggcgttaacgtcaatcttcgaacggcgcgcagctcacgatacgacgcgcatgcgagcctgatagagtgcgcgtggggatcgaccgccaaccggaggccgtggatcattgctacatatcaccgccgttagccggacattctcgacggccacgccgatgatcgtcagctatctgctgtcgagcggatcgctggcggcggcgagcctggcgcagctcgtgacgtttgcgatcctggcgcgtgcgctgggcccggctgaattcggcctgttcgtccagatatcggcggtgaccgcgatcgcggtgcagatctgcggcctcggcgcctccgactgcctgctgcgcagggtcgcgcgcgagccggcgagttatcctgacctgcttggccacaacattctcctgatcgggctcaccggcgcggtgctcgtgatcggcggcgtcgcggcgatggcgtcgtggacgcgcatggtctccggtccctcgatcgccgtctcggccatcgcgctgctgttcctcggcaacgtcgtgctggtccgcctgatcctcctcgtcgagaccgtattcctcagcctcggccaggttcgctcggccaatcgctcggtcgtgggctttgcgatcgcgcgcacggcgacggccgcgcttgcctgtctcgtattccatgcatcgagcctgtcggaatgggcggcatggcagtttggcggacacctgctctatgccctggtgggactgatgtggctccggccgcttggccggccgcgattggcgatcctgcgcgaggaattgcgctccggcgttctgttcagctcccaattcgtcgttcgtgcgatccgatccaacgtcgacctgttcgtgatcggcctgttcacgccgatcgagaccgtcggcagctacggcgtcgcccgccgcatcatggacagcagctacctctcgatcgatgcgttcaaccggctgatctatccgcgcttcgcgcgcgccagccgcgacggcctgcatctggcgctgcccgcggcaaagcgtgctctggccgcggccctcggcctcggcgcggcgacctgcctcatcctgttcgtgctggcgcccgagttgccgcggttgttcggccgcgagtaccatgatcttgcgttcttcgtgcggtgcctgtccggcacggtgatcctgatcggcgcctgggcagtcgcgatggacttgctgggggcatcgggacggcaaggcgtgcgcgcgctgatcctgaacagcaccaatctggtcggcagcggactcatcgctgcagcgacctggctcgccgctccgatcgggaccttcctggcactctatgtgatcgagggatcccttgtcgtctccgcgtggctggtgctgctgcggctcgtgcgccgcagttgccgggatgcggacgagtccggcgcgactgttgcgcggtcaaggaatgtcccggacgacgcggctgtcgatccaagccgccggagccttccggccgtgcaggaagccgagcggtagcgccgcggcgtggaacaaccacgcaacgacagcatagagaccaagcgtcaggctgcgctggcgcaggctcatcaatccgatgacgccggcgatcgtggccgcatcgatcgcaagccccgatccgggatgcggcgtcaggaacggcagcacgaccatggcggccagccagaggtagaccgcgccccacagcttcaattccggcaattcctgaaccagctgcttccactgcggcttgccgaacgccgcccgcagcagttcgccgatgccgcgcagatagcccgacttccagcgccggacgagcagcgcgtaggcgttgatggcatggccgaaatgccggacgaagctgcggtcgagacggtgcagccgccagccgctcgcccgcagccgcacgccgagatcgaactcctcgtagccatgcagattgcggtccgacagatatccgacctgctcgatcgccgtccgccgataaagaccgccgccgttcaagcggtcgatctccccgatccggttctccggcgagatcctgcggccgcgccgcacatattcgagactggtgtcgttcatctccacgacatgcccggtcacacccgcgacgcccggatggtccgcgagccaggcgagcgcgtcgggcaggaaggcgggatcaagcagcatgtcgccgtccatcagacagatgaacggttcgcgactgtactggaaaccgagctgcggaccgatgccgcaactcggcgcgatcgccggttcaagctgcacgatgcggacgggatatctcgccgcgacggcgagcgtcgcgtcgcgcgaaccgccgtcggccacgatgacttcgccgccgatcccttcgagcgcagccagcacgctctcgatcgccgggccgatccgcgcctcctcgttgagggccttgaggataaccgacactgccatggcgtgatccacctcagccgaaatcgcacatcagccggctccagtcctcgccggcgagcccgccgagatagatgtcaccgcgcgcgacggcgtcgttcacctcggcaatccgcgtcagcgccatggcgaacgcccggtgccgaaacacgagccagcgctgcagcgccagccccggcatcaaggcgggctgcgcgcggccgcgggcttcgacatggccggtgctttccagatggcggaacatcgcacccagcacgacgatttcttggccgggcagcgacaggatgttcagaacgtgcgccgtccgccccggggcggcgtagtagacgaatgcgccgatcggcgtgccggcacggtcttccaccgcgcggatagtgaacgcgccgagcctggtattctgcgccgccagggcgaccagccagccaagttcatcttccgaccacaacggccgcaccgcataatgggcgatcagccgcggcgcatgctcaagaaaggccgggaccggcatctcggtcacgttcacgccggcggcctggtccgcatcgtcgccgccgcgcagacagcgcagcagcgcgtcgagggggcgcagcagcgtcgcgaagcccggatcgtttcggcgcaagaaccgcagcgagaagcgtccggcgagcgcgcccagcggacggaagctgcgcgcccattccaggttctgcacgggtatcggttttccgccgatcgcccgcaggtgatcggcgctggtcggcgaggcgctgtcgcaaaacgaaaaatcggcgcgcctgggccgcagcgcaaggatcagctgcgccgcgccggcagcttccttgttggcgtcggtcatgaagacgccaagcagccgtccgggcacgacattgccacaggccatgaagcgcatcgggacagtgagcaacgcgctacggatgcgtccgtcctgctgctcgtagacctgcgtgcctgccgtcgcactgtagcacggcgagccgaagttcagggcggccaggtacgcctcgaggtccgggctcgccggcttgtcggcatccctgaagatcttgaggaagaggcgcgcgactgccggcacgtcgtcggtagtcatcggcctgacggagcccctgcgcggggcctgtgcattcgcctgcgtctgcggcccgcgctgcagcatctagcgctcgggaattagcggacgcgcccgcgcgtcatgcggatggcggggccggaaagcaatatgcgacgatgaattcagcatggtcagccacttgatctgtgtccaatcgcagcggcgtcgccggacgccagtatcaatgatcttcaaaaaccgatgaccctgtccctcatcgctcaccgcgtggtgcgcctgggcggtcttcactgtcactcaagcaaatcgagagcattaaccccgattgcgccgaccgggcgcccgtcatgcggcgaccctccaacttcgggcgcaagccgtcaagaatttcaacttgtggaggttaatgcgcgtcccgaccgcggtccgtgacatccgcatgaccgggtgagccgctactttggcgcgatggttccggttaccttcagtctcgccgacctcacccaacccgagacgtcgttgcccgtccccggattgagatacatcaccgacgaccagccatcactggtctgcgcataggcgacgagcacgtcattcggaatcacgaacaccccgctgatcgggcagtgaagattgggcgccgagtagaattgcagccgccccttgcccgtcaccacattggcaagcggcggcgacagcatcgggacgcgactggtacccgcccgcggctccttgcagctcgacggcggctgcgcgtgcacagttgcacccagagcccccagcatcagggcactaccggcgatgcaggcgagaacaaacctgtccgacgtcattcactctccgaccgcacgacgcaatcatccgtcattccggagtttgtcgccggacgaggcgggcaggttctgtgcgctccaacgaaactttgcgcgcccgcgtcgagacgcgcgtgtcgccggttccggcagcgcaacgcgtgtccggttcagtttgcggcgatgatgacgaggttgttcaagacaggcgtcgaacagaaggcgacgacgagcgcgatgttgtagacattgtcgctgcgccaaagcagccacgtcaggacgaatgtgagaccgagcttgggaaccagccatccgcgtatcccaggagcaaggcggattgttgatccatgtcacgaagcggccgagcgggatgcggacgttgagatgcgcacaagcatcggggacgaagaagatgaatgccgcggcgatcgccatgtccggcgggatccgaaacaggatcgccatgatcggaagaaaggcgtcggacagcacccgttccaaccagaaatgtcgggcgccggtgatgaacgtaatgccgttcgcgctgtggtggaacgagtgcatcgcccacagcaaggggatcgcgtgctgaagccgatggaacgtgtatttgtagaggtcgagcgccaccaccacgatcgcgaacgagacgtaccacctgtagccttcggtcggcagcttgatccagccaagtccgacatagcttgcaatcgcacccgcgctaatcgcagcaagtggggcgaacaggtgctccaacccgacgctcacgatgaccgcgagccaatcagcacgaaactcgtcgccggaaacaggcgcaatgggccacgtcttctccaggatgcgactgccgtagacgatccccagaaggaccgctgcgcaaaaaacggcgtttgaaatctcactcgacatgagaaacgaacccgccggttcaaaaggccggacaaaatgaataaaacattccgccgcctgtagactgaaaaaccttattttttctcaacgccccgacgggcgcaagcagggtttttacgggcgttccttcgccttcagccctgacttcaccacaccttggtccacgccggcagcgccgttcgatcacccgtcaatcccacggcggcttgccgcggaatgcctcgaccaggaagtccaccatcacccgcacttttgcgctgacatggcggcggctcgggtaaaccgccagcacgtcgatctcgggtgtgtgatagtccggcagcaggcggaccaggcggccctgccgcagcagctccccgatcaggaatgtcggctgcaggatcaatccgaatccggccgctgctgccgcacaagccgtttcgccgttgttggtatggaagatgttggagaccggcacggcgtgaagcttgccgtcgccgtcgagcagccgccattcctcggccgaggcggaataggcgtaggcaatgcaggcgtggtttttgatgtcatccggggtctgcggcgcgccgtgtcgcgcgacgtaatccggtgacgcacagacgaaatgatggatggccgcgagcttgcggctgatcaggctcggcgatcctccgcgtgagatgcgcacagccagatcgaagccctcgtcgacgaggtcgacgagccgatcgaccaggctgatgtcgagttcgatgtccggatagcgcgccatgaagcgtggccatagcggcgcgaggtgaagaatgccgaagctcagcggcgcgttgatccgcagacgcccgcgcggctgcattgcagtggacgacgcgatcgcctccgcctccgccacctcctccaggatcgagagcgcgcggtcatacagcgtcttgccggtctcggtcagcgacaggcgccgcgaggtccggttgagcaggcgcgccccgagcatctcctccagctcgttgacgtagcgggtcacattggccggcgaggtctccagtttgtccgccgcgcgggtgaaggagccttggccgaccacggtggcaaacacctcgaaggcacgcagacggtccatggcatcctcgatcattcataaaagatgaatgatacaaccatcttctgcaccttctttccagttctgtaagtgactaatcaggttcccatcacgccgcgattggcgcggccgaaccggagaacggacatggcacagggtacgggacgtctttcagacaaggttgcaatcgtgaccggcgcgagctcgggcatcggccgggtcacggccaagctgttcgcggccgaaggcgcgaaggtggtggtcggcgcgcggcgggaaagcgaactggcgagcctggtcgacgagatcaaggccagcggcgggacagcggtctcgctcgccggcgacgtgcgctcggaagattatgccaaggccctcgtcgccctggcggtcaaggcattcggccgattagacattgccttcaacaatgccggcaccctcggcgagggcggtgcctcgaccggcgtctccgaagccggctggaacgatgccgtcgcgatcaacctcaccggctcgttcctgggcgccaagcaccagatcgccgagatgaccaagcatggcggcggatcggtgatcttcacctcgaccttcgtcggttacagctcgtcattccccggcgttgccgcctatgccgcaagcaagtccggcctgatcggcttgacccagacgcttgcgtccgagtttggcccacagaacgtcagggtcaacgcggtgctgcccggcgcaatcgagaccgagatgtatcgcgagatgaacgacacccctgacaaggcggcgttcgtcaccaacctgcacgcgctcaagcgcgtgggtcgccccgaggaagtcgcgcgctcggtgctttatttggcgtcggaagattccagcttcgtcaccgggaccgcgttgctggtcgacggcggcctctcgatcacccgcacctgaggcgaccgaccaaccatcgttcaaggaggctgacatgggattgctggtcgacgggaaatggcaagacgcctggtatgcgacaaagccaagcggtggtcgcttcattcgcaaggacagctccttccgcaactggatcacggccgacggcagcgccggcccgaccggaatcggcggctacaaggcaaaggccggccgctatcatctttatgtcagcctcgcctgcccctgggcccaccgcacactgatcatgcgcgcgctgaaggggctcgaggaccagatctctgtatcggtggtgcactggctaatgctcgagcacggctggaccttcgccgacggcccgggcgtggtcccggacaccgtctaccacgcccggttcctgcatcaaatctataccgcagcggatccatactacagcggtcgcgtcaccgttcccgtactatgggacaagcacaccggcagcatcgtcagcaacgaatcgtccgagatcatccggatgctgaattcggccttcgatggaatcggcgccaagcccggcgactactatccggccgcgctccgcgaagagatcgacgcggtcaacacgcgcgtctaccacaccgtcaacaacggcgtttacaaggcaggcttcgccaccacgcagcaagcctatgaggaagccgtcgtgccgctgttcgacacgttggactggctcgagcaacggcttgccgaccggcgtttcctgctaggcgacagcctgaccgaagccgacatccgcctgttcacgacactgatccgcttcgacgcggtctatgtcgggcacttcaagtgcaacatccggcggctggtcgattatccaaatctgttcgcctatacgcgcgacatctatcagtggcccggcgtcgccgcgacggtggatttcgagcatatccggcggcactattacgagagccatcgctcgatcaatccgaccgggatcgttccgctcggtcccgtcctcgacttcaccgcagcgcacggacgcacgcagccggccgccgcgaatcttccgcgagcgcatgggcttcggcacgtgggatagatcgagaatccgcgagcacggatgcgaggttgaagcagatacccggttgaacaccagagatcgcgaccgcgacgaacagcagaaccccaacaccacttcgttggaggacggacgatccgagagaactgcggctccgaagccgaatttcattcctgctcggacggcgcgaatccggcaatcagcttcacgagctccgtctggcctgcggtgtcggtctttcgaaacacgttatgaaggtgggtcttgaccgttgcctgcgtcagcccgagcgtctcggccagcgcccgcacgccatcgaccttcatgaccgcatcgacaatccggacttcactcgccgtgagcttgtagagcttggcgagcgcctcgagcggcggtggattcgccggcgatgtcttgcggacgaagacggcggcgaccgccgagtgcagcgcgccggtccgctgccggtcgcccgtggtcagcggtaacacgtaggcaaaggagccgccccgcagcgaagtcaggagcggaatcggaccggggttgccggctgcggcattgccgttctcggctgcagcaagcgcctcgcgcaacgcgcgctgcgcctgcggcgagaccgccgtcaatgcgcccatcctctcggtgagcagcgcgccatcgttgagcagagcgcgtccgggaccgttggcgaagaccaggcgcccgttcgcgccgaccaggaaaacgccggccgtgacgttgtcgagcgtctctaacaggaccgcctgcgcggtcctgttctggtcgaacagccgtccgatcgagaccgcacgctgcaaatgcggcacgatcagcgcaaggcgccgacgattctccgcatcggcgaggccgtccgcttcatgcatctgaatggcaatgatggatgaactggtcgcgctcttttccagattggcggcgaccgaatcgatgacgccctgcggcttcatccactcctcgtagaacaccgtctccagcatttcttcgaacggaacgagatcggtggacccgtagacctgaccggcatcatagaaggtagccgcaggaaaacatggattcagggagaaatatttctcgaagtaaagcttggtgtagtgaggatcgttgttgaacagatgcagctgcgcggactgctcggttgcggcatcgtgccagaacagatttgccgaggagccaccgacgaaccgacacactttctcgatggcacgtggccagaggggaggatcgagcgcggcatcataaacgacgccgatcagctctgaaagcaaggctgattcagacgtcacggccaactcttcatcgtggcgagcaattcgtggggcattggcgcctcagtgggactctacctctacaacacgcaccatcacgacggcaaacgttgcgtacacgaatattgggacggcgttgccccacggaacagcatgccaagacccgtctgcggctatttcgctggtgtgttcggcttggcaggcgccgtctgcctctgcgaaacgacggcctttcccgacgaagcttccggcgcggcgggcgccacgggcgctgactggccgaccgacagcgagacgccgaacacgcgccattgtccgtccaccggcgcgaacaataattcaaaattcacctgcgacggcaccgacgggaaaaacccggccatgtgcaacaggccattcggctcgatctgcggcaataacgagagctgcggctcgatcacggcgacgccggagagatcgagcttatcggcgcgctgcttggcgaaaatctccgcgagcttggccgcggtgttgacctggaaaccggaggcgccgaggtcgcgcagcacggtgtaattcccgctcttgttggcatgatcgagcgcaaggagcgtcgagcggatcagcatcagcacgccgttgcggtcgatgttggcgggcttggccgcctgctgctgcgccgaaggttgtgacgggggcgggtgcggctgcggcgacggctgctgcgcgaacgtcgcgaccgcgcccagtatcaggagcccaacgccggcactgacccaacgcagcgtcatggcaatgccgctcaagcctaccactggatcgacacggcgccacgcccgccagcgacattgcgctcgagcccgatgccgccgccggcattggcgacgatcgcatagttcttgctgtcatagagcagcgcggttgcgccgattgcaaaggcgttggcaccttcgaaattgccgtaaccggccgacagcgcgaatttgcggcccggttgcagcgccggcatcgatccggcagcgagcgcaaccgcggtgccgctgcgcgcctcgaaacggttgtccatcacctgcgattgcagcgaggtcacctgtgattgcagcgaggtgaactgtgactgcaatgaggtgaggttcgatggattgaagctcgaggtcgccaggtttccggcggcgtccgacgtgacgaaggacaccggcccgctctgggccgccaggcttgccgcggaggtgacgccggccaggcgataagtgttgcctgcggtgccgatcgcgacctggttggccgccgtcgtcgtcgcgcccgcgccgaccgcggtggagttcgcaaatcctgcggtggcgccggaaccgatggcggtagcgctcgccgcggacgcagtgctgccctgcccataggccgtcgcgcctgcatcggtcgcgctgctgccggcgcccgtggcagtcgcgttggatgccgaggctatcgcaccattgccgaatgcggagctgcctgcagcggcacttgccttcgccccatcgcccacggccgtgttgccgagcgccgccgccgagctggcgccgatggctatcgatccggtcgcgaccgcgccggtaccgatggcaatggcattcgcgccggtaccggcggtcgcgccatcgccgatcgcgacggcgctcgccccggtggcgtgggcattgttgccggccgcgaaggcattggcgccggtcgccgtcaccgtattgcccagcgcgacggcatttgtggtgctggcgctggcgccgcttccgatggccgtcgaggacacccccgctgcggcgctgttgaggcctattgcaactgacttgtcgccggtggaccgtgcgcccgtacccgcgcttccgtcgccgccacctccgatcgcgacgctgtaactcccggaagcggtagcagcaaagttggtaccaccaaccccggtaaactcgccgcctcccaacgcggtgctcccagcgcccgctgcgctgctgttggcaccgctcgtcgtgctgtagtttccacgcgccttgctgccgacgccgctcgccgtgctgtcgataccgcttgccccggcgcccaggccgatcgccatgctgttttgcccgctcgccgtggtgttgacaccgatcgccacgctgccatcaccgctcgcttggctcacggggccgcaaacgaacgcaaaattcccagttgcggtgccgagcggggcacctgtcccggccgcgccgcaaacggtttgcgcagctgctggcaacggcgcaaacagcgaaacgaacgtcgcgagcgcggcggcgccaacaggcgctttgatcaaacgaaacatcgattcagtgatcgcatgaggcatttgcgctctcaactccagaactccggccggtcctgacgggttgaccggacgtcgcgaccgcgaatgtgggacacggccgcaggcccgacatcaaccgttcggttgaactcgtcttcaacgtcgtcgagcgccggagttttcccgccaagtgttgccgaattgcttcgggttgcatcctgaagtttctgcacccggccatcgggccttgccatcaggccgacaatcgcacctcaaggaacgcaacgccggatacggcgagcaagttctacggatgcgatcgagcttgaatgccaaactggcaccgccgggtcgccggccggaagaatggcacggcgctgatctcttatgccattgagatatcagcatgattcgccaactgccattccgaccccttcagtccgatctggaactcgtcggcgatggcaatgcgcgaccgggccggacggcatgctgatcggttgaattcgcgacgccggagtcttatgcgtggcggccatgagcacccttgccaacgccgaaatgtccctgacgtcgtggccgcgccacgaggcgcgcgccgacaagccggcaccgttcctgccgatgaaccgtgccgagatgacggcgctcggctgggaccaatgcgatatcgtgctggtgacgggcgatgcctatgtcgaccatccgagcttcggcatggcgatcatcggccgcttgctggaggcccagggcttcagggtcggcatcatcgcgcaacccgactggcagtcggccgaaccgttcaaggcgctgggaaaaccgcgcgtgttcttcggcgtcaccggcggcaacatggattcgatggtcaaccgctacaccgcggaccgccggctgcgccatgacgacgcctacacgccggacggcgaaggcggccgccggccggaccgttgcaccatcgtctatgcgcagcgctgccgtgaagcgttcaaggacgtgccgatcgtgctcggcggcatcgaggcgtcgctgcgccgcatcgcgcattacgactattggtccgacaaggtgcgccgctcgatactggcggacgccaaggccgaccttctgctctacggcaacgccgaacgtgccgtcgtcgaggtggcgcaccggctcgccaatggcgaagcgccgcgcgatctcgattcgatcaggggcgttgcgctgttccgccgcgtgcccgaggattacgccgagttgcatgccgacgatctcgactccgccgacgagggcgcagcgcgccaggcgggcaacgtcgtgatccgcctgccggcctgcgagcaggtcgagcaggaccgtgacgcttacgcccgcgcatcgcgcgtgctgcatcgggagagcaaccccggcaacgcgcggccactggtgcagcgtcacggtgaccgcgacctctggctcaacccgccgccgatcccgctgtcgacggccgagatggacgccgtctacgacctgccctacgcgcgtgcgccgcatccctcctacaaggacgccaagatcccggcctgggagatgatccgcttctcggtgaccatcatgcgcggctgcttcggcggctgcacgttctgctcgatcaccgagcacgagggccgcatcatccagaaccgctcggagggctcgatcctgcgcgagatcgagcgcatccgggacaagacgccgggcttcacaggcgtgatatccgacatcggcgggccgaccgccaacatgtaccggatggcctgcaaggatccgaagatcgaggcggcatgccggcggccgtcctgtgtctttcccgaaatctgtccgaacctcaacacctcgcatgacgacctgatcaggctctatcgcaaggtgcgcgaggtgaagggcgtcaagcgggtgatggtggcgtccggcgtgcgctacgacctcgcggtcgagagccccgaatacatcaaggagctcgtcacccatcacgtcggcggctacctgaagatcgcgcccgagcacaccgagcgcggcccactcgacaagatgatgaagccgggcatcggcgcctataatcgcttcaagaaaatgttcgatgccgcggccgagcaggccggcaagaaatactacctgatcccgtatttcatcgccgcgcatccgggcacgaccgacgaggacatgatgaacctcgcgctctggctcaagaagaaccgctaccgcgccgaccaggtgcagaccttcctgccctcgccgatggcgaccgcgaccgcgatgtaccacaccggcgtcaatccgctgcgcggcgtgcgccgcggggcgagcgacaaggtcgaagcgatcaagggcctccggcaacgccggttgcacaaggcgttcctgcgctaccacgacccggacaactggccggtgctacgcgaagcgctgatccagatgggacgccgcgatctgatcggctcgcgccccgaccagctggtgcccgcccaccagccgcccggcaccggcaaggccgccggcacgcggcgaccgctgcgcgacggcggcaaggcgcagcggttcacgaccaagggcgtgcggatgggaaagtgaacgctgcatcatcgacttggcttcatcgccaaatccgcagcctcgaattcagagaccgatcgtatggccactttcatcctgatacccggcggctggcagggcggctgggtctaccaagatgtcgccgaaatactggctgcgcacgggcacaaggctgttccggtcacgcttgcggggctcggcgaagcgcctgcccctttggccaatcttgatgctcacatcggcgaggttgcgcatgccgtgaagtcgcatgacgacgaactcgtcattgtcggacagtcctacggtggaatggtcgtgagcggcgcagctgacgtggcaccatcgcagattcgcgcgctggtctatgtcgacgcctatgtgcccgattccggcgactcagtctggtcgctgacgacgccccgttttcgagatctttttgtcgcgggtgtaaaatccgacggactgaactgcgcgccacctccgaaccttgacccgcgctgccgaccgcagccgatcgggacgttcctgcaatccatcaatctgagcgggcgatggcgtgaagtgccacgcaagtcctacgtcggcgcattcggatgggagggaagtcctttccttgatctctatgagcgcttgagccgcgatccgggctggtcgaccatcgccctcgactgcgggcacaatgtcgcacgcctgaagcccgacgttctggcgcatattttgctgggtcaggtttgaccgtccaacgcttgcaccgagggcattcgtcgtgatcgccgcgtgtacccctggtctcaccgctatcgcattatgtccccgttgacgcctctgaccttcgagcgagcccggaatgcagcaagcttcggtcgaaaagttctcgaacctcattggtgccatctacgattgcgtgatcgcgccggaacgatgggcagcggttctggacgggatttgcgccgagttcggctttgccaccggcgcgctctcggtcgccagcctcacaaacatgaaggcgggcgtcaatgcggtctccgggtccaacctggcccagatggctcagaacgggatcgcgtatgggactgacatcatcgaactctggggcggcgctgagcgcattcagcaatacccgctcggagagccgatcgttcaatcccaggccgtccggcaggacgtcatcctcggcaatcgctattatctcgagtgggcactgccgaagggcctgttcgacgccgttgccgtcggcctcgttcgcgacgggatgatggttggaaatgccatattcagtcagcatgaatcggccggcccgattcgcgatgcgcagatcaccggattgcggctgctggcacctcacattcgccgtgccgtgacgatcagcaatctgttcgacatgaagacggtggaagccgcaacattcgccgcgaccgtggaggccctgacggctggtgtcgtcctggcggacgaggaatccaaaatcgttcacgccaacgccacggccaccgcgatgctcgcagccggtgatccgattgtggttcgacacggccggatcgccgttcagtccacgatcacgacaagcacattgcagtcggctgtcgcacatgcggcgaaggacgaggcgacgctcgggcaaaagggcatcggcatcccgatccttcgtcccgacggagcccctcttgtcatccacgttctgccgttgcgacgcggccacatgcgatccggtttgatccagagagccgccgccgctctgttcgttgcgtcggcttccgggccgccgcgattgcctcaggatgctctcagccagctctatgatctgacgccggccgagattcgtatcttcgagctcgtttgcgaaggacaaactcgagccgatatcgcggcgatgctcggcatttcggtcagcaccgtcaaaactcatctcattcacgtcttcgacaagacagggtgccggcgtcaagttgatctggtcaggctcgcaaagtcactcactttcccggtgtaagccgcgccaacgacggctcgtccagtcgctgatgccgcacgtgccctgtcacgccggcaccgacaacaaatgactgaagaacgatacgacgatttccctcaaacaagaccctgctccaaattcggcgtgatcgagtgccttccaaaatcggttaacgcggccgggccttcgtttccggatagtccggagacgtcgctgcatgacgcgcgcgacgatcggaatattctcgctccacgtcgggaggatgggaacggcgtgtcagcacgacgggctcgaagaagaagcgcaccgcttcagcctgcacttcggcgatgttgaagccgatgtcgtgcagcagatcggcattgtcctggagatcggcgcgcaactgcgccctgaaggaagcgcgttgcgaccacatcgcgggcagccggaacatctcgcgcaacgccgcgatgaaggcggtcgccgtgcctgccagtgcgccgcccgcacgatcggccttggctaggccgggtgagcggatggccgtgctgccgtgtgagcccgtggtttgattgtggcgagtgtatccggatcgcatccgttgctctcctgtctcagtgactcgatcggaagctgggggagatagagcggcggcacatcaaccgttcggcttacaccacgtgtcacggccgcttcgacgcttccgtcggcgccatggtcggcacggtactcttcaacgcggccgcttccgcgcgcggatcgatcccgcccgcgcgcgaccaaaagacagtttcggataatgggcctggatcacatcgcacgacgcgcctttgtgaccctagcttgcgcttcgctgatcggtacggaattctagaacgtcgcactcagaccaaggcgaggcccgtggatgtagcgatcgagcgtctgcttggtgtccgtgctgaaggcctggttcagcacattgaagtaggcgtccagccggtagctggcgctgagcttgacgtttggcgtcatccagtacgacacgccgacctggatatccgcgttgaacacggttgcgaaacgctggtcagtggatgtgctgctgctgacgctgccgagagtgctgttgagaacggccggatcgaagcttcgcgcagacgtcgacgtgttcaccaacttctggtttccgaacaggaccgcgacatcgccgagataatcaaacgcccagctgcccgcgaatggaaccgcgccctcgatccccagacgcggcccggcgccgagaaagctgtttcgttgatttgtcgcatccatggcgttggtcgagatttggttggacagaagagacccgttgcccaaaatatcaaggggtttggtgaaggtgctggtggtgctcgtgttgttcgttgcgctgcttttgcccacgaattccgccaggcgcaggccgaatttcacctgcatcgcggacgcgccgcccccaagaacgtcccgtccaacagcggcatcggccaaccaatgcgtttccttgtacgccgcccccgacgacgaactcccgctgaagccgctaacacggagccctttgaccgatgcgaggactgccggatctatcgcccccgcagacgatgcgaagccggaggccttgccctcaccgtaacgaaactggccgctgacatgccatggcgaagccgcaaagcggtagtcaaagccggccgccgcttcccagcctaccttgggcgtcaaatcgaacgatccaggcagacgagcagaatcgctcagcgcgtccagccgggtgaaatcggtgaggttgtaatccgacgaaaccggatcgccgccgctccagatcgcgccgccctcaccccagacccgaaaccggccgggctcgccgacgaccggcgccttgtaggccaacggcagatcggcggcgaacgcctgcaacggatcggagcgcccggcacgggctttgggagcggcctgcggctcgactgccgatgctgatttcggcgccgcgttctgctcgcgtagggacttgttgtggcgcagcgctgcgttctccttgcggatcgcggcattttccttctccagcgcgttgagcctcgccaccacatcgtcgtttggcgccgcatgcacggcaccggccgcaccgatgccgagcgccagtgcagcaactagattcttcttcatgatcgcctcgccccattgcctgcttggcgccgacacagcggcgcacgtgcagcgaatgtttccgaatatggcgggcgcgaacacctcgcatatgctaggggcaccggcacttggcgaacggctgtgacaaagccgccacaaggctttcggactcagccgcgccggatcagcggcagtgtgctcttcagcagcgcgacgagctggctttgctgattggtccgggtcttgcggaagatgccatggaggtagaagcgtgcggtgctgaagcgaatgccctgatggatcgcggcatctttcaatgtcaaacctccggcaagcgcggccgcgagccgggcttcggtgggcgtgaggtcgaacagcttgcgggcgtgatctgcgaacccaccgggcaatgccagagacgtctggtgcaggtagatgatagcgtgccgcggacgcaggaacccggatacttcggtgcccgcggtcggcccgacgctcagcacgacatcgatgccggcttcatcggcctcgccggcgcggagcagaagatcgccgcccgggccgggggcgacaccgtcgtgaaccgtgcaggcatcggcaacgagttgccgcaaggcagccgtgctcttggcatccgccgctgccagcgtgccggatttcacgcgcaacgggcttctccggcgcatcaggatttcctcggccaccccattgaggtggacgacgctcaactgggcatcgacgagcagcacgccgaatggcacgtgcgcgtagcctgaagccagcgcctgcgccaattgaagcctgcggccgagctgggccgcgcgcgcgatgtgccgcgcgatcaattgcagcacttcggcctcggccgcgtcgaaggcgggttggttgcgaccgcgctggacgtcgagaaaccagaatgacggaccggacgccagcaatttgctgccgaggccgccatacatgtcctgcggcgccatccattcattccagaagcggctgcgccgcaagatctcatctccgatcaacgcacgatcgctgtagatcatcccgacaggagcggcatccagcgcgtcggtgtagatgtcggaacgccctgcatgttcgtcgatatagcgacgctgatacgtggggtcggggtttgcattgatcacatcggccgacgccaggccgggaccgctccggacgaagcacgcagcagaaccgtggaacatgacacggacctgatcgatggcagcctgccactgcgatggatcggaaactgtttcgtaaatcttgtcgatgacgccaggcgaaagctgcggtctgaccgatgtcatgtccagtttcttgcactgaggttattggaagccgaaaaggcccgtgcgcattcttgtccgcattcttgggatcgggcgcgctgccgctcacgccgcaagagcgagcgtgccggacggagcgggcatgccaaatcagatgctgaaccagagccaaacgatgacatgtcagccgcgcgctgcaggctcgtgcatgcgaccactcgcgtccggtccgggatgccgccgcctccaacgatctgcaatgcagttcatgcattcaaccccgagccggcgcgcatcaagatggtatcatcttgaggctattcgcctaacgcttgtggcacggtggcaggaggtcgcagactgcacatcaaccgtccggttgaagccatgcagtttttgcttccgcccccggaaaccggttgaactcgtctccgccaattaccccgaccatgtgctgccgaattgcttctcaccacgtcccgatgtttcggcacgcggccttcgccatcacgccgacgacttcgtccgagatgtcgaaactgttggcgagcagatatcgctgcgccttcggcagccgatccgacaggctgcgctcgtggtaggtgccgtatcgagaacgccgatcacatccgcgcgtcgccggcaaacagaccgagaacggagatggtcctggttttgtacgcaaatggcgcgcccggaacgattcgaacgtccgaccctcagattcgtagtctgatgctctatccagctgagctacgggcgcattttcgcggttgggcttgaagcccgcaaggttccgggagccccggaacgtcgcgaaagagcgctctagctacaggctcccggtccggttggcaagctctggaaacgccattttcggcgcgctcctgccgccccagagtaccggaacggcgttacgccctcgcccgctcgctgcggaccgacagcaattccaccgggcgatccgggatcgagatccggaaggtggcgccgatggtaccctcgaccagatggatatggccgccatgggcccggatcagctcggcggcgatggcaaggccaagtccgctgccgccggggcggccggaagtctggaacgcctcgaacagatgctcgcgcgccttggccggaacgccgggcccagtgtcggagacctcgatgatcgcaaccgtgccctcgcggcggccggtgatgcggatctgctgggcgccgccatcgccgtcctgccggctttccagcgcctgggtcgcgttgcgcaccagattgagcagcacgcggaacagctggtccggatcggcgtcgatggtcaggccgcgctcgatcgcgctgatccaggtgatcgagacatcggtcgcaagcccggccgattcgcgcacctcggcaaccgccggctccaccatgatgacgcggcggtcgggcgccgcctcctgcgcacggccataggacaaggtcgactggcagaacgcgatggcgcgctccagcgagcgcagcagcttcggcgcgaagcgctgcacccgcggatcaggcacgctggcgagctggtccgacagcaattgcgaggaggccaagaggttgcgcagatcgtggttgatcttggagacggcgagaccgagggcggcgagccggctcttctgatgcagcatcgagacgaggtcacgctgcatgtccgacagctcgcgctcagcgacgccgatctcgtcgccgcgctggctcggcacgatgattcgcgccgaactctccggattttcgtggaagccgaccaggctcgcggtcagccgccgcatcggccgcacgaacagataatgcagcgccaggtagaccaggcctgcggtcaggccggcgatcaagagcgcaacgaccagcacgttgcgcgagaagcggtacatcgcctgccgcagcggcttctcgtcgatcacgacctcgatgaactgggcctggcccggcgccgggccgaccacacggatggtctggtcgccgtgctccagcatgatctcgaaggcatcgacgatcgccgaccacaccgtcatggcccgcatgtcgacatcatggtcgatcgaggccggcagatcggcgctggcgagcaggcggcgctgttggccgagcttgatggcaaccgcgcgggcgccgatgctggtcaggatctgccgggccagcgaatccggcaccaggcctgacggggcggcatcgagcaccagcgccgcggtattggcggcggccaggcggtcgttgagccggttcatccggaagttcgcgatcgccggcacatagatcaggagcccggcgatcatgaccagcggaatcgtcagcagcaagagcttgcccgacagcccgagccggagggtcggcttgggccgctggttctgcgcggtcgcctgatcgtcggttagagccacaagataaggccttgtttggcttaggggtcggaagatgcggcccggcccccaagccggtcaaattacggatcgctaatgtcggcggttcccggaacgcccccaaggcgctcctcaccgtcaaaaaccccgcgaaaacagttatattcgccccaattgcgacgtttcaaagaaccctctttgcgacgccctgtgacattgacgaaaacagggcgctcccttataagccgcgccaactgtccgcgatggcccggttcttgaccgggggcggctctttggggccgtaacggctcgtttgggcccgccagcatcaccggactccatctcaatacaacggcaaattgcccggtcagcggagaattacccgtgaagcggacttatcaacccagcaaactggtgcgcaagcgccgtcacggcttccgcgcccgtctcgccacggccggcggccgcaaggttctcgctgcgcgccgtgcgcgcggccgcaagcgcctgagcgcctgagcccggacgtctccacccggagatacccattatggatcggctgaggcagcgggcggatttcctcgccgctgccaatggcgtgcgggcgaataccgcagcttttgtgctgcagggccgttgccgcaacgatcagggcccgatccgcgtcggctataccgtcaccaggaagaatggcaccgcgaccgagcgcaaccgcatccgacgccggcttcgcgaagtgatgagacgggtcgatgccgtattcatgcggccgcaccatgattatgtgctagtcggccgccgtgacgcgctgacccgcgactttgcgaccatgattgacgacctgcggtcggcgctgcgccgcctcgaccggcctgcgcccaagatcggtaccaacaagacgggtgccgacagggcgggtaacacgagcgcgcccaatccgaatggaatgacgagaccctaagagatgtccgacaaccgcaacacgatccttgccgtcattctgtccggcctcgtcctgatcgcctggcaatatttctacaacatgccgcagatggagaagcagcgcgaggtgcagcgccaggccgagttgctgaagccgacgccgcaggcgaccccgggcgctgcacctgggacctcgactgcccccccggcgacgccgggcacgcctgcggttgacgctccggtggcaagccgtgaaaccgtgctcgcagccggtccgcgcatcaagatcgagaccccgcgcgtgatcggcagcattgcgctgaagggcgcccggatcgacgatctggcgctggtccatttccgcgagacggtcgaccccaaatcgccggctatcgtgctgctgtcgccgtcgggcaccgccgagccttactatgccgagttcctgtggctaacgcccaccggctcgtcggtgaagacgccggattccgaaaccgtctggcagcaggaggggtcgaacagcctgtcgccgagcaccccggtggtgctgaagtatgagaacggccagggcctgaccttccgccgcaccatctcgatcgacgatcgctacctcttcagcatcaaggatgaggtcaccaatcaaggcagcacgccggtgacgctgtatccgtttgcgctgatctcgcgcggcggcaagccgccggtgtccggctacgcgatcctgcacgaaggcctgatcggctatctcggcgaacagggcctgcaggaatacacttacaagaacatcgacgacagcaagacccccacgggtccggactcgcgtggcgttatcttccagaacgtgaccgacgcctggctcggtatcaccgacaaatactgggcgaccgcgctgctgcccgagaccaatgcgaccttggagaaagcgcgcttcacgaacggcgacaagcgctaccgggtcgactacatgctcggcgcgcagaccattccgatcggcggctccggcgtcgccaacgcgcggctgtttgccggcgcgaaggaggccgcgaccgtcggcctcaacttcccgctggtcggcttcggcggctacaacaagcagctcggcctcaaccatttcgacctcctgatcgactggggccacttctacttcatcaccaagccgatgttcctggcgctcgactggttctatcgcctggtcggcaatttcggcatcgcgatcctcctggtgaccgtgatcgtgaagctcttgttcttcccgctcgccaacaagtcctacgcctcgatggcgaagatgaagtcggtgcagccgcagctgcaggcgctgaaggaacgctatcccgacgaccgcgtgaagcagcagcaggagatgatggagatctacaagaaggagaagatcaacccgatcgccggttgtcttcccgtcgccttgcagatcccggtgttcttctcgctctacaaggtgctgttcatcaccatcgagatgcggcacgcgccgttcttcggctggatcaaggacctctcggcgccggatccgaccaacctgttcacgctgttcggcctgatcccgttcgatccgatcgcgctgctcggaccgcatttcggctcgtacctggtgatgggcatctggccgatcatcatgggcatcacgatgtgggtgcagatgaagctcaatccggcgccgccggatccgacccagaagatcatcttcgactggatgccgctgatcttcaccttcatgctggccggcttcccggcgggtctcgtgatctactgggcctggaacaacacgctctcggtgctgcagcagagcttcatcatgcgcaagaacggcgtgaaggtggagttgttcgacaatctgaaatcgacgttcgccaagaagccgacatagcttcccggccacctcgcttgatcaatgcgtcatgcccggccttgtgccgggcatccacgtattggagggtggcaagacgttgacctgaacggtcggatctgctccggccaagacgaagtggacccttcgatgaccaccgaacccgatgcggagctgatcgaacagggccgaaaactgttcgccggcgactggcgcttcatctgggcctcgccctcgatcgagacgctgccgccgatggccggcctcgaggtcgcctttgccggccgctccaatgtcggcaaatcgagcctgatcaacgcgctgaccggccgcagcgcgctcgcgcgtacctcgcatacgccgggccgcacccaggaactgatcttcttcgagggcccggagaacgcgaacttccgcctggtcgacatgccgggctacggctacgcctcggcgccgaagaccaaggtggcgtcatggacggcgctgatccacaaattcctgctcgggcgcgcgacgctggcgcgggtctacgtgctgatcgacgcgcgccacggcatcaaggacgtcgatctcgacgtgctgaagacgctggacaagtccgcggtcagctatcaggtcgtgctgaccaaggccgaccaggtcaaggtcggcgaactgaagaccacgatcgccgatacgtcagcgacgctggcaaagcatcccgccgcgttccccgaggtgctggtgacctcgtcgcgcaccggcgatggtatgccggagctgcgcgcggcgatggtgcgcctgatcgaggaacggctccgatgagcggcgcgccccgcctcctgatcgtctgtgccgccgtgatgggcgcctgcggcgtcatgctggcagcggccgcggctcatttgcctgatgccacgcggctggcggcagcgtcctcgatgctgctgttccatgcgcccgccgccatcgcgaccattgcggtcgcggaccgtgcaatcgttcacgccaagctcggaatcgcggcggcgtccggcttcgtcatcgcggcgtcattgttcgcgggcgacctggtgctgcgccagtatgccggccacggactgtttccgatggccgcgccggccggcggaacattgctgattctgagctgggtggcgctggcggtttcggccatgtggccgaggcgatgacccatagcccgttggctccaaccggctacgaattgctatccccgctttgcgccctgcccggcaatcagatagaaccgcggccgtccctccgctgacgatgagaccagccccatgaccgaccagcacatcagcccgctcgatcaggcccgcatcctgtccgaggcgctcccgcacatgcaggagtatgacgaggaaaccatcgtcatcaaatatggcggccacgccatgggcgccgaggacaccgccaaggcattcgcgcgcgacatcgtgctgctcgagcagactgcgatcaatccggtggtggtgcatggcggcggaccgcagatcgcgaccatgctgaagcgcctcggcatccagtcggaattcgccgcgggtctgcgcatcaccgacgccgcaaccatcgagatcgtcgagatggtgctggcgggctcggtcaacaagcagatcgtcggctacatcaacgaggccggcggcagggccgtgggcctctccggcaaggacggcaacatggtcaaggcgtcgaagacgacgcgtaccatggtcgatcccgactcccatatcgagaaggcggtcgatctcggcttcgtcggcgatcccgagaaggtcgacctcacgctgctcaaccagctgatcggttacgagctgattcctgtgctggcgccgctggcgacgtcgaaggacggccagacgctgaacatcaacgccgacacctttgccggcgcgatcgcgggcgcgctgaaggccaagcgcctgctgctgctgaccgacgtgcccggcgtgctcgacaagtccaagaagctgattccggacctgtcgatcaaggaagcccgcaagctgatcgccgacggcacgatttccggcggcatgatcccgaaggtcgagacctgcatctacgcgctcgaacagggcgtgcaaggcgtcgtgatcatcgacggcaagacccagcacgcggtgctgctcgagctcttcaccaaccagggcaccggcacgctgatccataagtaatggcagacgcgggacacacggcgaggctccctcgccgctcgccggcggcgcggctcgcaatgtcgctgccggccgcgctggtgtcgttcctgttctcggcggcgccggcgcatgccgacctcaagctctgcaaccgcatgagctatgtgatcgaggccgcgatcggcatcgacgacaaggccgcaaccgcgacacgcggctggttccgcatcgatcccgcgacctgccgggtcgtggtgcagggagcgctgaccgccgaccgcgtgctgctcaatgcccgcgcgctcggcgtctacggcgcctcgccgatcccgcagaacggcaccgacacgctctgcgtcgcgcaggacaatttcgtgatcgccgccgcgcggcaatgccgctccggccagacacaagcgcaattcacccagatcacgccgacgcagaccgacgatggcaatctcgtcgcctacctcgccgaggacagcgaatatgacgacgagcaggcgcggctcgccggcatccagcgcctcttggtgatcgcgggctacgatgcggcgccgatcgacggcgtcgacggaccgaagacgcagagcgcgctgtcggccttcctcaagagccgcgggctcgccagcgacatcgtgcagtcgccgaacttcttcaccaccatggtcgatgccgtgcagaagccgtcggcgtcagggctgacctggtgcaacgatactcagtacaaggtgatggccgcggtcgcgaccgacgacggcaaggcggtgaccagccgcggctggtatcgcgtcgaccccggcaaatgcctgcatcccgacgtgtcgggcacgccgaagcagatctattccttcgccgaagcggtcgatggcgacaaccgcaccatcaagatcaaggacaagccgttgaactggggcggcgcggtgcagctctgcacccgcgacagcaagttcgaggtcaatgagcagggcgactgcgccagccgcggcctcaccgcgctcggcttcaccaccgtcgacatgaccagcggcggcaagacgctgcgctttgcggtgccgtgatgaagacgctggcgctacaaatatcgatgtcgtcccggcgcaggccgggacccataaccaccgcgccacatgttgttcactggcgacaaccccacaacgaaaggcaacgcgcaccacggccccaattgccgccgcggcgtatgggtcccggcctgcgccgggacgacgcgttgaaaaagccatgactaaaactccgcgcaacttcggccatgtcgagacctgggtgttcgacctcgacaacacgctgtacccgcatcacgtcaatctgtggcagcaggtcgatgcgcggatcggcgagtttgtcggcaattggctgaagatctcgcccgaagaagcacggcggctgcagaaggactattacctgcgctacggcaccacgatgcgcggaatgatgaccgagcacggcgtgcaggccgacgactatctcgcctatgtgcacaagatcgaccactcgccgcttgagccgaacccggcgatgggcgccgcgatcgcaaaactgccggggcgcaagctgatcctgaccaacggttcggtcgaccatgtcgacgcggtgctcggccggctcggcatcggccatcatttcgacggcgtgttcgacatcatcgccgccgatctcgagccgaaaccggcgccgcagacctaccagaagttcctcaggctgcacgacgtcgatccggccaaggccgcgatgttcgaggacctcgcgcgcaatctggtggtgccgcatgagctcggcatgaccaccgtgctggtcgtgcccgacggcagccaggaggtggtgcgcgagacctgggagctggaggggcgcgacgccgctcatgtcgaccatgtcacggatgatctcaccgggttcctgcagcggttgagcggaaaacgctgatctctccacgtcgtcccggcgaaggccgggacgacggagcagagcaatcgctcgccaaaaggaccgccgggtttgccttgactccgcagcctcaaattccgaaaaagctctgcaaaattcccgccatatccccgatacgcccaaggatcgcccgatgtcgctgtcagccctcgaaaccaccgtcaacaccgcgttcgatgcccgcgaaggcatttcgacgtcgaccaagggcgaggtccgcgaggccgtcgaccacgcgctggagctgctcgacaagggcgaggcccgcgtcgccgagcgcgaggccagcggcaagtggaaggtcaatcagtggctgaagaaggccgtgctgctctcgttccgcctcaacgacatgggccagatcgcgggcggcccgggcaaggcctcgtggtgggacaaggtgccctcgaagttcgagggctggggcgagaaccgtttccgcgacgccggcttccgcgccgtgccgggcgcgatcgtgcgccgctcggccttcatcgccaggaacgtcgtgctgatgccctccttcgtcaatctcggcgcctatgtcgatgaggccaccatgatcgacacctggtcgacggtcggctcctgcgcccagatcggcaagcgcgtgcacatctccggcggcgtcggcatcggcggcgtgctcgagccgctgcaggccgagcccgtgatcgtcgaggacgattgcttcatcggcgcccgctcggaagtcgccgagggcgtgatcgtgcgcaagggcgcggtgctgtcgatgggcgtgttcctcggcgcctcgaccaagatcgtcgaccgcgagaccggcgagatcttcgtcggcgaggtcccggaatacgccgtcgtggtgcccggcacgctgccggccaagccgctgaagaacggccagccgggacctgccacggcctgcgccgtgatcgtcaagcgcgtcgacgagcgcacccgcgccaagaccagcatcaacgagctgctgcgggactgacaggcggcggccacggcggcgggtcgcgctccacgcagggctgggatcagcagagcgagctcgatatcgtgccgcacaaagctggtccacccgcggtgtgacgtgttaagcgggacacatgattgatgccgtctcgattacccgcgatctggttcgctgcccgtccgtcaccccggccgacgccggcgcgctcggtgtgctcgaaaacctgctgaaggcggccggcttcgacgtccaccgcgtgacgttctccgaacccggcaccgccgatatcgacaacctctatgcccgcatcggctcttcggcgccgcatatcacctttgccggccacaccgacgtggtgccgcccggcgacgaagcggcgtggacgctcggcgcgttctccggcgaggtcaaggacggctatctctacggccgcggcgccgttgacatgaagggcggcatcgcctgcagcgtcgccgcggtgctgcagtatctgaacgaccatggcggcaagccaaaaggatcgatctccttcctgatcaccggcgacgaggaagacgtctcgatcaacggcacggtcaagctgctgaaatggtgcgccgagcgcggcgagaagttcgaccattgcgtgctcggcgagccctcgaatgtcgaggtgctcggcgacatgatcaagatcggccggcgcggctcgcaatccggcacgctggtggtcgacggcgtgcagggccacgtcgcctatccgcaccgcgcctcgaacccggtgcccgacatctccaggctgatcgtggcgctgggcgacgagccgctcgatcacggcagcgcgcaattccaggccagcaacctcgaattcaccaccgtcgacgtcggcaacaccgcgagcaacgtgatccccggccaagcgcgcgccaagttcaacatccgctacaacgacaaccatacgcaggagagcctccggcagctggtcgacgaacggctggcgaaggcctgcggcaaccgcatccgcgcgcatatcgactggcagccgtcgaactcgaacgtgttcgtcacccagcccggaccgttcaccgacctcgcggttgccgcgatcgaggaggccaccggccgcaggccggagctctcgacctcgggcggcacctcggacgcgcgcttcatctcgagctactgcccggtgatcgaattcggcctggtcggccagaccatgcaccagatcgacgagcgcacgccggtggctgatctggagaagctgacgcagatctatcggggcgtgctggagcggtattttgcttgatccggccgctcggctggacacaaacatcgaaaacaaccccatgcacagtagggattggggtcgcgggtaatccgcccataccagatacagtctgcctagtaatccacccgcatcaaatagagcccgtccggcggcgcgacggggccgcaggcggcgcggttgcgggcgacgagtgcggcgaacagatcgtccgcgctccagcggccctcgccgacccagaccaatgatccgaccatcgagcgcacctggctgtgcaggaacgagcgcgccgaggtcacgatgttgatggcagcgccgtcgcgggtgacgtcgagctgatcgagcgtcttctccggcgacttggcctggcactcggtgtcgcggaaggtggtgaaatcatgcttgccgagcaggcgctgcgcggcctcgtgcatcgcctcggcatcgagcgcgcgtggcacgcgccagacccggccgatgtcgagcgcgaggttcgcgcgggtgttggtgatgcgatagagataatgccgcttgatcgcggagaaccgcgcctcgaaatcgtcgggcacgatatcggccgcgtgcacggcaatcggattgggccgcagatgcgcgttcagcccgtcgcggaaacggcccggcggaaaatgtttggcgatgtcgcaatgcgcgacctggccgcgcgcatgcacgccggcgtcggtacgcccggcgccgtggacgcggacgtcctcgccgcagatcgccttgaccgccgcctccagcgcgccctgcacggtcggcgcggtgtcctggatctgccagccggagaacggcgtgccgtcatattcgatggtgagcttgtagcggggcatcagccgagccgcgcgggcggcttcagcggcgtgccgcgcaggaagtccgccgccttcatcggccccttgccggcgcgctgcaattcgagaatccgcaccgcgccatcgccgcaggcgatcgcaagctgatcgtcgagcatatcgcccggttggcccgaacctttcgccagctcgcagcgcaggatcttcagccgcaccggctcgccctcgccgccgagttcgcaccaggcgccggggaacggcgacagcccgtgaatgtgccgcagcaccgcgtgcgccggctgcgtccagtcgatccgcgcctcggccttctcgatcttggcggcataggtgacgccgtcctcgctctgcctggtgagttgcaagccgccgcgctcgaggccgcccatcgcccgcaccatcaggtcggcgccgagcggcgccaacgcatcgtgcaggtctgatgccgtcatgctgtccgtgatcggcagccgctcggccatcgcgacgtcgccggtgtcgagcccgacatccatcttcatcaccatcacgccgctctcggcatcacccgccatgatggcgcgattgatcggcgcggcgccgcgccagcgcggcagcagcgaggcgtgcaggttgaagcagccgagcctgggcgcatcgaggatggcctgcggcaggatcatgccgtaggcgacgacaacggcggcatccgcatcttgggcgcgaaacgcctcgagcgcttcgtccgtccggagcgtcttcggcgtgagtaccggaatgccgaggcggcgcgcctcctgctcgaccggcgtcggctgcagctgcaggccgcgccgcccgcccggtttcggcgcgcgggtgtagacggccacgacctcatggccatgggccaccagctccagcagcgtcggcaccgcgaaatcgggcgtgcccatgaaaatcaggcggagaggcatgcgatcagattcttccggcgtcggagggcgcgcctactccgccgcgcgcttggcggccttctcgaatttcttgaacacgcggtcgcgcttcagcttcgacaggtagtctacgaacagcacgccgttgagatggtcgatctcgtgctggatgcaggtggcgtagagcccctcggcatcctcctcgtgcagcttgccgtcgagatcggtgaagcgcaggcgcacccgcgccgggcgctcgacctcctcgtaatattcggggatcgacaggcagccctcttcgtagaccgacagctcctccgaatgcgagatgatctccggattgatgaacacccgcggctgcggcgaggtctcgccgttctcgtcgcgcttggcgagatccatggtgatcagccgcagcggctgcgcgacctggatcgccgccagcccgatgccgggcgcgtcatacatggtctcgagcatgtcgtcggcgagcttgcggatatccggcgtcaccttctcgatcggtttcgacaccagccgcaactgcttgtccggcaggatgatgatttctcttaaagccatggcggcgatttaagctgcgggcctgatgcggtcaatgcgctgaggagcctgttaaggcagccttaaccacgtttcttcacgctgcattaaccaagaaaatcagggaagcattaaccataagcgttccctcttcgttcgcgtccgaccgcgaatcggctacaaggaccggcatgaacgagattctcctcatgatcggcgaccttccggtccgcgtctccgacgcgttgatcgggcttggcgtgctggcgctgatcctgctgttcgccatcgcaatggtgatcgcgcgcggcagccggcgcggcgcggaactcgcgatggcccaggccattcgcgccgacgagctggaggagcggctcgccgagatgctgcgggcgcagagcgaatcctccggacgggtcgacgccaaggttgatgccttcgcgcaggcgctagccggccggcaggccgagatggcccgcgcggtcaacgagcggctcgactcggtaacccaccgggtcggccagtcgatggaacaatcgacccgcaacacgatggattcgttgcgcgtgctgcacgagcggctcggcatcatcgaccatgcgcacaagaacctcaacgagctcaccacccaggtgacgaccctgcgcgacgtgctcgccaacaagcagtcgcgcggcgcgttcggccaggcgcggatggaggcgatcgtccaggacggcatgccgaagggctcattcgagttccagtacacgctgacatcgggcaagcggccggactgcgtcgtgttcctgcccgaccagcgcccgctttgcatcgacgcgaaatttccgctggaagcgatgaccgcgctgcacgatgcgcgcagcgacgaggagcgcaaattcgccagccagcgattgcgcactgacgtactcaagcacgtcagcgacatcgccgagaaatatctgattccgggcgagacccaggacaccgcgctcatgttcgtgccctcggaatcggtctatgccgaaatccatgacggtttcgacgacgtgatccagaaggcttatcgcgcccgcgtggtgctggtgtcgccctcgctgctgatgctggcgatccaggtgatgcagcagatcctgaaggatgcccgcatccgcgacgccgccgaccagatccgcaacgaggtgatgcaccttggtgatgatctcggccgtctgcgcgatcgcgtgctcaagctgcagacccatttcggccaggtgaacgaggacgtcaggcagatcctgatctccgccgacaagatcgagaagcgcgccggccgtatcgaggaactcgacttcagcaagtccgagaccccgatcgaagtgccgcgcttcgtcaagcccgcggccaccgacctgttccccgccccgcgcaagctgcaggcgggggagtgatcgttgctgatgtcacctcatagccggtgtcatcgcccgacttgattgggcgatccagtatcccagaggccgtagatgggcgcacgcagcttctacgtctacatcctcgccagccacatcggcggcacgctctacatcggcgtgacaaatgacctcattcgtcgcgtcggtgagcacaagatcaaactcatcgaaagcttcaccgaaaaatacgacgtcgtgaaactcgtctatttcgagcagttcgatgatcccgagaacgcgatcaagcgcgagaagcggctgaagaaatggccgcgcgcatggaagattgccctaattgagaaggacaatccggactggattgatctttatccggagattgcgggcggcggcggataggcctctggaatactggatcgcccggtcgagccgggcgatgacagtgtttttgaggcgaacagggatcaactcatcgatgaccgcggatcgcgccgcataattgctgtcatcgcccgacttgatcgggcgatccagtatcccagaggcggaagttgggtgcgcgtacgtctacgtgaagcccggcgatgacagtctttttgtggccgaatctggtaacacctcattcatgacagcccctgaagcgacgtcagacacgcccgcgacgcctgagccaaagcccgccgtcacctcctggcgcgacagcttcgcggtgtacctgcagccgcgggtgctgatcgtgctgctgctcggcttctcctcggggctgccgctggcgctgtcgggctcgacattgcaggtgtggatgaaggaggccggggtcgatctcggcaccatcgggctgctggcgctgatcggcacgccctacacgctgaaattcctctgggcgccgctggtcgatgcgctgcatgtgccgctgttcacgcaagttttcgggcgccgccgcggctggctgctgctctcgcagctggtgctgatggcgacgatcctggtgctggcggtggccgacccggcgcgctcgccatggttcgcggccttcgccgcgctgttggtcgcgaccgcgtcgtcgacgcaggacatcgtggtcgatgccttccgcgtcgaaagcctgcccgagagcgagcaggccgccggcatggcgtcctatgtcgcggcctatcgcgtcggcatgctggtctcgaccgccggcgcgctgttcatcgtcagcggattcgaatccgcagggctcgcgcgcccgtccgcgtggatgtggggctatgtggtgatggccgcgctggtcgtgatcggcatcgtcaccgcgcttgccgcgaccgagcccgcccaatcgaagggcgcggaggccgcaacgcacgcgcagaacgccgccgagcgcgtgctgcacgcggcgctcggcgcgttctccgagttcctcagccgcaaggatgccttcgcagcgctcgccttcgtggtgctgttcaaattcaccgacgcgttctcgggcaccatgaccgcgccgttcgtgatcgacatcggcttttccaaggtcgattacgcggcgatcgtgaagggcgttggtcttgccgcaaccctgatcggcggtttcgccggcggcttcgtggcgcggcgctattcgctcgcaacgagcctctggatcggcggcgtgctgcaggcgatcgccaacctgtcgttctcctggctggcgcatgtcggcgtcgatcaatgggcgctggcgctcgcgatcaccgcggagaatttcaccagcgcgatcggcaccgtgatcttcgtcgcctatctgtcggcgctgtgccgcaatccgctgcacaccgcgacccagtacgcgctgctgaccgcgctcgcggcggtcggccgcacctatctgtcatcgggcgcgggctatgtcgccaaggcggtcggctggcagatgttcttcgtgatctgcgtgctggtcgcgatcccgagcctgatcctgctagcctggctgcagcggcgcgggcattttgatgagctggggccggtgcgggtttagcccaactgccgtcggcccgagcaggcgcccgaactctccccgcgtcgtcctggcgaaagccaggacctataaccaccgcacctggtcgtgacagggattctggccgcagcgtcgcgcaataaccgacagttggggtaatgggtcctggctttcgccaggacgatgatgcggatggttctcgattcgatgagatttacttcgccaccacgctccacttggtgacgatggcttcgctcatctcgccggcgtccttggcgcaggtgacctcgtcgaccttcaccgagatggccttgccggaaaggctcttgagctgcgcggcctgggcatcgttggtcggaatcagctggaaggtttccggcccggtttcgagattgcacaggccgttcggcggcggcaggcggcgcggctcgctggtgatctggtaggtcgcgacgcgcttgccgcgattcttggcgtcgcgcaccttcatgacgccgagttcccccgacagcacgtcgccggcatggatcatcttgccgggcttctgcggcgcatcgctctgctgcgcgatcgcacacggcgcgaccaaggtcgccgtcaaaaatgcaaagccgaaccgtgcgccgaatcggtgtgtcgtcattttcaggtgttccgtatttgattcgtcagagcgtggatgaccatcctcgaatcgtcatccaccctatcattttgtttcagcgcgatcttttcgacttgtgacggatcgcttggcaaaatcggccgggtccggccctggaccggttgcttaaaacagcgtccgctgccgcatggctgcggatagcgtaccttcatcgaggtaatcaagctcgccgccaacaggcacgccatgcgccagccgcgtcacccgcacattggcctccgacaacaggtcggtgatgtaatgcgcggtggtctggccatcgacggtggcattcagcgccagaatgatctcggtcacctcaggcgcgtgggcgcgcgccaccagctggtcgatggtgagatcctgcgggccgacgccgtcgagcggcgacaacgttgcaccgagcacatgatagcggccattggtcgcattggcgcgttccagcgcccagagatcggcgacatcggcgaccacgacgatgatcgagggatcgcggcgcggatcggtgcacaccgtgcaggggttttgtgtatcgatgtttccgcaggtcttgcagacctggatcttgtcgatcgcgacctgcaacgccgcggtcagcggcgtcatcagcgcttcgcgcttcttgatcagatgcagcgccgcgcgccgcgccgaacgcggacccaagcccggcagccgcgccagcaactggatcaggcgttcaatctcggggccggcgacgcttgcggccatttaggtcggaccaaatcccggcggcaggccgagcccaccggtgagcgccatcatcttctcctgcatcgccgcctcggccttgcggcgggcatcgccatgcgccgtgaccaggagatcctcgagcacctcgcgctcctccggcttcatcagcgacggatcgatcttgacgcccttcacttccatcttcgcggtcatgcgcaccgcgaccagaccgccgccggaaatgccctccacctcgacattgccgagttgctcctgcatctcctgcatcttggattgcagctgcgctgcctgcttcatcatgccgagaaaatcagccatgcgtgcgttcctatgatcggatcaatcgtcgtcgctgtcagaagtttcaatcgggtcttcgcctgatacatccgccaccggaacctcggcggcaaggcggcggacctcgatcaccttggtgcccggaaagcgcgccagcacctcctgcacgcgcggatcggcctcggccgcgcgctgatgctcgctgcgcgccaattcgttctgcgaacgcaccgtgggctggccggcctcgttggaaatgatcacggtccagcgccgcccggtccacagttcgagcttgcgcggcagatcggtgatgagcgtgcgctgcgccttcggctcgagtccgatctcgagctggccatcctcgatgcgcaccagccgcacatcggcctccagcgcgctcttggtcatgatatcgcgcttctcgccggcgagcgcgatcagttgcggaaagctcgtgatccgcagcaccggcgcggcgtcggtgaccggtgaggccatctgcggacgcgcggcaagatcggcccgcgggccggcctgcggtgcacgcatcgacgccgacggcatggccgatatcgccgaagccggtgcgccgcgtgacggcgatgatgcggcggaacctgacgtcgcgggcgccgcgccggcgccattctgctcgatcatccggatcacttcatccggtgtcggcaggtcggcgacataggcgatccgcaccagcaccatctcggcagcagccgccggccgcgtcgcggtctgcacctcggcgatgcccttgagcagcatctgccacatccgcgacagcacacgcgtcgacagcttcgcggcgaatccgcgcccccgcacccgctcggtctcgccgaatgcgacgttgtcggcggtccccggcacgaatttcacgcgggtgacgaaattgacgaactcggcgagatcggacagcaccaccaccggatcggcgccgacatcatactgggcgcgaaattcggcgaaggcagcggcgatatcgccgcgcgccagcgaatcgaacaggtcgatcacgcgggtgcggtcggcaaggccgagcatctgccggaccgcgtcggccttcacatggccggcggcatgcgcgatcgcctggtcgaacagcgacaacgaatcgcgcaccgaaccttcggccgcgcgcgcgatgatgccgagcgcctcgggctcgacctcgacgccttccttggtggcgatattgccgagatgcttcatcagcacgtcggcctcgacgcggcgcaggtcgaagcgctggcagcgcgacagcaccgtgatcggaaccttgcggatctcggtggtggcgaacacgaacttggcgtgctccggcggctcctccagcgtcttcaggaaggcgttgaaggccgccgtcgacagcatgtggacttcgtcgatgatgtagaccttgtagcgcgcgctcgccggcgcatagcgcacgctgtcattgatctggcggacatcgtcgacgccggtgtgggacgcagcgtccatctccagcacgtccatgtgccggctttccatgatcgcctggcagtgcacgccgaggtccggcatgtggatggtcggccccttcaccgagccgtcgggcttctcgtagttcagggcgcgggcgaggatgcgggcggtggtggtcttgccgaccccgcggacgccggtgaggatccaggcctgcggaattcgcccggtctcgaacgcgttcgagacggtgcggaccatggcctcctggccgatcaggtcctcgaagctggaggggcggtatttgcgggcgagaacgcggtagggcttgttggccgcctcaggcagcccgccgagatcgaaaccgctctggttcgcaccgtcggacggtcgggaggggtcgccagcgccgttcatgcgtcgatccgcaacttgggtgtctcttcagccggcgtgcggacaggagccgaaatcgagcgccgggcgcggagaccgccattccagcgcgattcgctcggaaaaaacaggtaggagactgacgagcgacccgatccggacctcgttagggctgcttccttccggacctgacccggttggcgagtggctcgtccaccgccaatctcccggtccctatttggggccaaaagcgccggaaagcaagcggcctgacccggctttgtggggctggctgaggctggctttgtggggcttgtctgggaacacggaaaggcattatttgcctcccatgcccgcctccaactggtcgctgcattcgcagctcaaaaaagacaccatcgacgtcggcgacctgccgctgtgcaaggtgctcgtcatcaaggatgcgcattatccctggctgctgctggtgccgcggcgcgacaatgcggtcgagatcatcgacctcgacgaggtcgagcaggcgcagctgatgaccgagatcacccgggtctcgcgggccctgaaagagatcaccaaatgcgacaagctgaatgtcgcggcgctcggcaacctcgtcccgcagcttcacgtccatgtcatcgcgcgccgcaccagcgacgctgcatggccgcgtcccgtctggggcgtgatgccgccgctggcgcatgacgccgaggaagtgcagaatttcatcagcgcgcttcgccgcaagatctggttgggttgaaaattcaatgtccgcatccgattcatttccgctcggccagccggccttcgtcacccatgtgctcgaccgtgccgcgcatctgcgcagcaacgacgagaagctgttcgcgctggagggtcatcgcgaggcgcgcgcctatgtgatctatcgcgactcgctggtggtgaagcaggaagatggcggcgcccgcgcgctgctctcgctggacgaggcgcggagctacggtgccaatcccggcacgatcttcctgggcttgcgcgatgcggcgccgatcttcggcatggggatcgcgccgcaggcggccgagaagctggtcggacgcagcgatgttgcgatcaccgaattgcgcggcatggcgatgcagggcgtggtgccgccggagcagctgtcggcgatcgcgatggcgaaatcgatggtcacctggcaccagcgccacggcttctgtccgaactgcggcacccgcacggcgatgcgggaaggcggctggaagcgcgaatgcccgagctgcaaggccgagcatttcccgcgcaccgatccggtcgtgatcatgctggtgacgtcaggcgacaaggtgctgctcggccgccagaagcagttcatgcccggcatgtattcctgcctcgccggcttcgtcgaggccgccgagaccatcgaggatgcggtacggcgcgagattttcgaggaaagcggcatccgctgcaccgacgtcaactactacatgacgcagccctggccctatccgtcatcgctgatgatcggctgcactgcgcgtgcgaccaacgaggacatcgtggtcgaccgcaccgaactcgaagatgcgcgctggttcgaccatgcggaggcgacgctgatgctcaagcgccagcatcccgacggcctcgccggcccgcatccgttcgcgattgcccatcatttgctcggccgctgggtgcaccaccgaaacccgctcgaccaatagcgggaaccggacatcgttctgccgattagactggacaaagattgtgtaagtcgacggaaccattgcgacggatccctgcatgaattttcaagacggcgccccgaaagtcccgccccgcatcctctgcatcggcctgccggtgcgcgacctgaccttccgcgtcaacgttccggcgcgcggctccaaggagaatgcgacgcatttcgacgagatctgcggcggcaacgcgctgaacgccgcgatcggcatcgtccggctgggcggccgcgcctcgatctgcgggccgatgggcgattcgcgggagacctcgagccgctacatcttcgacaagctggcgcaggaaggcatcgagaccaaccatctcatccacatgcctgatctggtgacgccgatctcggcaatcatgatcgacgacaccggcgagcgcaccatcgtcaccttccgcgatcccgaactctggaaggtcaagctgccgccgaccgacctgctgctggaggattgcgcggcgatcctgaccgagagccgctgcgcgccgttctgcaccgagctgtgcgccgaggccgtcaagcgcggcattcccgtcgtggtcgacgtcgaccgcgcgatgtcgatgcgggaagggctgctgaccgcctcctcgcacctggtgttctccagcgagccgctgcagcagaccgccgacgtcaccgatgacggccaggcgctgcacaagctcgccaagctcacccgctcgttcctcgcgggcacccgcggcccgaagggcacgatctttctcaacgagcagggcgagctcgaggagagcccggccttcccggtccataccgtcgacacgctcggggccggcgacgtcttccacggcgcatttgccctcgccattaccgagaagcaggaattgcggcaggcgctgcgctttgcgtccgcggccgcagcattaaaatgcacccgcttcggcggcgcttatgccgcaccgcaacgtactgaagttgaagcgtttttgggcgaacacgtcgacgcccggccggcctgaccggtcaggaaccgcttgcgcgagaagatttttctctatatgagggagtttgatccttcatatggaactttcttctatgtccgaactcgctattcagcttcatgacaataaccgccgcctcgacgccatcgatcgcaagatcctgacggtgctccaagaggatgcctcgctctcggtcgccgagatcggcgaccgggtcgggctgtcgtcgacgccgtgctggaagcgcatccagcggctcgaggccgacggcgtgatcctgcgccgcgtggcgctggtcgaccagaacaagatcgggctcgggatctcggtgttcgtctcggtcgagagcgccgaccactccgaagcctggctgcgcaaattcgccgacgccgtcagcgccatgcccgaggtgatggagttctaccggatggccggcgacgtcgactacatgctgcgcgtcgtggtcgccgacatgcaggcctatgacgtgttctacaagaagctgatctcggccgtgccgctgaagaacgtcacctcgcgcttcgcgatggagaagatcaagtcggtgacggcgctgccggtgcccgcggcgtaagcggcgccctcaactgtcatcgcccgcgcaggcgggcgatccagtacgccgcgacgtctcggctcaatcattgccgtctctggaatactggatcacccgcctgcgcctgcgcgggtgatgacaccgtgcctgcggcaacaaaatcaaatcttctgattgtacgcgccgacctcgggatgcgtgcgcagcaccgaatccatcgcctcgaacatgtcgcgcatacgctgctcgctgaccgggctttccaccacgaccacgagctccggcttgttcgaggatgcccgcaccaggccccagctgccgtcggagaccgtgacgcggactccgttgacggtgacgagatcgcggatcgcctgccccgcgaccagcgcgccgttctgctgcagcgcctcgaagtgcttcaccacggcatcgaccacgccatacttcgcctcgtcggcgcaatgcggcgacatcgtcggcgatgaccaggtcttcggcagcgcgtccttcagatcggccatcgacttgccgggggcgcgatcgagcatctcgcagatcgcgatcgccgacaccaggccgtcgtcatagccgcggccgaacggcttgttgaagaagaagtgaccggacttctcgaagccggcgagcgcgccgagctcgttggtgcggcgcttcatgtaggaatgcccggtcttccagtagaccgtgttggcgccctgcctcgagagcaccggatcggtgacgaacagcccggtcgacttcacgtcgacgacgaactgtgcgttggcgttgatcgccgacatgtcgcgcgccagcatgacgccgaccttgtcggcgaagatctcctcgccggtgttgtcgaccacgccgcagcggtcgccgtcgccgtcgaagccgagcccgacatcggccttgtgcagaagcaccgcatcgcggatcgcatgcagcatctccatgtcttccggattcggattgtatttcgggaaggtgtgatcgagctcggtgtcgagcggaatcacctcgcagccgatcacctccagcacctgcggcgcgaatgcgcccgcggtgccgttgccgcaggcggcgacgaccttcagcttgcgcttcagcttcggccggctggtgaggtcggcgatgtagcgcgccggatagttctcgtgaaactggtaggagccgccggccttgttgttgaactcagcattgagcacgatctgcttcagccgcgtcatctcgtcggggccgaaggtgagcggacggttggcacccatcttgacgccggtccagccattgtcgttgtgcgaagcggtgaccatcgcgacgcagggcacgtcgagatcgaactgcgcgaaatacgccatcggcgtcaccgccagcccgatgtcgtgcaccttgcagccggccgccatcaggcccgagatcaatgcgtatttgatcgaggcggaatagccgcggaaatcgtgaccggtgacgatctcctggctgacgccgagctccgcaatcagcgcgccgagccccatgcccagcgcctgcacgcccatcaaattgatctccttgttgaacagccagcgcgcgtcgtattcgcgaaacccggtcggcttcaccatcggctcggattcaaaggcataggtgttcgggaccagcgcggatttcggcttcggaaacatcagagatagcctcgtggaaatgcggaggaacaatgctgctggctttagcgaatgcgtcgccgcagcgaaaggcaggattgacggcttgtggcgaataattacggcagatttggcgtcggcgaaatacctgcacgccggcgcaatccgccgcgctattgcgccctgcgagctgctctgcgcatcgaacaattgacacgtcgggcaactcaccgatacattttcatcatcgcaacaattaagcccgcacccgaagctgtccgcaatatctgtaggtgatgatc

SEQ ID NO: 32 - DNA, 104682 bp, Bradyrhizobium enterica
agcggatggacgtaactctcatagagcacgccgagcacgatgtagatcgtgatgatcgcggccaggatcaggaacggctggttgttgagagaatcctggaacgccttggcggagccctggaacgtaccccggatcgtggccgggacgccgatccggttcatcgtcgcctcgatgctggcgaccgcggtgctcagcgagacgttcggcggcaggttgaacgagatggtgttggcgaccagcaggccctggtgattgactgccagcggcgtggcgccctgcttgaaggcagcgaccgccgacagcgggatcatggtctcgctgctggtcgagaccgccgatccggtcgaggccgcgcccttcccggtcgagccgatcgagttggtggcctggttgcgcgcggcctgcgcgttggccgaactggccgcgcccgagtttcccggcgccacgacggtgccggccactgcgttggtcgattgcgatccgccgaccgatgcgcccgaggtgctgatatagacgtccttcagcgtttccggattctgccagtagcgcggcgccacctccatgacgacgtggtactggttgcgcgcgacatagatcgtcgacacctggcgctggccgaaggcgtcgtagagggtgttgtcgatctggctgaccgtgatgccgagccgcgctgcggcgtcgcggtcgatcacgaggtcggactcgaggcccttgttctgctggtcgctgttgacgtcggcaaggttcggatcgcgctgcatggccgccgcgatcttcggcgtccagtcattgagctcctccagcgtcgagccctgcaacgtgtactgatactgcgcgttggactgccggccgccgacacggatatcctgcaccgcttgcaggaacagggtcgcaccgggcaccgccgacatctggcggcgcagccgcgcgatcaccccgtcggcaccgagcttgcgctggtcgagcggccgcagcgacacgaacacgaacccggaattggtctgcccgccgccggtgaagccgaccacggtctcgaccgccgggtcgcgcttgatgatgtcgacgaactgcgcgagcttctgctgcatcagctggaacgacacgctctggtcggcctggatcgagccgaccagccgcccggtgtcctgctgcggaaagaagcccttcgggatcacgacgtacagatagcccgtcagtccgatcgtgacgaagaagatcagcacgacgctcagcggatgttcgagcgcgccggtcagcgtccgccggtagaagcccagcatcgcatcgaagaagcgctcgctgagctgatagagcctgccgtgaccaccggtatccggccgcagcagcacggcgcacatcatcggcgtcgtcgccagcgagaccgcgagcgagatcaggatcgagatcgaaatggtcacggcgaattcgcggaacaggcggccgatgatgcccgacatcatcaggatcgggatgaacaccgcgatcagcgagatgctcatcgacagcacggtgaagccgacctcgttggcgcccttcagcgccgcctcgagcgggctcatgccgtcctcgatgtagcgggtgacgttctccagcaccacgatggcgtcgtcgaccacgaacccggtcgcaaccgtcagcgccatcagtgacagattgtcgaggctgtaaccgaacaggtacatcgcaccgaaggtggcgaccagcgacaccgagaccgcgaccaccgggatgaaggtggcgcgtgcgctgcgcaggaacgcgaacaccacgaacaccaccagcagcaccgcgaggatcagggtgcgctcgacatccctgagcgaggtgcggatcgtggtcgagcggtccaccgcaaggccgatatcgatcgccggcgacaccgaggcctgcagctgcggcatcaatgccttcacgaggtcgacggtcgagatgatgttggcattgggctggcgatagaggatgaccagcacggccggtttgccatcggcaagcccggcgttgcgcaggttctcgacgccgtcggccacctcaccgacgtcggagagatggaccggcgcgccgttgcggtaggccacgatcaacgaccggtagtcgtcggccttgttggcctggtcgttggcgtagacctggtagcgctggtcgccgacgtcgatgccgcccttggggctgtgggcgttggcgttggacagcgccgcgcgcacgtcctccaggccgatgccgtatttgtagagcgcctgcgggatcagatcgacgcggacggcgggcagcgagctgccgcccaccacgacctggccgatgccctcgacctgcgacagcttctgcgacagcaccgtggacgccgcatcgtaaagatcgccgcgggtcagcgtatccgacgtcagcgtcaggatcaggatcggcgcgtcggccggattgaccttgcggtaggtcggattgctgcgcaggctggtcggcagatcggcccgcgccgcgttgatcgcggcctgcacgtcgcgcgccgcgccgtcaatgtcacggttgaggttgaactgcagcgtgatccgtgcctgcccgacggagctcgacgacgtcatctcgctgacgtcggcgatctgaccgagatgccgctccagcgggcttgccaccgtggtggcgacgtcctccggactggcgccgggcagcgtcgcttgcaccgagatggtcgggaaatcgaccgccggcagcggcgacaccggcagcttgaagaacgcgacgatgccggctgccgcaagtccgaaagtcaacagcgtggttgcgaccggccggcggatgaatggcgtcgacggacccatgactcaacgcgacccgctcgcctcgccgacctcgtctgcccgcccggcaaaccgcagcgccaggcgatcgaaccacagatagattaccggcgtcgtgaacagcgtcagcagctggctcaccaagaggccgccgacgatcgagatgccgagcggatgccgcagctccgagccagcgccgctgccgatcatcagcggcagcgcgccgagcacagccgccatcgtcgtcatgatgatcggccggaaccggagcaggcaggcctggtagatcgcctcgcgcggcggcttgcccgcgttgcgctcggcatcgagcgcgaagtcgatcatcatgatcgcgttcttcttcacgatgccgatcaggaggatgatgccgatgatcgcgatgatggtgagatcctgcccggccatcatcagcgccagcagcgcgccgatgccggccgagggcagcgtcgagaggatggtgagcggatggatgaagctctcatatagcacgccgagcacgatatagaccgtgatgatcgcggccaggatcaggaacagctggttggagagcgaggactggaacgccagcgccgcaccctggaagctcgtgaccatgccgagcggctggttgatgtcggcctgggcctgcttgatcgcggtcactgcgccgccgagcgaggcgccaggggcaaggttgaacgacacggtcgccgacgggaactggccgagatgcgagacctgcagcggcgcggtctccacccgcatcttggccatcaccgacagcggcaccggcgtcgagccaaccgatgacggcagatagatcgatgacagcgaatccagcgagttccgcaacgacggatcggcttcgaggatgacgcggtactggttggaattggtgaagaccgtggagacgatgcgctggccgtaggaatcgtaaagcgcattgtcgatcgttgccggcgtgatgccgaaccgcgcggcttggtcgcggtcgatgtcgacgaacaccgacagcccttgggcagagatatcgctggtgacgtcgctgagctcgggcaattcgcggagcttgtcgaccagcttcggcgtccattccgcgagttcgttcggatcggcgtcctgcaggatgaactggtattgcgtccggctcaccgtgccttcgatcgtgaggtcctgcaccggctgcatgtagagcgtgatgccggtcagatcagccgtgctggccttgatccggtccatcaccgtcgcaacgccggccttgcgctgctcatgcggcttcagattgatcaggatgcggccgctgttcagcgtggtgttggtgccgtcgacgccgatgaacgacgacaggctctcgacatcgggatccctgaggatcgcgctggcgagccgttgctgccgctcggccatcgccgcataggacaccgattgcggcgcctcggagatcgcctggatcacgccggtgtcctgcaccggaaagaagcccttggggatgacgacgtagagcagcgccgtcaggccgaaggtggcgagcgcgatcagcagcacgaaggtctggcgatcgagcacccagttgagcatccgcgcgtagatcgcgatgacatggtcaaaaccttcccggctgagccgctggaaggtgttttcgcgcgacatggcctccggcttcagcagcttggcgcaggccatcgggaccagcgtcagcgacaccacggcggagatcaggatcgtgaccgacagcgtgatggcgaattcgcggaacaggcggccgacgacgtcgcccatgaacagcagcgggatcagcaccgcgatcagcgacaccgtcagcgagatgatggtgaagccgatctgctcggagccgcggagcgccgcctcgagtggagactcgccctcttcgatgtatcgcgagatgttttcgatcacgacgatggcgtcgtcgaccacgaagccggtggcgatggtcagcgccatcagcgacaaattgttcaggctgaagccgaacagatacatcgccccaagcgtgccgaccagcgacagcggcaccgacaggctcgggatcagcgtggcgcgggtcgagcgcaggaacacgaagatgacaagcacgaccaggattaccgcgagcgacagctcgtattcgacgtcgcggaccgaggcgcggatcgtgacggtccggtcggtcaggatgttcaggtcgatcgccgccggcagcgtggcctgcaattgcggcagcaggtccttgatgccctgcaccaccgagatcacgttggcgccgggctggcgctggatattgaggatgattgccggcgtctcgttcatccaggcgccgagcttgtcgttctgcgcgccgtcgacgacgttgccgacgtcgctgaggcggaccggcgaaccgtttttgtaggcgacgatcagcgagcggtagtcgctggcattgcggatctggtcgttggcattgatggtgtatgcgcgcatcgcgccgtcgaaattgcccttcggcgtgttgacgttggcgttgcccagcgtggtgcggaggtcgtcgatgttgaggccataggccgcgagcttgcggatgtcggcctggatgcgtaccgcgggccgctggccgccgctgatgctgacgaggccgacgccgggcagctgcgagatcttctgagccagccttgtgtcgacgaaatcctgcacctgcgtcagcggcatcgtcttcgaggtcaggccgagggtgaggatcggcgcgtcagccggattgaccttggcgtagatcggcggtgccggcaggtccgacggcaagagattgcccgcggcattgatcgcggcctgcacctcctgctcggcgacgtcgagcgaaatcgacaggccgaattgcagcgtgatgaccgacgagccggccgaactcaccgaactcatctgattcagattcggcatctggccgaactgcacctcgagcggcgccgtcaccgacgacgtcatcacgtcggggctggcgccgggatagaaggtctgcacctggatggtcggatagtcgacctccggcagtgccgcgaccggcaggaatctgaacgccagcatgcccgacagcatgatggcgatcatcatcagggtcgtcgccaccggccgcaggatgaatggccgcgacgggttcatttggtctgcccgtcctcggaccgcttgtgctggccgcctcccgccttgtcgggatcggcgccggccttgctatctcccttgctatctcccttggcggctccattggccgcgccactcgccgtccccttggccgtaccggccgggtttgcggcgtcagtggcggagcgcacgacgaccttggcgccctcgcgcagcttgtcggcgccgtcgatcacgatgcgatcgccgggcacgaggcccgacagcacctcgacacggtcgccgtcggtgacgccgagcttgacggggcgcaccgagacggtgctgtcggcgttgacgagatagacgaaggtgccgggaacgccgcgctggatgccggcggtcgacatcgtcgtggcatccttgtgggtgtcgagcagcaggcggatgttgacgaactggttcgggtacagcgtgcgcccctcgttctcgaactgggcgcgcagcttgatcgtgccggtggtcgggtcgatctggctgtcgaaggtctgcagcgatccgtcggcgagcttgttggcgccgctgcgatcataggccgccgtcggcatcacggcgccctccttcagtcgcttcttgacggcctgcagattgtcctccggcagcgtgaacagcacactgatcggctcgagctgcgtgatcacgacgaggccgttggtgtcgcccggcgtcacatagttgccgaggtcgacctggcgcagcccgacccgcccgttgatcggcgacacgatatgacaatacgcgagattcacctcggccgacttcaccgcggcgcggtcggcctccaccgtgccctgatactgcgcgaccagcgcgacctgggtatcgagcgtctgatgcggcacggcgttctgggtggcgaggttctggtagcgggtaagatcgacctgggcgcccttcagctgcgcttcgtcgcgcgcaagcgtgcccttggcctgcgccagcgtcgcctcataggtccgcgaatcgatctcggcgatcgggtcgcccttcttgacctcgtcgccctccttgaaactgatcttcatcaggtagccgctgatctggctcctgatcgtcacggtggcgagggatgtcacggtcccgagggcgttgaggctgacgccgatatcgcccttgccgatggtctccggcacgatcgacattggcccggcattgcgcccgccaccggcctgaggcggagccgcctgctgccgcgtccaccagacgatgccggcaagcaccgccagcaccaaacatccggtcagaaaccccggccaacgcgacgctcgcctgacaggtccaggggcgacgatcgacgggtctttgatatgctggtccataaacttgcccacgaagaaacacgaacgagctcgcgcggctctatgtgtcccctgaaatccgcgcgcgccacattcgaggaagcattttgaacgcttccctctgacaaagcgcgttaagaatcggaaaggatggcccctccttcccggtcgagcgctgtttcacgctggattgtggctattttacccgatcgattgtaaccagggcaacacgatcagcaacaatccggcaaagtagatcaggccgaagatcagcccgaacttccagaagtcgcctttgccgatatagccgctgccgtaatacatcggcgccggtcccgtggcatagggcgagatcacgcccatcagcccgagcgaatagacgcacagcagcgtcagggtctgcaccgacaggccgggaatgctggagccgaccgccagcaccaccggcagcacggctgcggcatgcgaggtgatgctcgagaagaaatagtggatccagaagaagaacgtgacgagcaggatcatgccgaccagcggcgaggtgccggcgagcggcttggcatagccttcggcgacccatttgatgaagccgatctcgttcagccccgacgacagcgtgagcagcgaggtgaaatagaaaaatacctcccaggcgcccttctccgcgacgatgtcctcgaacgcgatcacgcctgacagcagcatcagcgaaatcacgacgaacaccaccgtggtcgcgttgatgaaattcgaaccgagcagcggcacgcttatattgggattggagccgcagatccacaggaacatcgcgagcaccaccagcaccgccatgatccattcgtgccgcgacggcggccccatcttggcgagctcgccctcgctccaggtcacgatctccgggctctctttgatctcgggccggcagaccacgtagctgagcagcggcaccagcagcagcaacaggatgccgagcggcgcgaagccgatgaaccattgcgaccagccgacctcgatgttgacgagcttcttggcgatcgagagcgcggcggcattcggcgccagcgcggtcaaaaacagcgagctggtcacggccgtggtcgcgaacgcggtccacatcacgaaggtgccgatcttgcccgcggtcggacccggctcggagccgtagatgcgcgggatgttgctgacgatcggatagatcgtgccgcccgagcgcgcggtgttggacggcgttgccggcgccagcaccagatcggagaacgccaccgcatagccgagcccgatggtgcggcggccgagcccgcgcaccaagagcagcgccagccgtcggccgagcccgctcttgcggtagccgatcgagaacacgaaggcgccgacgatcagccacaccgtgctctcggaaaagccgctcagcatccagcgcagcgacttgttcggatcgggctcgacatagccgccgacgccggcaacggtcaggccgatcaggcccaccgcgccgaccggcatcgattcgaggatcagcccggtgatgacggcggcgaacaccgcgaaatagtgccactgattggcgttcagccctgatggcaccgggaccagatagatcaccagccagaccagcaatggcgcaaacgtccgccatgacgatttcatgcagcgtccccctcacccgtgtcgattgtcggcgcgcaagccgccaagtccccgctatgtcccggacggcagcgccctcttttcgtggcaatgtagcatggccgcgcagtcggtctcgggaaactgcggcggaatggcgcggcttgtggaggaaccggcgcgcttcgtcaacacgtcgcgaccccgtagcagcccccatcgcaagaccgcccgcgctttgctatcttcgcggcatgacgtcacgcgactccgcctcctccgaaatcacgcccgaggtgctgctgcgcgcctatgcctgcggaatcttcccgatggcggagagcgccgacgatccgaccctgttctgggtcgagccggaactgcgcggcgtgattccgttcgacggctttcgcgtcgcctcccgcctggcgcgcacggtgcgctccgatgccttcaccgtcaccgtcgataccgcgttcaaggcggtgatcgccggctgcgcggcgccgcagcccggccgcgacgacacctggatcaacaagcgcatccgggatctctatctcgggctgttcacgtcaggccattgccacagcgtcgaggtctggcaggacgacaatctggtcggcgggctctatggcgtcagcctcggccgcgccttcttcggcgagagcatgtttcacaccgtgcgcgacgcatcgaaggtcgcgctggtgcatctggtggcccgattgatcgccggcgggttcgaactgctcgacacccaatatgtcaccgagcatctcaaaacattcggcgcggtcgagatctcgcgccgccgctatcgcgcgctgctcgacaaggcgatcgctggcgcgccggcggaattcctcaagctcgacgccacgcaaccggtcaagggtgccgacgcgctggcgatcatcgccgcgcgcaattgaattcagacgatgacgtagcgcggatgcagcgaagcgcaatccgggaccgcacgatccgctcagaaagaacccggatttcgctgacgctccatccgggctacgtgatgccagttagtttccgaacaagccgccgaacagcccgcccggccgctgctgctggggcggcggaggtggcggctgctgctgatattgcggcagcggctgcggcggcggacgcggcgcggcctgcttcggcggcgcgcgcttctgggccggcggtggcggcggggtcggcgccttcggcggatccggcgcggcggtcacgatggtctggtccggccctttgcagtcggtcagccagatgtcgtagatcggatgctcgacgccatgcaggccggggctcgccgcgaacatccagccggagaagatacgcttcacctcgccctgcaaggtgatctcgtcgacctcgacaaaggcgtcggtgttggcggcttcggtcgatggacgggtgtagcaggcatcggtcttcacccgcagcgcgccgaactgcacggtctcgccgatatcctcgtcgaaattgatgatgcgtccggtgatcttgtcgaggccggagaaactcgccttcttgttggtgatcttggtcgaaggcggctcctgcaccacctcgtcacccggctgcaacgcggccggcgtctgcggcgcggtgccctgtggcgcgccctgaggcgcagcttgcggcgcgcccttgggacgctgccccggcggcagcgggttggcaccgggcggcgtgttggcgacggcagggccgccgggctgcggcggctgcacggcgacgccgggcggagccaccgtggaaccgggcggcggcgccaagggctgcgactgcacgctgccgggcggcggcaccgcctgccccggcggcaacgcccgcggctgtgtcggcagcaggcggccgcgcggcaattccggcacttcctcgtcgtcgtcgctgggcggcgccacctggccacgcgggatcgagccgggcggacgcggtgcgggatcggagaaaatcgttccaatctgcgcacgcgcgggcggcgcaagcgagatggttgaggcggcaaccaaggccgcaaagccagtcagggcaacggttcgaagcatctcgcgcggctttagagggcgaatcgggctcgcgacagtctaccttgatatcggccgctcgcagggcaccggttaacacgccgaatacggcggggaaagggcgccaggacccctccggtgcccttccccagccctctggtctctcccgggaacacgtgtgatagtcctcacgctgaagccgcgcgaccccgcgtgaaaaccaggaaaatccggatcgaaccggaccagccagaggaaacccaacatgcccgatcgcatcaggctcgacggccgggtcgccgtcgtcaccggggctgccggcgtcatcggaaccgccacgctccacctgctcgccgaacgcggcgcacggattgtcgcagtcgaccgcaaaggcgccgatctcgcggccgccatcaagaatctccccgcctcggccgaggcctacgcgatcgaagccgacgtcaccgatgaggacgaggtcaaggactatgtccgcgccgccgtggaccgcttcggcaccgtcgacgcgttctataacaacgccggcatcgagggcgacgtcaggccgatccctgagtattcgctggagagcttccgccgcgtgctcgatgtcaatgtcgtcggcgtcttcctcggcatgaagcacgtgctgcccgtcatgctgaagcagaacaagggcagcatcatcaacaccgcctcgatcgcgggtcttatgggatcgccgatgatcgcggtctacagcgcgagcaagcatgcggtgatcgggctgaccaagagcgcggcgtgggaatgcaccggcaccggcgtgcgcgtcaattgcgtctgccccggcatgatcgagagccgcatgctgagcaccatcctgcagggccgctccggcggcaacgcgccgccgccggtcgagaagatcgtcgaccgcatcccggcgcgccggctcgggcttgccagcgaggtcgcctccatcgtcgcgttccttgcctccgacgaggcgagctacgtctccggctccgcctacaccgtcgacggcggccgcaccgccgcctgacatttcagttcaacatcagaacaaggttttgtcgtccatgcccgtcattctcgatcccgatgccgccgccgtctacaaggcgttccaggaggcaggccgtcccgcctacgagacactgaccgcgccggaagcacgcgaatattatcgcgccgcccgaatcgtctccaatcccgagccgcccgcgcttgaatcgaccaaggcgctggcgatcccggcgccgcacggcacgatcccggcccgcatctacaccccgaagacgctgcgcaagatcaacgggctcgcgccctgcctggtgttcttccacggcggcggctgggtgatcggcgatcttgatacccatgaggtggtctgccagaagctcgcccatgaaggcgagctgatcgtgatctcggtcgactatcgcctcgcgcccgaacaccgcttccctgccgcggtggacgacgccgtcaccgcaacgagatgggtcgccgccaacgccggagatctcggcatcgacgccgcgcgcctgaccgtcggcggcgacagcgccggcggcaatcttgcggcggtggttgcgctgaccgcccgcgacggcggaccgaagctcgcggcccagctcttggtctatcccgcgaccgatttctcgcggcagcatccctcgcaccgcgagcccgagaccagcatcctgctgacgcattcggtgatcggctggttcggcaaccattatctcggcgatgccgacagcagcgactggcgcgcctcgcccgcgcgcgcgaaagactttgccggcctgcccccggcctatgtgctgaccgccggcgccgatccgttgcgcgacgaaggcgacgagtatgcgaaattcctcaaggacgccggcgtgccggtgacctaccggcatttctccggccagttccacggcttcttcaccatgggcaagctgctcaatcaggccaatgtcgcggtgaccgagatcagcgcgtggctgaagtcgctgggctgacgttccttctcgatcgaaatcgccaaccggagctcaacaagaatggcgcgtttcggttcaaggtgagccgggcgaagcgccagtgggttccgattgaagaccgccggacctgcgctattttgacgcctggacgcggctcgccaccaggccgttgtcgggcccgaacagggttgccttgctcctgttgccgtgcgaaaccgcgcacgggtgttgtctgcatggagcagtgacaggttgagcgatggtcgggccaccacgcgggaagcgtatgcccgatgaatgaacgatcgcccaccgaagacctgccctcgccccaactgcttgccgagcgagctttcgccacactccagcgcttcctgcacgtcgaggccgtcagcggctgcgtgctgttgatggctgccgtggcggcgttggtctgggccaattccccccttgccgacagctaccacgccctttggcatcaaccggtctcgatccaggtcggcccgtttgtcttctccaggccgctgcacttctggatcaacgacgccctgatgacggtcttctttctcgtcgtcggcatggagatccggcgagaagcccatgaaggggcgctgagcaggttcgaccaagcagctttgcccgtgattgccgcggccggcggcgtcatcgcacccgccttgatctatctgagcttgaataccgatgcggtgcgcggccagggctgggccgtccctacggcgactgacatcgcgtttgccgtcggcgtgctggtgctgctcggacggtcgatcccggtcaatctgcgcgtgttcctgctggcgctggcgatcgtggacgacgtcatcgcggtgctgatcatcgccttcttctattccggcggcctcggattggccgggctgcttgtcgccggcttcggcatcctgatggtgctggcgatgcagcggatcgggatcggctcggcgctcggctatgtcgtgcccggcgcgatcgtctgggctgggctgttgatgagcggagcacatccgaccctcgccggcatcgcgctcggcctgatgaccccggtgcgctcgatgccgctccgggaacatccgttgcagatgctggcgcgcatcgccaaggagctgcaaggcagcgacgcgctgcgaagcaaggatacgcaccacctggcgtcaccgcggcgacagcttcgcctcgcggaacgcgagatgctgccgcccgtggtgcgcgtgcagactgcactgcatccctgggtctcctacggcatcatgccgctgttcgcattggccaacgccggtgtcagcctgactggaattgatctctcggccggcgctcaatccgtcatgctgggtgtcggctttgcactcgtcgtgggaaagcccgtcggcgtgattggtacgacctggcttgcggtccggctcggctggtgtcggctggcccccagcgtttcctggggcggcgtctgcctggtcggcctgctggccggcatcggcttcaccatgtccatctttatcgcgatgctggcgttcgcggacgagacgctgttgaacgcagcaaaattgggagtgctgcttggttcgctcgtctccgcgatgctcggactcagctggggcgcgatctatgttcggcgccgccgcaacatgttgcgcgcgggtcgcggagaccgagcggcacgtacgccgcggacaccgcatcgcgaccgctcgcccgccggctgacgcgtatcgcaggcattgcgtcgttcagcccgcgcgtgacgcacggcgcagcgattgcggcggctggccgaaggcgcggatgaaggcgcggcgcatccgctcgggatcgcggaagccggtgatctcggcgacgcgctcgatagcctcgcccgacgactgcacgcgctgccgcgcgacttctattctgagccgctccaccgccttcgacggcgtggtgccggtctcggcgatgaaggcgcgggtgaaatgccgcgagctcatcccggccttgtcggcgaggtcctcgacggtcagcggcgcgtcgagattttcccgcgcccaggccagcagcggcccgaaccttccgttcggcgtcttcaattccaagagcgaggagaattgcgactggccgccgctgcgccggtgatacagcacgagctgacgcgcggtgttctgcgcgacctcgtcgccatagtcctcggtgatcatggcgagcgcgagatcgatgccggcggtgataccggccgagctccagatattgccgtcgcggacgaagatctggtccggctcgagcttaatcttcggataggtcttcacgaaatgcggcgtgcgctgccaatgcgtggtggcgcggcggccgtcgagcaggcccgcctcggccagcacataggcgcctgagcagacgctggcgacgcggacgccgcggctcgccatccgccgcacgaacgacagcgtggtcggacagctcgccggcgtacgcacgccgttgccgcccgcgatgatcaacgtcgtgatcgctgccgacggcttgaggccgcgtgccagcatctcgacacccgacgacgagcgcacgggcccggccttcacggcaatcgtcttgatggcgggaggattgttggcgaagcgcgccgcgatctcgaacgccgcgatcgggccggccgcgtcgagcagctggaagtcgggaaagatcaggatgccgatcatcgccaaatcctcggagccggggccacgtttcaaatgatcttgagcgtgtggtagcgcatgtccgaaattgagggaattacgccattttggacgcgaggccatcatgacattctggttccgtcaagcgcaattttggagacctccgatgtccgcccccctgcagattggattgctcgtcttccccaaggtgacccagctcgacctgaccggtccgctgcaggtgttctcctcggtccccggcgcgaaggtgcatctgatctggaaacggatcgaaccggttccgaccgattccgtgatggtcctgacgccgaccacgacctttgccgattgtccgcagctcgacgtgatctgcgtgcccggcggggccggcaccgacgacatggtcggcgacgacgagatgctcggcttcctgcgccagcaggccgcgggtgcgaaatacgtcacgtccgtctgcacgggatcgctggtgctcggcgccgccggcctgctcaagggttaccgcgccaccacgcattggagtgcgatcgattttcttgcaggcttcggcgccattccgaccaggacgcgggtctgcgtcgaccgcaaccgcttcaccggcggcggcgtcaccgccggcatcgatttcgcgctgacgctggtgtccgaactcgtcgatcgcaagaccgcggaagcgatccagctccggctcgaatacaatccggcgccgccgttcaatgccggctcgcccgacaccgcaccggccgagatcctcgccctgatgaaggagcggatgggaccggcacatgcgcgccgcggcgaattgatgggccgcgcggcggcgcggctgtcgtgacctgatcgccacaaagaaaaaggccgcccggtttcccgagcggcccttcctgtctcacggcagcctcacatttgcgggcgatttcaggacatctgtaccgggggcctatctcccggccgcgtccaactcggaggccgctgctcatcgggacagtcgcgatctggagcccgatccgacgcgatggtttcccatctccgtaagatggcttcattgagccgcgaagctgcgcacggcgcaagtggacggcatcggcgacggccgatctgtccccgctgtcaccgttgtccacagccgcgcacctgcgctgcaacgtccacgcgtgcgctgcacgcgcgcaattgcgcacgtgcacggggtcagcaatgcgtgaaggtcagcttcccggggtccaggcgtggtagtcgccagttgccttcgggcggcggccgcttgccagcgtcgagccggacggacggtaagcctgggcagtgccggtcaggttcggcagatgcggcttttcccactcccgggcgacgtacttctcgtcggtcgggggcacgtcgaccgtgtggtgcagccagccgtgccagccagccgggatccgggacgcctcggcatagccgttatagaccacccagcggcgctcgaaatgcagcgtcgggtcgatctcgccgcccttggtgcggtagtatcggttgccctgctcgtcctcgccgaccagctcgccgtatcgcgaggtccacaattgcgtgccaaaggtctggccattccaccaggtgaagaatttcagcaggaattgtttcatgcgcggccggtcatcggttcgaggcagtccggctctgatgccacctgaatccgcaaatgtccagccaccgccaaggtagcccggcactcccggaatcgcccccaatgatgggccggtttggcgaccaaatgacgcggtcacggagagttttgttcacctgccgtacatgcgcctccggtcaaacaaagatgacggataatcaatgtcgcgcgctggaacgtccaaccgcagaaatggttagacattgtccgttttgatggagtccaacatgatcaatatgaaggttctgagcactgccgcggcgctggcgcttgcgctgccgctggccgtggcgccgaccgtttcgttcgcccagtccgccgcgcagatgggcgcgatgggcggtggcggtggagcccgtggtggtggcggcggcggtggcggtggccacatcggcggcggaggtggcggtggctggcgcggcggcggcggtggttggcacggtggctaccatcgtggcggcggcttctggccgggcgcggtggcgggtgcagtcgtcggcggcgccctcgcctcgggcgcctattacggctccggctattacggctacggcccgggctattatgacgacagctacggctattacgacgacagcgcgcctgtcgccgtcgaagccgccccgggtggcgacgcgagctactgcgcgcagcgctacaggtcctacgatccggcctcgggcacctatctcggctttgacggcctgcggcacccctgcccgtagtggcggctcgaatccccggctagcgaagggcggcggcaacgccgccctttttcatgtccgcaatgccaccgcgacggccgcgaacgtcaccagcagcgccgtgatgtcgctcgcgccgagcggttcgtgcagcatggccgctgccgccagcacgccgacaaccggtaccagcagcgtgccgatggacgcggtcgccgccggcaggcgcgcgagcgcggcgaaccagcagacatagcaaaggcagaactggatcagcgtcatgtagatcatcgacgcccagccgagttgcgacaacgcagcaagctgcggctgctcgatcagcacacctgcgatcgcgatcggcacgcagccgatcgcaagctgccaggctgcgagcgacagcggcggcatcgcgagcttgaaggacttggtcagcaccgtgccgagcccgacgcaaagcgcgcctgcgagcgcgaacagaatgcccggcaatttgccgaggctggcgtcgatcccgccgccgccgatcagcacggcgatcccggcaagcgccaccccaagcgcgagcgcccgcggcagcgacacgcgctcgccgagcaccggccaggccaccagcgcgacccacaccgggatcgagatgccgagcacggccgcctcgctggcccgcagccagatcagagcgagacccatcgacgcgacccagccaccgatcgagagcgtcgacaccagggcaagccgcaaccacatgccgtcgggaacgcacagccgctgtccgcgcgcgaccgccaccagagcgagcccggccgcgccgaccacgccgcacagcccgcgcgacgacagcggcggccactccgtgagcaggaatttcatgatcgggaaattgaggccccagccggtcgaggcgacgaccaggaatgcgaggccgagcggtgacagcggggcgcggccggcgacgggaactgaggtcatggacctgtcgtaatgtgggcggacaaatacaagtgatgggatcagggctagctggaaatctgcttgtcagcaaacagcatatgcattctatgatacagactttccgtccaggttccgccttaatcggcggacgggccaagcgagtcgcgggcacgcgaggccgcagcaagaggatgcatcgtgccgagcgttctcgtggtcgatgacgacccgatggtgtgcgttgccatcgaggtgtgtttgcagcgccagggcttcgacgtcaccgtcgcagacggcagtgaagcgggcatgcgcgcgctggaccaggcaacgttcgacgtcatgctggtcgacgtcttcatgccgcatatgcgcggtttcgaggctatccgcatcttccacgagcgcgcccccgacattccggtcatcgcgatgtcgggctacgacttcgccaatgccgaccgggcgccggacttcctgcggatgacgatcgagctcggggcgtccgcctgcctgcgcaagccgtttaccccgcaggcgctggtggccgccgttaacgaatgtcttgcgaagtcggctccttctgctcgtctttcgaaataattgctcgtactaatcgtcgatggcttcccaacgtctcattcttggcagtggccttgcgatcctcctcgtcatcagcgcggcgtcgatcgggctggacgtcaagtcacgcagcgagattgattcggtcgatcgcacgctccgcatcctcaaatgcatttcggacgcgcgtccgctgccgcgcgccgtcgagagcgcggcgcgtggtttcgcgctgaccggcgatgcgaccttcgccgacgagttccgagagcagagcaccgccctcaccgccgccttcgacgagttgacgaacgccgtgaaggcggccccggaggaagcgcagctgatcgagggcaccaggggccaggtcgagcgcgccatcgcgctcggcgccgaactgatcaggttgcgcacggcggacgacacggccggcgccgcggcgctgatctccacaggcgagagccgctcgctggtggacaaggtcggcaccgcgctcgatcggctggtcgccgaagagcgccgtctgctcgggattcgcaccgaccagtccaaggccaatgggcggctgttgctggcgatcgacctcgcgggcgtggcgatgatcctgctgctcgcggtcgcactgacggtgacggcccgccgcgccagccgcgaactgcagggcgcgctcagcgcgaccaaggcgaccaatctgtcgctcgagggcaaggtggccgagcgcaccaaggatctcggcgccgcgctcgaagggctgcgccggtcaacatcggtgatggaaaccacattccgcagcatggccgaagcggtgctggtgatcgacaccgggggcatcgtgctgctctccaatccggccgccgagaagatgctgcgctacaggccgggcatgacggtccggcagctgcgcgacctgagcaacgtgttccagtccgacggcgtcacgccgatgcaggtcgaggacatgccgtcggccagggcgctgcgcggcgaggaattcgacgggctggagttcgtcgcacgaccggtgcgcggcgcgcccgaggttcacctcgtggtgtcgggccggccgctgcgcgacggcgacaacaccatcaccggcgccgcgctgatctaccacgacatcaccgcctcgcgcgaaaccgagcacaagctgcagcaggcgcagaagctcgacgcgatcggcaagctgaccggcggcgtcgcgcacgacttcaacaacatgctgacggtcatcaccggcaccaccgagacgctggtcgacagcctgcgctcgcagccgaagctggcgcagaccgccgagctgatcgaccgcgccgccgagcggtgccgcgagctgatccagcatctgctggccttcgcccgccgccagccgctggagccgcgcaccgtcgacatcaacggcaccgtggtcgacatcgccaagctgctgcggccgacgctcggcgagcagatcgagatcaattcggtgctcgcgcccgatgtcgcgagcgtccatatcgatccgtcgcagcttgccaactcgctgctcaacatggcgatcaatgcgcgcgacgcgatgccgaacggcggcaagctgttgttcgagaccagcaacatcgtgctcgacgaagcctatgcggctgtcaatcccgacatcacgccgggccgctacgtgctgctcgcggtcagcgacactggcaccggcatgtcgcacgccgtgcaggacaaggtgttcgagccgttcttcaccaccaaggaggtcggcaagggctcaggtctcggcatgagcatggtctacggcttcgtcaagcagtccggcggccatatcaagatctacagcgaggaaggccacggcaccacgatcaagctctacctgccccctgcccgcggccaggccgaggtggaagcgcccgcgccggagccgccgcggcgcggcagcgaagtgatcctggtggtggaagacgaccaattggtccgaaactatgtggtcacgcagctcggcagcctcggctacaagaccatcgccgtgcccgattcccgcgccgcgctggcgctggtcgacaagggcgagaagttcgacctcttgttcaccgacgtcatcatgcccggcggcatgaacggccgccagcttgccgatgaagtgagaaagcgacggcccggcctcaaggtgctctacacctcgggctataccgagaacgcgatcgtgcatcacggccgcctcgacgagggtgtgctgctgctcgcaaaaccctaccgcaaggcgcagctcgccagcatgctgcagcaggcgctcggcgagtgatgtaagcgctcgtcattgcgagcgaagcgaagcaatccctttcgccgcttgtggaggcaatggattgccgcggcgctgcgcgcctcgcaacgacggggaaaaatccgcaagcacaactaccttgtcgccagcacgacgcccgccagcgtgaacagcagcgcgatgatctgggtcggcccgagcggctcgtgcagcgcgactgcggaggcgatcacgccgatcacgggcaccgccatggtgccgatcgccgcgactgaagccggcagccgcgcgagcgcggcaaaccaggcgacgtaagcgacgcagaactggatcagcgtcgaatagaccaggagccaccagccgacggtggtgatgcggtcgatatgcgtggtctcgatcagcaggccgacgatggcgatcggcacgcagccgaggccgatctgccaggccgcggcggggatcggcggcatcaccagcggatatttcttcgccagcacggtgccgagcgcaaagccgaacgcgccgccgagcgccatgatgattcccggcagcttctccttgcttgcggaaataccgttgccgcccatgatcgcggcgagccccgcgaacgccatcaccagcgcgatggtccgcagcagcgtcggtcgttcgccgagcaccggccaggccagcagcgaagcccagaccggcatggtgtaggcgatcagcgcggtctcgctcgccggcagccagagcagcgcgagccccatcagcaccatccagccggtgacgttgagcaacgcaaacagcacgagccgcggccacatcctggcctcgacatgcaggctctgggcgcggatcagcgccagcacggccagcagcacggcgccgatcaccccggtagcgccgcgcaaggtcagcggcggcagctcgctgagcagaaatttggtggacggccagttgaatccccagcccaccgaggtgatggcgaggaacatcaggccggcgggcgcaaggcgcgtccgcgcagggggattcggatctgtcatggagcccggcaagggggtggaaaggatgtgagtcgcccgcaccttgcccgcgattttgtcgcccgaccatcacgcctctgacatgcctgatccgtagtttgcccgtaggcctacgtgagtccccaaaattcaatccggcgcggcgaataaaaacttcgcctgtgaacagcggggcgaaacgccaatccacaggcgccacgaatttttttggcttgggaatccctcaggactcaccgatagttggcgcgatcacaggcgcggcaccgccccctgttatccccctcccctccaccatatttagtgtttgattcagaaactcgtactagtccttgacgggcgtgacggacatggcctagcttccaacctgttcggcgcgagtgtgtttgggtccccgccggtcgctcccacaagggttccaaaatgaccactccgccaggccttcgggccgcgggtgaagggctttgctgccctgattttgggccgccgtcggagtgacagaacgggccgagaaggacccggaaacagaggccgtaaccggcccgcgagaagcgtacgcgtgatgtgtcgcgtgaagcgtttggggcgttgaatgcatgacccgaaggaaccgacccagtcgggtgccatcgggaacgtgccactgccgggccgggccaaaccggcgccgagcggatgagagaacaggccggatccaccggctgagctgcggatgacgggaggcgtgcccacacgtgttccgaactccgcgaacagataacattccggcaacctgcgggaaaacgcgggaccgggcagaagaagtgacggggctcgaccatgcgaatcgaacgacgcaacaccaccagcggacaatctccctacgccgggatcaatttccgcctgaccacctcagagatccgcaatccggacggctcggtcgtgttccgcgccgagaacgtcgaggttccggagttctggtcgcaggtcgcctccgacgtgctggcgcagaagtactttcgcaaggccggcgtcgccgcgcgcctgaagaaggtcgaggaagagaccgtgccgtcgtggctgtggcgttcggtgcccgacaccgaggccctggcgtcgctgcccgagaacgagcgcatcgtcggcgagaccagcgcaaaacaggtgttcgatcgcctcgccggctgctggacctattggggctggaagggcggctacttctcgtcggaagaagatgcgctggccttcttcgacgagctgcgtttccagctggccaagcagatggtcgcgccgaactcgccgcagtggttcaacaccggcctgcactgggcctatggcgtcgacggccccggccagggccactattacgtcgactggaagaccggcaaactgacaaaatcgaagtcggcctatgagcatccgcagccgcatgcctgcttcatccagggcgtcggcgacgacctcgtcaacgagggcggcatcatggacctctgggtgcgcgaggcgcgcctgttcaagtatggctccggcaccggctccaacttctccagcctgcgcggcgaaggcgaaaagctctccggcggcggccgctcgtcgggcctgatgagcttcctgaagatcggcgaccgtgccgccggcgcgatcaagtcgggcggcaccacccgccgcgccgccaagatggtcgtggtcgatgccgaccatcccgatatcgagacctatatcgactggaaggtgaaggaggagcagaaggtcgcagcgctcgtcaccggctccaagatcaaccagaagcacctcaaggccgtgatgaaggcctgcgtcaactgcgaaggctctggcgacgattgcttcgatcccgagaagaacccggcgctccgccgcgagatcaagctcgcccgccgcaacctcgtgcccgacaactacatcaagcgcgtcatccagttcgccaagcagggctacaaggagatctcgttcgacatctacgacaccgactgggactcggaggcctacctcaccgtctccggccagaactccaacaattcggtgtcgctgaaggatgatttcctgcgcgcggtggaaaccgacggcgactggaatctggtcggccgcaccacgaagaaggtgacgaagacgctgaaggcccgcgacctctgggagaagatcggttacgccgcctgggcctccgccgatcccggcctgcacttcaacaccaccatgaacgactggcacacctgcaaggcgtccggcgacattcgcgcctccaatccgtgctcggaatacatgttcctggacgacacggcgtgcaacctcgcttccgccaatctgctgacgttctacaactcgtccaccaagcggttcgacgtcgagtcctacgagcatctctgcaggctctggaccatcgtgctcgaaatctcggtcatgatggcccagttcccgtcgaaggcgatcgccgagctgtcctacgagttccgcaccctcggcctcggttttgcaaatatcggcggtctcttgatgaccatgggcctgccctatgacagcaaggaaggccgcgcgctgtgcggcgcgctgaccgcggtcatgaccggcatctcctacaagacctcggcggagatggcggccgagctcggcaccttcccgggatacaagaagaacgccgcgcacatgctgcgcgtgatccgcaaccaccgccgcgcagcccacggcaatgccggtggttacgaggcgctcgcggtcaacccggtgccgctcgatcacgcctcgtgcccgcaaggagacatcgtcgcgcacgccaagctggcgtgggacgacgcgctggcgctcggcgaggtcaacggctatcgcaacgcccagaccaccgtcgtggcgccgaccggcaccatcggcctcgtgatggattgcgacaccaccggcatcgagcctgatttcgcgctggtcaagttcaagaagctcgccggcggcggctacttcaagatcatcaaccaggcggtgccgtcggcgctgcgcgcgctcggctatcgcgagagcgagatcgccgagatcgaggcctacgccgtcggccacggctcgctgtccaatgcacccgggatcaacgcctcgaccctcaaggcaaaaggcttcaccgacgaagccatcgccaaggtcgaaaaggcgctgccgaccgcgttcgacatcaagttcgccttcaacaagtggacctttggcgaggacttcatccgcgaccagctcggcatcggtgccgaggcgatcgcggcccccggcttcgacctgctccagacggtcggcttcaccaagcgcgagatcgaagctgccaacgtgcacatctgcggcgcgatgacggtggaaggtgcgccgcacctgaaggccgagcactaccccgtgttcgactgcgccaatccctgcggcaagatcggcaagcggtatctctcggtcgagagccacatccggatgatggcggcctcgcagccgttcatctcgggcgcgatctccaagacaatcaacatgccgaacgacgccacggtggaggactgcaagtccgcctacctgctgtcgtggaagctggcgctgaaggccaacgcgctgtaccgcgacggctccaagctgtcgcagccgctcaactcgcagctcatctccgacgatgaggacgaggacgatgcggtggaagcgctctacgagaagccgatggcggcgcgtgccgcccaggtctcggagaagatcgtcgagaagctggtcgagcgcatcgtcgtgatgcgcgagcgcgagaagatgccggatcgccgcaagggttacacccagaaggctgtggtcggcggccacaaggtctatctccgcaccggcgaatatgacgacggccggctcggcgagatcttcatcgacatgcacaaggaaggcgcggcgctgcgctccttcatcaacaattttgcgatcgcggtgtcgctcggtctgcaatacggcgtgccgctggaagagtatgtcgacgccttcaccttcacccgcttcgagcccgcgggcccggtgcagggcaacgactcgatcaaatacgcgacctcgatcctcgactatgtcttccgcgagctcgcggtgagctacatgtcgcgcttcgacctcgcccatgtcgatccgaacgagagtggcttcgacgcgctcggcaagggcgtcgaggaaggcaaggagcagccggaagaggctccgcaccaccacgcgacgaagtatctgtcgcgtggcctgacccgctcgcgcaccgacaacctcgtcatcatgcgcggcggctcggccgcggtgagccagaacgccgacaacgcccccgccggcggcaaccgcgtgacctcactggcctcgcacggcgcaaccggacgcggcgtctccgacaccatcgaaggcgccgtcgccctgaagcaggaagtcagccacgacctctcgcccaccgagaagctcgaggccctgcaacagtggagcaagcccggcagcgccgcagccgccgccccatccaaggcggagcgtcgcgccgaagccaaggccaagggctatgagggcgagatgtgctcggagtgcggcaacttcacgctggtgcggaacgggacctgcatgaagtgcgatacgtgcggcagcacgacggggtgttcgtgagcggaaccagacagcaataataatgaagagcccgccctccaagagggcgggctcttctcaatggaccatgcacaatgattgacgggccagaaccattcggcaaagagacggcgaaagccgctcaagagctagcaaagactgctgacaatgcgatcgacgcggcgagaggtgcggctgaattcctcaatcgtgtgctcggcaatccgattgccgatgttgttgggataacggtagccgacccgcttcggtttgtccgaatcatatctctcgactggtacagcaagcgagtcgacgagatacttgcaaagcgaaatacaccaaagccaagaggcgcgccgccgcgcattgcactcgatatcctcgaagccgcccaggacgaaactcgggacgagctgaaagaattatgggcccggctgctcgcgaatgcgatggatgcaacgacgcaaaagaacgtccgcatagagttcataacggtactgaagcagctcaatcctcttgacgcgcttatactgcaaagactggctgccgttggcaatttcacaagtccgaattcgtttgctcaagcacaacatcttgactcgaacgacaccgcaacctccgtcctctacctcctcgatctaaaatgcgtagagcaagcggctaacggaagcttctcctttaagctgtcaccacgagggctttcgctactcaaggctctcagcatctaacaagcgtaaaccgccgttcctcgatgttcggttcaaacagtgattgcgcaacctttaatgtttggcgaaaagataaacgaatgacagtcgaccaaggcatagggctcgccggcatcatcattgccgtgatcatcgccgcattcatcaccacgaaagtcgtcaaccgcagtcgcacccagagacagagtgtgggtactcgacactgcggggacgaacgagaacaacggatttcgcggcggccttctggctcgccgcaaaatcattcaacgaacgaatcgtgaatcaactttgagacgcaccttgacaccattagttgcagagagcgccgaagccgcagctcgatgtcagcatgcgggatgcaacgatctccgtcgaccagaacgatcgcgcgtctaatgataatcgggcgggacttgctcacgaaagcagagaccgtgacgatcgcggcgatcgcggctggcgtgccaaccctggtcaaggcacgcgagatcattgccgaatcccatctgatgatccggcgcaagacacaggtgggtctcatgacgtggatagagcgcgcccgcgctagtctagtcgcctcgctcgccagtggacgaagcagcggtccgggtagcaatcactttgccctggtctaatggccagaccgaaagtcagatcagcgcctcaagctcgtcagacgtcagatgtacggccgcggcgaactcgatctgcttcgagcgagaccaatcggcgcggaataatcggagctgtaccaagattgcgtcagagcccttgttccacgccgaaacacatcctccttcaacgcatcgcctcgacgccgcaccaatcggcgatgaagagcgccagcgttttcgtgactttgcggaccgactccagatcgacgcattcatcgaaagcgtgcggattgcggcaatacgggccgtagacgagcgtcggacagtttccgtaaagcccaaaaggccgtgcatccgtggtggcggcgaacgcatgttcttctaatttgtcgccccagacttccgcgtggcactttcccaagatcgcttcctgctggtcggcatcggtcagatgatagccctcctgcataaaacctggatagctgatgcgtggtgggttcttggcaaggaacggattgcgggccgacacgtcggcgatgtatgcctcgaattccttgcagatctcggcaggcgactgtccggggaagacggccacacgcacttcgaacgcgcaagcagatggtgcgctggacgtccattcgcctccctggatccgccccacattgaagttgatgggatgaggatggttctggaacggcggatagtccttcttgcgcgcattccatcgctcctccagttcccgaagcgactggatcaactggatggcgttgtagattgcatccgcgccgagaccgaagtcgcctgatgcatgaccgggcgcgcccgagacttcgacacgaatccagatcggacctatctgcccgcgcagcagcttcggctcaagcggctcgggaatgaaccctgcgtcggctacatagccgcgcaacacgcaatcgagcgcgccgttgcctgtgcactcctcttccaccacggactgcacatagactttggcggcgggctggagcccaatactttgtagagccttcaaggcgtataggttggccgaaaggccggatttcatatcgcctgcgccacggccatacatccagccgtccttgatttccggctcatagggtccgtacgtccaccgttctgccgcaccggtcgggaccacgtcgatatgaccattcaggacaagcgagcgaccgctggcgttcctcggctggtgcgtaccgacaacgttccaggaattctcataggagatcgacaccggcgagaagccgggatgatccttgattcgctcgacatcgatgacccatttgtccacctgcaggcccaaatcggccatggcgtcggccatgaacatttgcgcctgttcctccagaccgcgctgtgagggaattcgcacgatgtccttcaagaactcgatctgttcgtcgaacagggcatcgacggcctcgatgatctgaagcctttgcgtctgcgtgggcgacatgggtttgctcctcgtattcttcagctaggcgtctgccggatgcgtcttcgcactcaattcggttctgcgaatgcgagaaccgaatgcaaaagaacgttggcaccggcagtgcaatcttcgggagaagtgtattcggcttcgttgtggctaagaccgtcgcgcgaaggcacaaagatcatcgtggccggatatttgcgtgcaatgttgcaggcatcatgccctgccccgctttggagccgagccttgcgataacccaatctatcggcggcatccgacacggctgcaatgagctctttgtcgaacggaaccggcagggaattggcaacttcgcgccacttcacggacacaccttgtgccgccgctgccgactgcaatccggcgaagatggttttctccagctcgttcaacgtcgcaagttcgccgtgccgcagatccagcgacagctcaacgtcggcagccacagtgttcgacgagccggatcgggtgcgcaactgaccaaccgtggacctggcgccctcgatgccgcgtgccacgtcgtctgcgaccaacaccgcgcgagccgctgccaccacggcgtccttgcggctctccatcggggtcggcccggcatgcgcttcgcgcccctcgaactcaatgacgtagcgccggaatccaatgccgccggttactacgccgatctgatcgccgttgtcctccaggatcggcccctgttcgatgtggagctcgatgtatttctcaattgggaatccgacgtcgttcggaccggcaccattgcgcataccggccagcaacgcgctgatcggcgtctgtgcatcgtcggtcatagcaagcgcgcgatccagcggcaacgcgccggtgaagacttctgagccgatcatcggcctgataatagcgccctcttcattggtccagttcacgatcacgatgggacgccgtgtcgcaatcccggcatcgttcaacgtgcgcacggcctcgagcgccgccagcacgcccagaatgccatcgaagcggccgccggtcggctgggtatcgagatgactgccgatcacgatcggcgccagatcggcttgcccggccctcgtcgcgaacatgttgccgaagcgatcgcgttccacggcaagaccggcgtcagcgcaccaggcgacgaagagatcgcgcgaatcgtcatcctctttcgagaaggcaatgcggcagcatccgcctttggctgtagcgccgatcttggccatctccatcagagaagaccacaggcgatcatgattgacgcgcagactggacagattattgctcaccgcattgctccagatttccgagaattccgatcgaggtcttgttcagagcgtttccagaacctcgcgcatgccggctaccagcatcccggcgttctctcgcgagaaaaccaatggcggtcggattttcagtacgtttgcggccgggcccgacgcgctgatcaggatgcgccgttcacgcagaccattgacgaggcggctcgtcgtcgccgcgtcgggcgttttcgactttgcatcggagacgatctcgacaccgatgaacagtccggcgccgcgaacatcgccgatcaccgcgaattccgccgcgagctgccggaattcatcctgcatgaaggcgccgacatctcgtgcattgttctgcaagttatcggctttgataacgtcgagtacggccatacccgccgctgcggcgacaggattgccgccgaatgtattgaaataacgcgccttctcgccgaactcggcaacgacctgcgggcgcatgatcacccccgccatcgggtacccgttgcccatcggcttgccgaccgtgaccatgtcgggctcgacgccgtggcgcatgaagccccacattgcgtctccggttcgtccgaatcccggttgcacctcgtcggcaatgaacagaccacctgctgcgtgaatagcgtccactgccggcttgaggaaccccttcggcccaccgaccacgccgtcactggagaagatcgtatcgacgatcagcaatgcgggcttgatgccgtgacgtttgaggtcgtcgatggccgcctgcacatccttccggaactgctctccgatctcttccggagccatacggtatgaatccggcgccgtgacggtgcgcacatgggtgccgagatcgacgaattcgccaagcgacggagagaactccgccaccgcactggtcaggccgtggtaggcaagcttggtggcgatgataccgttggcgcctgtcgcatgtcgcgcgatgcggacggccagatcgttggcttcgctcccggtgcaggtgaacatcacttgactgagatcggacgggaatgtcgcggttagagcttccgcgtagttgatgatcgattcgtgtagataccgcgtgtgagtattgagaatcccggtctgcttgacgatcgcctcgacgaccttcgggtggcaatgtcccatcgatgcaacattattataggcatcgagatagcggttgcctttggcgtcgaacagccacacgccttcgccccgcacgagatgcagcggctgctcatagaatagacgataggccggacccaacacacgctcgcggcgcgcaatgagcgcctggtcttcggtatccagacgcgcgaaatcttcagcggtgaatgcgttgaccatcgccatggtttttacctcttgcagttggacgcgacgaaccggaagaattccgactcggacattgcggagaggcgctgtagaccgagcagcgcgccaccatgattgcgcatgatgtagtcgcggttctccggtcggctcgcagcccggtattccggaatgatgatcgtaagggccagccgcgccttgatgagcaccgggagcagtgcaatctcggcctcttccaatgcagtctcagcgcaatagccaccgagcatcgcgcccatcaatccctgccaatcgtcgtcgctcacatgataagcgagcgcgaccgcgaggtcgttgacgcgcggagcgaacaccatgtcgccaaaatcgatgatcccggcgatctccaacggctctgccggatcgaccagaatgttgtgcagattgaagtcgttgtgaatgatctgcgttttgagcgacgacctgacgccaggaacggttcgcgcaaactcggctagaacgtccgataccagtttgcgccgctcggctccgacgtgttggatcagattgtcgaggtcgagggtgtggctgatgtcccagagcagcttcccggcaggaggacggccttcaaagctctccaacccctttccgagtgcggcaagaaccgaacccagattgcgattgcgcgtcactgaggggggcaatcgggaaagttggtcgcccgcgagataactgagcagacgaacggtgcgagtgctaccaccttccggaagcctgagatcgtaactgcgccttccgtcttcggtcgcgatcagtctcgggacaggaactgacgacccgaccgattccagatgaagcagtgcgccatcctgaaaggacaacacagctgcgtcttcgaatgggttggcgattttaagaatgtagttggtgccatcctcggcaacgaatttgaacgtctcgtcccgttcgctggaaagtcgggtcacggtgccacgaatgccgtaaacatgcgcaacaacgtcctgaacctgacgaagcggcagaagtgtccagtgagaagacagagcgtcacccgctgcggggcttctcagcggtggaaccgaggccattcgatagtcctgtcgtgagagtaggaattccggagagcggcaccgccttctcggcggatgcggctctccggttttgccggttatcgatttgcggcgtagctaggctgtccggccgccgaaccgacttcgaccgccgtttcggccttctcaatcgggaggaaatagatcgacaggaatgcgccgccggcgattaccgcgaagagcgcggccaaaggtccccattggagcccgtaggtgtgggccagccagacgccgacgattggggtagtaccgccgaatatcgcgccgcacagttggaagctaagcgaaatgccggtgtagcgcatgcgtacggggaacgcgcggggcagataagcggcaatcaccgcgtagtacatgccgatcatgaaggttgcgaccagcacgccagcggcaatgttcgagatattgccggtgatcacgagcatcatcatcggaaccgaccaaatgaccgcgccgcccgttgcgatgagaagcaacaaacgttcgccgatcttgctcgcgatgtaagagccggttgccgtcgcgaagagctggaccacgccgatccaggagatcacgtccaggatctggctcttcggaatcttcaggtaggttgtagtgtaactgatcatgaaggtggtgatgaagtagaaacccgcgattcccagcaggctcaggccgacaccgagtacgacggctttcttcttggttttcagcacctctcgcaccggaaccatctcatagctgcggtcccgttcaagttgggcgaccatctcggggctttcgttgacacccgcacggatgatgaatgcaacgatgacaagcagaccgctgaggatgaagggaatgcgccagccccaggctgcgaagtcttcctgcggcaacgaggaaaccgctcggaacgccagggtggagaggatcaggccgacagggcttccatattgcggagccgcggcgagaaaggtccgccacttttccggcgcgtgttcggtagcgatgagaaccgcaccgccccactcgccccctactgcgacaccctgagccaagcgaagaatgacgagaagaatggtcgcggttacgccgatcgagtggaagcttggcaggagaccgatggcggtcgtcgcgctgcccatcagcaccagagtgatgacgaggctcttcttgcgaccaaccttgtcgccgagatgcccgaacacgagagcgccgaatgggcgcgctacaaagccgacggcgaaagtggccagagaggccaggacacccatgaaggggtcattcgtggcgaaaaacacctcgccgaacacaagagccgcggcggtaccgtagatatagtagtcgtaccattcgattgcagtacccaaaaacgccgccagcgcggcgcgtataggttgtggctgagccatagtgttcgttctccctgcgtaaaacgctcggcttgaggtggcttgtgttttccggcggctcgcaccctaaatttttgatgcatcatgcgtcaagtgtgttttgacgcatcaaatatcatcacttggcgcccaattgggcgaagtgctataccgacccgagcgctgcacgtggccccgcgaaccgaaaagagacgcccagggtgaaagacgtattctcgacgcttgatcacaccagcctctacgagacggtgtattcgcagatcgcgttggctctgatcgagggacaactccagcccgacgacaaggtgagaatcagggccctcgccgaccaactcggtgtgagcgtcacacccgtccgggacgctttgctccggctcgtgaagcaaggcgcactcgaaatgcgcggcctgaaggatatccgcgttccgcgaatgcgcatcgatcagcttcaggaagtgcgcctcattcgcctgcgcatcgaggggctggcggcccaactcgcggccagcaggatcgaccggacctccgaagttttactgacccgcatccttgaagagaacgaaacggcgcgcacgaacggcgacagggttgctgccgtgaagctcaaccggcttttccacgcggaaatcgcgaagatcgcgggaatgccaacgctgcaggaattgatcgagaatatgtggcttcgcatgggtccgttgatcgccgcggtttacaatgcaggcggccgggcaatgatctcgtatcactacgaaattctggaggctttgcggaaacgcgatccggtggcggcggaagccgccatacaggccgacatcaatgcgacggcggaaatccttttgagctcggggcttttgctggacgggccgtcttccgaagtattgaccgacgggcttcccaacgcgatgcagtagcttttggtctttcgctactccacgcgaattgggtcggcgggtggggacctacgctgattgccctgttgctggagggtatagcggtgcggagaccggcaaggtattcacctccctggcgcttcgcggggcaggcgctcgcgacagccccgagctcttgccgtctagacgacgtggtcgctcgaaacgttctctcgccggaacagtgcggaaatcaggatcaggaagatcgtcatgttgaggaatcgtccggcgaacgatccgaacgaattgatgagcagaaggtagacgatcatcggaaatatcgctcgcggctcgagacgcttgaacgcttcaccgaagatgagcagcagccccagcacgatgagagccgtgacgaacactccttgatagatgctgatatggaccagggggttctcgatgccccactccaatccgaaggaatacgtctgcgatctgatgtagtccggatccgggccccacagaaggtcgcctccgctgaacgacgtccatagcggcagcatcaccaagcggctgcgggcgctgccgccatcgttggagaaccgttcaagcagttgatcaaagaagcccgccaaggccaaagcagagacgatccctattccgagcggaatcaccgcagcggcggccgtcactgcgccgcgggaaaaccgcttgcctccggcaaatctcaagatttgccatagggcagcgagagcgaggatcgtgatggttgtcagcaaggctgtgcgcccgccataggcaatcatggccgtcgcctgcaatcccatcatcggcacccgccacttcggcggcaacagcttgccgccgccgaccagcaaactcacgatgtatgcgcttgttatggttgcggcgtgtagcgggtggccgtgaagcgcgaccgaccgagcctcgatggtcgtcgttccatcgggagaaaaggtcgtgagcgggaaaacattgaaccccgacgcaagttcgaaaatgccgagaaccgcattcgctgcaaagaaccaatggataaaccgctcgagctcgatcatgcgctccggcgggacaaacggcagcaacatgcagcaaaggaagagatgcaggtcggtgtcgaaatacattccgaaaccgcttcgtccaccgacgacgatgttgataatggcgaacgtcgtcgcgcagaagaaaaagatcgcaccgagtttggtcgcgacgtagtagcgcgcgagatcgattttccgggggtacgtaacgacgaaagcaaagaatatgatggcgaggagataggtcgacggatgtatcttggtgatctgcgtcccttcaatcgccgaatagtcgtagccgatgaaatcaagcactgtcgccgagaatacaaagagaacgacgacatagacggcgagcatcgcctggatgcgtcggccggcaaaaggcaaagcgagcctgaccgttctaatcggcggcgggcgcgaaatcgaggcggcggcgtctgtcatcggcgctgtcgtgccttcgcggcgtacatgccgtccgcttcccgccacggaccgaggtgatttcccggccgggtcgccgcgcccgtcacgcagatcgtatggccgccgacaacaacgccgtgcttctgcttggccgacatgagcgcctcaaccgagccctacctcaatccgcacgggatacggcaagcaagttaacgctccattaacccagttggcggcgcgctcaaaaggcggacatcaggaggtctggccttgtccggcaccgggaccgacgttcgcacccatcgttgccacgtcctgcgacggctccttaagtcgctgccttttcttcctcggccttaggctgagcttctcaaatagaaccgacagcgccagcgtagctacacagaagaccatgatgttgacgggaaatggaatttctcgaagcgcatcctggcgaaggatgaagtcgtgcgtgaggtagatttgcagtgcaactccagccagaagcgtgacaggagcactcagatagttggcgacaaactgctcgagccatggatagcgcgcgaaacggaaagcgaaaacaacgaacgcaagcgccggaatccgatccaggatctgcacttcgaatgggatgaaacgcccaaggctgcccacgaagagataaaagccggcgatagagatcagcagccaaaccagatcggtgatcttgcccttggtgttggcatgaaaccgggctgcataaacacccatgaccatggtgccgaagtagaaaatgatgcgcagtggaagagttacttccgtctgcacattgtagtgctcggtgagccagctggtcttttcagcaaagatcgagaatagaagaacatatgcaatggccaatgcggcgaagagatacgcgaaagcccttttcgtctccatcttcgacatgatgaggtagaccggaacgtaacaaccgacaatggttggaagaaaccagaattgcagcggtatcacgtacagccagaagaagtcggcgaagctgtgcatgggagcgtcgccaaccagcacaaggaaagtcgcgacgacaaagagcggctcgtacacgcgatgcagccgtcggatgagccagcctccaatcggctccttgctcgcctgataactcaaatacagcccgtatcccgaaatgaagaagaacagctcattgccgaatacgccgcccgtgcccagttggtgaatcgggtagagatcatccaaatgcgaattgaccaccaggacgattgcgacggcgcgcagcagatccaggtacgcagttgggctaacgggcttgtttgcggtcattttttatcgaagactctattggagcgtcgcgcaacccgaagcagacattgaagtgcgcggcttgatggttgctcgttcgacatggagcgcattgcgctcgcggtaacctgctgccagccgcgtcagagcgcgctgcaggctgacggtacgacacgtaccctgctctttgaaagccaaatgtcgccgaatgattaatcgtaaagcaatttcgcccgcgtcgtttcaggtcacggaagcaggccatagagaaactggatcgcgatcgatgcgcagcgaccgaactcgacgccgttctttcggcctgacctccggttcggaggggcatcgcgtcctgcttcgttaaccatctgccgcgcaaggcgctgaaaggaaacgaccggtgacatggtgaattgagcgcggtcgccgaagacgcctcacgcttccgccttcgctcaatgggctacggcggacaagtcgcccgcccgcccttctcgctgacgatcaaagcggtgccgtctaccgcgcagcctggacgcgcttttcgagcagcagcgtgcggtcggatatgtccttcaattcgaatgcctgggaatcgaggaacgcgacggagccgttgtcgggatccgcggcgaggcgatgggtttcgctgaggtgatgcttcagccaggcccgctgctcggtcagcaattgcgcgtgggcgtcgcccttcgagccggcgagaagggcttgataggcggtgttgagccgcgtgtcccacttgccgatttcggccttgccgcagtcgagcatcttggtcgacaccccctcggccttgtccatgcatgcatcaaactcggcgctttgctgcgcgcagaccggtaaagctccgagcacgagcatggccgcgacaatgacgggccttcgcgaaagcatcaccatgtcccgatcaccctgccttgtgtctttcgccaaccatcgccgcacaaaagcgtccgaaatgagatcaaggaatgatgcaccggagatctgcgctcagcctgccccacactccagctcaaagaactcccgccgctgcgcctgcgaggatgacgaggccgaggacgaagcgatagatcacgaaaggccagctggagaagcgttcaagcacgcgcatcaggctccagatcccgacgaatgccgagacggaggcaaccgcgaggccgacaatcagaaccgaccaggcatgaaggtcgagatgaagatggtacagctcccacaattccttgaggccggccagggtgatcgcaggcaaacccagcagaaacgagaagcgcgcggcctcgtcccgtttgaagccgagcgcaagcgccgccgtcagggttgaacccgaacgcgagacgccggggatcagagcgcccacctgagccagtcccaccagcatcgcatcgaaaaagccggcttcgccgatcgtccgccgatgcctggcatggatctccgccgcaccgagcagcagcgccatcgcaacgcaggcccaaccgatcaccacgacgctgcgaagcggcgaattgcaggcgttcaggagcccggacgccagcaatcccgcgacggcgatcgggatcgttgccagaacgatccacagtgcgagacgaaaccagcggtcctggaattgtccccgcgccattgcggcaacggagttggtcgcaagggcgcgcacgtcccgccaaaaatagctgacgacggctgcaaccgcggcaagctgcatggccgcagagaacgccgatcccggatccggccaacccagaacggccggcaccagccgcatgtgcgccgtggacgagatcggcagcagctcggttattccttgcaggaccccgagcgcggcaacctttccatagccgagcgcgacgaagcccgtgtcgattccttgcgtgcaggtgctagccattggttcccgttcgctgtgctgcttgctcggcgtgttgatctcgactgcgcatcaagcgcgctcgtgggcacgtcagccggagcgtcgggagccgcaaggcactctcattcgcaaagacgcgcgccgggacgccatttgacatcgaccgcggtgatctgcgtctgtcgattgaacgcgatggcgtggtcgcgcatcgccaggatgctgcgctcatcgccgccccgcggacactgcacggtgtcgaccggaacgcccgcacgggtaagtgactctcgaagcacgcgctccagcttctgaaaatcgtcggtggcgcattggaacgggtacgacatgtagactctctgctcggcctgagagagcgcaaggcaatagcgccattccgctgcttgcgcggagccgccagatgccgaccaagccaaggcagtgatgcacgccacctgcacgccacttcgcatttcagcttcgccgcacgggctcctgatttggaccatcgcaagcggcacgccgcgtgaggctcgtccatgtcctcaagcgcagccttgcagtcgtcttgccgcagggaccgccgccgatatgtcatacggtcgccgacttacaccgtccttacatgcgccagataatttcgctgccttgcccgcgacacgcgattgtgtgcgcttatgccgcaatgtcagcagaggcgagcaagtttcggttcggcgacgccgcgtgtcgtccgatcgatccagggtagcgcccacaagaccggaacattcccgacttttgcagctggatgagctcgcgctgtttcacctcgagcggggatggacgtacactggaggcacgcgatgccgaactattttcttgcgtggcgtgcgcattgctggtcgatggatgatcatgcgtctgttttccacgaaccgcgacgtctggcgacgccgcgctgaagcgttctcaggcagtcggaccggcctcgtactgctcgcgctgatcgcgtttgcggacagttcggttctacctgtcttgcccgacctgctcctcgtcccgatgctgctcatacgtccggagcggagtttgctcctgtgcaccgtctgtgtcgtggcgtcatcggccggagccctggtcggctatgggatcggatattttgcctggacggcggtcggacagacgctggtcgagatctacggccaggccgacaactttcggcgctaccagaacctcgttgaagactggggagtctggatcatcatcgccaagagcttcactccgattccgttcaagttcatcgccattgccgcaggcgtggcgtcgatgaacctctggaccttcacggtcgcggccgtgctcggccgcctgctgcattttgcgatcgttgccgccctggtccggcttttgggatcgcgattactgcaattgatcgagagataccaccgatggttcgtcgccctcgggcttctctccgccgccctcctcggcatcgcctggtcgctccgctgaccggagtgggacgggattaggttgaaccgggatcgacggcggcgaaccacctctcccttgggagaggtgaagtcgtgcggagccgaaccgattcaattcaaactcatcgtgctcgaggaaggcgtcacgccgctttcgcggtcttgtcctctgccggcgcggtttccatcgcgcgcatatagagatcgagcaggctttcgcgctcgtcgcgctcgtcctggtcctgcttgcgtagcttgatgatctccttgaggatcttgacgtcgaagccgtcgcccttcgcttccgagaagacttccttcttctgctcgctgagttcctggatctcggtgtccaggttctcgatccgctcgacgaaggaacgaatttttccgccgggaatggtgatgtcggacatggtgcctcctgctgaatgaggtcgtgaaaatgcgagcaaagagatgaccaatgtgttaagcaaacggcgtcgcggcggtttgttgatagcttgaaccatacattgctttgctcgcaacgagacgaggagcacagctcggacaaatcatgttgtgagaacgcgaagctgtgccctcacctacacccgggcgatccagtacgccgcggccattcggctccagcgccggcgtctctggaataccggatcacccgctttcgcgggtgatgacaccgacctcgcaatagcatcatcgcatccgtcacacatcactcaggcatcatcagccacccgcaacgtgatccgcgtcaattcggacggccggccgagccgcacggcgaagcccggccagagcgcggtgccgttgttgacgtagagcgtcatgccgtcgacgtcgtagcggcccgagacgaatccggcattggcgggcgcggccagccggtcgatgccgatgatcaatccgccatgggtgtgcccggagagttgcagggcgacgccgagccgagctgcgttgcgggcatcgctcggctggtgatcgagcaggatgacgggcgcgccctcaggcgagccggcgagcaccgcggcaagatcgcggaccggatgcttcctgcggcgcgacgcacggtcggtaatgcccgcgatcaccaggcggccgccgccgcgttcgagcgtgatgcggctgttctcgagcgagcgcaggccgagtgcggcgtagtgcgccatccaggcgtcatagccgaagatatattcgtgattgcccgagatcacgtagacaccgtcggcggccatgaggtcctgcagcggcgcgatgtcgttgcgccgcgcgtcaatgctgccgtcgatcaggtcgccggtgatcgcaatcaggtcgacgtcgagcttgttcgatcgcgcgaccacctcgcgcgcccatgacgcgggaaacagccggctgatgtgcaggtcggtcagttgcaggatggtgtagccgtcgaactctggcggcagtccgcggatcgcgacctcgacatccttcaatggcggaatgcgcatcgcctgatggacgccgatcgcggcggctgcggccgccacgccggcaagcgcgtagcggacgccgtccggcgcccccacaaagccgccatggatcaccgcggcgacgatcaatccagcatcgagcgccagctgcagcagcgccagcagcatcaccgcaccgaacgcccagttgaacagcgcgaccaccggacgcggaaactccggcgagaattccgatcccgacgacagcctgttccagcggtgaaactgcagggcgaccagcacgagcaaggctgcgacgatcttagccggcagcggccagtcgagcggccagatgaaacgggccaggatcaagaggctggtcaggccgaaaatgagttggggaattggtcacgctccggatcggatcggttaaggctgggcggtcggcgcccggcaaaggtaggttggatcggccgcaggcgtaagcgccaccatcagcacattttcggcaagtcgcgcgctgccaagacgccctgcgcgctctgagccgcgacgtgagcagtcgaagcgcgatcagattggcttgaatcggctcggcgcgatcccggttcacctctccccatcggggctcccatgggagaggtgaagcttccgcgccgttcgtccaagataaagcttgaacattgctcattttctatcgtgcgccgcaccgagcacatcgccttcgccgccgcgatcgtctggggcgtgacgcgacggttctccggcggtggccggcaaacggcgggcacccgcacgatttcggaataatggaaatgtatcgctgagttgcccgacgggtcaagtcgcttttcggagttccggcggccgcccgccctttgcatggggttgttttcgatattttgggacgcgtcgcttcgcgccgtcgccatcaatggcgaatacccccggtcgcatccgcccgattgacccgcacgcggaccgtatccatatgcatctgcatgaatcggctgcccgcgccgtttcgccctcacctggacacagccagataccaccggctccagtccgcaacgttccggagccgccgtggccgccctctccatccttgatctcgtccgcgtcaccgaggacaccgacgcgcgcggcgcgctgtacaatgcgcgcgatgtcgcccgccatgccgaggccctgggttatcgccggatctgggtggcggagcaccacaacatggcggggatcgccagcgccgcgacgtcggtcgtgatcgggcatatcgcggcgggcaccagcaccatccgggtcggcgccggcggcatcatgctgccgaaccatgcgccctacgtcattgccgagcagttcggcacgctggcgcggctgtttccggaccgcatcgaccttggcctcggccgcgcaccgggcaccgatcagctcaccttgcgcgcgctgcgccgcacgccggaatcggccgagaactttccgcaggacgtgctcgaggtgcaggcctttctcgccgccgccggccccaaccagcgcatccaggcggtgccggctgcgggcaccgacgtgccgctgtggatcctcggctcgagcaacttcggtgcgatgctggccggtgagctcggcctgccctacgccttcgcctcgcacttcgcgcccgagctgttgctccaggcgctgcagatctaccgcgcccgcttcaagccgtcggagcagctcgcgcagccttacaccatggtcggtgtcaacatcatcgccgccgataccgacgccgaagcgcgacgcctcgccaccacgcagcagatgtcattcaccaacatcttccgcggcacgcgcggcctgagtcagccgccgatcgacgacatcgagagctactggtcgccacaggagaaggtccaggcgacgcggatgctggagcgctccatcatcggctcacccgagacggtgcgcgccgggatggacgcgctggtcgccgagaccggcgccgacgagttgatgatcgtgtccgacgtctacgatcaccagcagcggctgcgctcgttcgagctgatcgcgaaagccggcgggatcacgccgtagggcgtaggatgggtggagcgcagcgatacccatcctttgcgccgcggatacgaagcgatgggtatcgcttcgctccacccatcctacaagtcacaccttggtcaacgcctgcgcaatgtcggcgaccagatcggacgggtgctcgatcccgatcgagagccggatcgtggtatcgagcacgccgatctttgtcctgatatcggcgggcacgccggaatgcgtcatggtcgccggcaggctcgcgagcgactcggtgccgccgaggctcacagcgagcttgaatatctgcaggttgttgaggaacgcctccgcggccgcctgcccgccgacgatgtcgaacgagaaggtcgaaccggcgccagagctctggctcgcgaacacccggcccgccggcgagcccgggtcgtgatggccgagataatgcaccgtcgccaccttgggatggtcgcgcagatagtcggcgacgatccgcgcattgcgatcggccttttccatgcgcaggctgagcgtttccagcgagcggctgatcatccagcaggaatgcggatcgagctgggtgccgatcgcgccgcgcagcgccttgacgtccttcatcagcttcttcgagccgagcgccgcgcccgcgatcaaatcggaatggccaccgacatatttggtcagcgagtacagtgacagatcggcgccgtgctcgatcgggcgctggaacaccggcccgagcagcgtgttgtcgcaggcgatgatcggcgtgaagccctgcgccttgccgatcgcgtcggcgacacgccgggtcagcgcgatatcgaccaggccgttggtcggattggccggcgtctcgatgaagatcatcgcaacgcggcccttcttcatcgcctcgtcggcggcggcgcgcacgacgctttcgtcgaggccgtcggcgaagcccacggcttgaatcgaaaacgccgccagcgtcttggtgaacagcgtctcggtgccgccatagagcggctgtgagtgcaggatcacatcccccggccgcgcgaaggcgagcaccgtggtcgagatcgccgacatgccggaggaaaacagcgcgcagctctcggtgcgctcatagatcgcgagacggtcctcgacgatttcgctgttcggatgattgaagcgcgaatagaccagccccgcccccatgccttccggaggctcgcgccggcccgcgacgaaatcgaagaagtccttgccgtcctcggcggtgcggaacacgaaggtcgaggtgaggaataccggaggcttgacggcgccttccgacaattgcgggtcgtagccgtagttcagcatctgggtttccggatgcagcagatggttgccgatgtgggttctggatggaaacggttttgtcatggccggtctcctgttcgcgagaccaccgcgccggcggcgattcccggaatgatgcgaccgagcatactccagctttgtgccattcggccaaagcccggcgccacgcagttctggataacgacggccggcgcgcgccctgcgccgccggccgttcggaagctcgcacgtgggtgaggacgcgattaccagctgcgatccacgttgcgcacctcaccggtgcgcgcgtcgacatcgacctgcatccagcggccgcgataatcccggccttcgatctcccattcgtcgccgaggaattcggtgttggacaccgtcacgatgccgatgctggtcgcgacgtcgagcgccgcctgcatggagagctggctggcagaatcataggccagcgccggtgtcgcggcaccaatcgccaaagccgcgactgcagggatcaagaattttcgcatggttcactcctcatggaacgggatgtcatgccgcataaaacgagcggcgcccccgatcagttccagcagcggcgaccacggagcagcgcgaaccttcggcagttgcggcaattcggtggcgattccattttcatcaacgggcgctgcgcggcttgcgcgccgccttcttccacatccggaaaccgccctcgaatgcgttggcgttgtcgccgaacctcaccttgggcggcgggttgtcgatcttgtcggcattgcctccgccgagcacgatgtagtcgggctccagcgccgccgacagccgcgcgatgacgtcctcgacgctcttgcgccatttcttcaggccgcgccgctcgagaccggcggcgccgacatagtcctcgaacgtcccgtccctgcgatacggcaagtggccgagctccatcggctcgaaaacgccgtcgacgatcatcgccgagccaagcccggtgccgaggccgagaaacagcatccgcccgccctgatagctgccgatcgcctgcatcaatgcgtcgttgacgaccttcaccggccggccgaacgctgcgtgaaaatcgaacccggcccagccgcggccgagattgtgcggctccgtcagcggacggttgtgcaccaccggcccgggatagccgatcgagatcacatcgtaggaccagttcctggtcagcgccttgacctgccgcaccatctcggtggcggacaaggtcggacctgactcgaactcgcgccggattcggtccttgtcggtcatgaccttcacatgtgtgccgccgatgtcgatcgcgagcaccgtgcgccgcgacgcgggcctcttcgttttctcggctgtcttcttggctgccttcttggccatcgatcggttctctcttgtgcgctccgagtggagcagtgaaacgcattgcgcgccacagccgcgttctgcatctgactccaatttgttcgcgcggaacgaatcggaatcgacaaaatcgccgaggctcaaacgttaacaacctgcatgcacgcaccgcacccaagcgatcaatgttgtaccacggtgggattattgtactcggcgtgcaatctcgcacatccttcagacccgttgatgctccggcttgccggatttgtgcgacagacggcagcgccgccgcgttccccgttcgactccatttcgttcgcgaagaacgaatcggaatcgaaaaatcagcgcagcgcgattcttaacaacacatttgcgacttcgatgttgcggcaactttgcagagcggatcagcgcgagcgtcgtcggccacccgtcggcgaacgcgagcggcggattacgcgcgtaccaacccgcccgagatgctgcgtccgccgccagtccccaaggtgacgccacagcgcctccgcgacaggtccgtgcggatgctggcgataccggatcaccgccagattttcgtcgcgacccggaaagttcggtcccgcgatgctgatcaacctgccgtcggcgagctcatcctcgatcagccacgccggcagatggccccatgcaagacgatgcaggatcagctccttcttcatcatctggtccggcaccgtgcactgatgggcgccgtcaatcaggaagaaggcttccgatgacggtcgccgcgcagtatcgcgtatcacgcactgcgtgaatggacgcatctgctccggcgtgatccgcctggtccacgcaaacggcaagaacccgggcgcgacaaccggcaccatggcggtcgtcgagagcttgatctgctcgaaccgcgggtccgacgggtcggcgcgatgaaacaccaggtccgcctccccctcgatcaagcgctcgagaggtcccccgaccgcctcatattccaggtgcagccgcgtgttgggatattgggcaaagaaccccgagagcatctgcaggatcggcggccgcggaaccaggtcgccgatgacgagacgcaggacgacctcttccccgctgacgagctgctccgcataggcctgcagcagatcgagctcgcgcaacgtcgcccgcgcccggaggagaaacgtccgccccgcctccgtcagccccacacggtatccgctgcgatcgaacagcgtgaggccgagctgctgctcgagccgggcgaccgccacgaacaccgatgggtgcgatcggttcagcgcggcgccggcagcctggaagcttcccttggtcgcgacagcgtcgaagcagcgcagatcgtggagcttgatccgatccattatccataaaacctacagagacttgtcaatcttagtaatttttcttgctgggcgcgagccctagcctggcgctatgcgaagccgccggcttccaccagcagaagggaccagcgagatgagcggcgatcaacacttcacgacggcagatggctgccggattgcgtaccggatcgacggccccgtcgatcggccggtgctcatgctgtcgaactcgatcgccacgaacctgcacatgtgggatcgatcggtggcggcgcttggccgctcctttcgcctgctccgctacgacacccgtggccatggcgggtcggacgcgccggcgggtccctattcgatggaccggctcggccgcgacgtggtcgagctgctcgactttctcgacatcgatcgggcacattttctcggcctttcgctcggtgggttcatcgggcaatggctcggcgtcttcgcgcccaaccgcatcgatcgcctgatcctctcgaacacggcgccctatcttgccgcggagctgcatttcgacgaccagatccacgcggtgctggctgcgagcgatatggacgcgatcgcagacggcttcatgcgcaactggtttcccgcgacgatgctggccgcgccgaacgagatcgtcgacgaattcagcaacatggtactcaccacctcgccgcgcggccttgccgggtgtttcgccgcactgcgcgatgtcgatcttcgccgcgtcatcgcgctgatcgcggcgccgaccctggtcatcggcggcgagagcgacaccgtcacgcgccccaatcacagcgaagcgatcgcgacgacgattgccggtgcaagactcgtcctgctgcccggcgttcacatcctcaatgtcgagcaggcggaacgattcaacagtgaggttctgggcttcctggagtccgcaccgtaatcgttccccatccgactccattttgttcgcagggaacgaatcggaatcgagcaaatcagcacagagcaattgttaacaacacgtttgcgatcgcgacgttgatcaagcttgcaaggcagatttgtcgaaggcgtaatccgccatcagcaaagatggcgggttacgcggagcctgtcatcgggccgtcctacggacggacccgttggctaccccgccccaggctccgtccaacgtcatattcaagctccggccgtagcgcacgcatcttctccgccagtctctggcttgcggtctcttccgcctgcgccaggcggtcgacgagcgcgacgtagtccgcatcgctcttgtgctgattgagtttcgattgcccctcgatctcgtcgacgacgagatcgatcaccctgatcgacgccagcatctgttcgcgcttgccgggctccatctgcgtgaggtcccagggctgcttcggcagccgcgcctcggagaccgcgagcagcgcgtcaccgtgaccacgattctcgccgcgatcgcgcaggtgcgcgacgccggacagatgcaccgcctcgtagagccaggtcgaaacgttgtcgcgcgagacgtaccagtcgttcgagatgtaggcgtcgtcgcccgagacgatcagcagaaagcgcctgataccgtcggcgagctcgaccagcggattcctcgcggtgagatggagctgcacgatcacgcgatcgtcgcgccgcgcgatcacgaagggaacatgagacgctcgcgggccgcgtgcgtcggcggcgacgatggcgccgaagccgcgcgccgccgcgaaggccagggcgtggtcgtcctcgatgcgaaactggggacggaggatgtgcatggcggtggcgctcgcggctggggggagacgacccagcgaggctagcgcaacttttgccggagatcaccgccatgcaccgtccggctcagcagatcatggcgttgtcaccgtggtcgcagacgccgccgggctgatcccggggcagcgtctcgaattcgccgaagcgcggcaccgccacgcgcggcggcccgccgccccagcggccggcggccgcggcatgtcccttcaagaacgcggatgggccggccgggacctcccgcgccatggccgacgtcgtcagcatgccaagggccagcaagcctgccgcgacgtgtttgatcgtggtcatcgagcgtctcctgctggatcaacaggatggggatcatctcaccggcctgtcgaagcgttttcgctagaaccatgacgggcggcgctccccgattattccgtgacgacgcaacgaatttgcaggtgctgtggctcagttcgacacattcgattgattggagcgtgaccgagagcgaccttcaccgtcgtcctggcgaaagccaggaccattgccccgaatgcccacattgttgcgcgacgctgggcccaattcctctcacgaccaacgccggtggttatgggtcccctggctttcgccaggacgacgattggaaggggcgagccccgaaggatgcccggcgcccggctgatggacgcaccgacccctcgaaggcaatgtccgccgttgaactcaccgcaactcgcgggttacgctgtcacccgcctcacgccctcccgctggaaggatcaccatgaacggcaatcgatattacggcgtccgcgtcgagggtgcgaaatacggcgtggggttcggctcggcgctggcgattgcgatctcctacaccaagaaccattcgatcctgtgggcgatcatccacggtatcctgggctggctttacgtgatctacgccgccctgttcgggtgatgcggacaccatgaccgtcatctcgatccagtcacaggtcgcattcggccatgtcggcaacagcgccgccacctttccgatccagttgcatggcatcgatgtcgtcgccgtgcccaccacgctgctcagcaaccggccgggctatccgacgatccgcggccgggtgctcgacgtgcagctggtggccgatctgttgcgcggcatcgaggagcgcggcgcggtcgaggcggcccggatgatcctgtcgggctatctcggctcggccgatatcggctttgacgtcgccgacttcgtcgcccgcgcgaaagccgcgaacccggccctgctctattgctgcgatccggtgctcggcgatcgcgaccgcggcatgttcgtgcggccggacatcccgccgctggtgcgcgaccaactctgcccgctcgccgatatcatcacgccgaaccatttcgagttcgagttcctctgcggcgcgcgcgtgacgacgatcgacgacgtgatcgcccaggccggcgcgctgatggcgcggggtccggcaacgatcgtcatcaccagcgccgagcttgccggcacgccccacaatgaaatcgagacgctggcgatcgaacgcacggaaggcgcgcgcattgcggcttggcgcgtgcgcaccccgcgggtgccgatcagcccgtccggcaccggcgacctgttcgcggcgctgttcgccgccgcccgcatgcgcggcctcgcgacaccggacgcgctcagccacgctgcgtcaggcatccacggcgtgctggtgcgcacggccgagcggggaaccgaggaaatgcgtattgtcgaaagcgccggcgtgatgcttgatccgaggccacgcttcgcggcggtcgccctccctgcatcctgacatccgggacaccttcatgatcgacaccaccaccctgctcacctacgccgccgtcgagctcggcctgttcctgatccccgggccggcggtgttgctggtgctcgcgcgttcggtgaccggcgggccgcgcgtcggcgtcgccaccgggttcggcatcgcgctcggcgatctcgttcacactgcgatggcgacgttcggcctgtcggccgtgctgatgacctcggcgctggcgttctcgatcgtcaaatatgccggcgtgatctacctgatcgtgctcggcatccgcgccctgttcgagacgaatgacgacctgcatctgccggcggcgcagccggtcgatccgcggcgcgcgttccggcaggcgatctgggcggaaatgctcaatccgaagaccgcgctgttcttcctcgccttcctgccgcagttcgtgcatcccggtcacggctcggcggtcgcccaattcgcgacgctgggcctgatcttcgtcgcgatgagcgcggcctacacctcgctgctcgcgctcgccgccggccagatcagtccgtggatcaggcggcaccgccgcatcgggcagtggcagggccgcgtggtcggcacgatctatatcgcgctcggcatccgccttgcgtttcaggagcgctgatgtctccgctcaagccgcaagccacttatgacgacttcgcccgcctcgacatcaggatcggcaaggtcgtcgaagtgcagccgtttccgcgcgcccgcaacccctcctacaaggtcggtgtcgatgtcggcgccgggcggatcatgtggtcgagcgcgcagatcacgaattatgagccggcggcgctggtcggctcgctggtggtctgcatctgcaatctcggaccgaagaacattgccggtttcacctcggaactgctgatcctcggcgccaaggacatcggtggccaggtgatcgtgctcggcccgcgcagcgaggttgatgtcggcgagccgatcttctgaccgatcatcctgacgttgaggccgatcacggccgcgtgattcaaatcgtctggaatccccgtagtttaccgatgggggatgatccggattctcgatgccagcgcgcgctgctattccaacgcgcaagaatcgcttcggcatgggaatcggaaaatgtccgcagttttctttcactgctctgacgacaagcacgtcatcctggatcgcaccggcgccgcgatggacctttcggaagcatgggtgcatgcggagcagctggcgcgcagctttgtcatgacaccgagcgcggaggactggcgcaactgggcggtccacgtcaccgacgatatcgggaccgagatcttcgagcttccgttcgccgccgtcctcggcgaactgcactgagggtgtgccatgaattcgatggaactcaccctgcagccctggcgccgccgcctcacctgcctcgtcacgcgctgcgtcgcgctgctcgacggcgtcatcaatccctatcggcctgaactgtactacatgcgcgggcccggcccgaaatgccgcgccaggcggcaagccgccttgcgcgactagttcgcgcatccgcgatgagaaaaggccggcgggcgttacgccaccggccttctcctgcaactgccggttcccggagcccggttccgttgcgatctgcttgggctcgagcttgcgccgacaattttaatcaaatcttaacggcatggcggtgagctggatcaaggaccccttcgccgtgccgcgcgtgcttgatcgttcatcgtgcctgacgcgctgcacatcgtttttgcgcggatcgctcgacgattgtgcgccacgcatcttagggaatgcacgactcagtgttaccctgtgatgcaaaccgaaacggagagcttcggaatgccgtactacaccttcgatctcgtggtgggggacgagttccgcaatcaaggaacgatcatcctcgaagacatcagcctcgcatccgatcgcgccgatcagctcgccaatgagctgtcgcaggtcaagccggagttgaaagcgcgcggctgcgccgtgcgcgtcaccgacatcgatcggcgcgaactctaccggacgccgctcgatcccgtgccgcggtggcgcaggatcggctagcgtcggcaggcctcaagtactgacgatcgcgcttgttgccgcgcgcgcccgatcttgctgcgcgcggcgaccggtcacttcttcaggttcaggcggccgatgaagtcgcgcttgccgagcggcgcgcccttgtggcggaggatgtcgtaggccgtggtcgaatgaaagaagaagttcggcagcgagaacgacatcaaaaatccctcggccgtgaacagcatcgaccggtctccgaccttgaatgtcatgtcgcgcccgagcagcgcattgactgcatctggcgtcagcgccgacaactcgctgtgcgcgtccttcaccagcgcctgcaatgcggcgtagtccagatcgggcttgccggacggcgggacgaacacgccgttcttcgccgcctccatcgcgccgcgggagtggtgcgcgagcgagaccacctgaaagcggaacggcagcatgtcgggaaacaatcgggtctcgacgatctcggccggatcgatgccgttgtccttgaaatgcgtgaggctcttttcgagaaagcccgagacggagccgaggatctgcagatagttggcgacagtcgcgtcgtagagtgaaaaggtcacggcgaattcccccagatagaatttatttgctgattgcctgaacagagttcccggaatttccggcaaaggcaagcggcactggggcataaatcaaatggtccagcgcgcagcgccaggctcatttcgatccggaagagcgagctgcgccgtcagctctgatgcggtccgcgcatcatcttcatggcgtcctcgatatgacgccactcgcgggcctcttcggtctcgcccttgctctcgcaggccacggcgttctgcgcagcctgcgcgctcgcctgcggaccgtgcttctgcagcatctgccgcgcgatggtgtggatctgcatctcggctatcatggcgctctcctcggctgtcaaatgccgcaggaacggcgtgaccgcgcatcccgcgggctgacatcagaaccgctgaacgccgtgtctggttccagcgccgccgcaaaccgcgatgcgatcagcggttcccacgcgccgcggcggcggctagaagcgagtaccgtaccttcccgggttgccgtgaccatggctcagaacatctacgacgatcccggcttcttcgccggctacagccaactgccgcggcaggtccgcggactgctcggcgcgccggaatgggccgcgatccgcgcgatgctacccgatatcgcgggcaagcgcgtggtcgacctcggctgcggcttcggctgggtgtcgcgctggatgcgggggcaaggtgcatccgatgtgctcggcgtcgacctctcccagaacatgatcgcccgcgccatcgcgatgacgcaggacccggccatcacctacgagatcgccgacctcgagacgctggagttgccgaaagcgacgttcgatctcgcctacagcgccctcaccttccattacgtcggggacttcgatcggctcgcgcgcatgctgtaccgcgcgctcgtcccggagggacatctggtcttcaccatcgaacatccgatctacatggcagccacacgcccggactggggacaggatcaggacggccgcaagacctggccggtcaaccgctacttcatcgaaggcgaacgccggaccgactggtacgtgcagggcgtgctgaaatatcatcgcaccatcggcaccacgctgaatgcgctgatcggcgccggcttctcgctgcggcatgtcgaggaattctccccgacacgcgagcagatcagggcgatgcctgagctggccgacgagctcgagcggccgatgatgctgctggtatcggcgcagcgctaaagcgcgatgagattgggtcgaatcgtcatcgcgctttagctcgttgtttgatcatgatcttttccgaaaaccgcttcgcacttttccggatcatgctctagctcacgccgcgagcagcttgtcgaattcctcgggcgggtatgatttgccgtccttgtcggtgatcaccacctgccatccttcgctggcccagaccctggccttggcgatgatgatgaaggagctctcccgctcgatcctgaccgtttcgttctcgcgttctgcgatcatcttgtaggccaacgcttgtccctcgccgacatcatccattccggcggtgtgttggcagtggctttgggctgcatttcgctgggagtgtgacaatttggtggaagcctgccgcaagatgcggcagagcgcaatttgtggtcgcggctacgccaacttgcccatcagggtcggcatatccagcgccgacgagttgacattgacgctgcgcgcgaatcgcatctgcggtccctcgaaggtgcaggtcacggtgtcgcggaacgccgattcgacgaaggtccatgtcatcacgaaggtgcgcaagtcgcgccaggtaccgctcgcgaccacgcgcatcacatcgggctgatactcgtgatgcagcttgttgccggtcatcgtcgtggtgccctcgcgcggcgcgtcgaggccgacctcgatcgtgtgcgtgcccctgccgtcctcaagcgtgaacgtgcaggtcttgtcggcgaagctgagattgaccgatttgatcgcgtcggcattctccggcatctgccaggtcttgccggatatctccgctgcaaccggcgatgatgccgcgaccagcggcggtagcaactgcagggccgaggtgcgcgccttcagcttgtcggcctcggcatcgttcttcgccgcggtggcagagaacatcgccgggaaatgccggaacaccagcttgttgaaaccgctacgctgcgggatgccggcggtgatcgccagcaccgcattgtgcttgggaaagacgaagctgagctggtcgaacaggccgtcggcgtagaatgtcccaggcccgatccaccattgatagccgtaagtgtccttgacgtgcggctgctgcaccgccgccacccaatcggccggcagcacctgcctgccgttccagatgccgttctgcgcgtaaaggatgccgagcttgaggcaatcgaccgtcttccagctcagcccgttggcgccgggcgagataccttcaggcccgaccggccattcatagcccgagattccgagaggatcgaaaaaccgcggcttgagataatctgcgacggcctcgccggtcgtcttggtgacgatcgccgacagcagataggtcgcagccgaggtgtagacccatttcgtgcccggctggtacacgaccgggatcttgaagaactcggcgacccagctggtcttgatcggccgccatgccgatcccgaggtcatcgcggcgtggccggtgcgcatggtcaggagatcctcgaccgtcatcgccgcgagcttgtcgtcgacgacgggcggcagcttgtccttgaagaacgacaccgccttgtcctgcaggccgaagcgcttgtcggccatcgctagcccgacggcgctgacggtgacgctcttggtcaacgaatgcatcatgtggttgcgatcggcgcgatacggcgaccaccagccctcggcaatcacctggccgttacgccacagcatgaagctgtgcagctcgtagccctggcggtcgacgtcatcaaggaagtcgaggatcgctgatggcgcaacgccttgttcttctggcctgccgcgcgacagtccgtcggcaacaccggtctcggcctgtgccgtcgtcatggtgccgagttgtccgtccggcgcgaacagcacggcggctccgcccagaaacagttgcaatgctccgcgccgtgacggctgacctgatgtgacgccgtcaatttcctgattgtcgtttggcatgggccgtcctccgaaagcagaacggaggttatggctccggccggcactgtcaacgcatgcggcgcgcatggccctaaaacgaaaaatcccgccttggcgggacaatccaaggcggggaaaggttcgttgggtagaaatccacgcgcctggaaaaagcgagcgcggggaagtagcggcgacaattctattgggctgggtggttcagacaacaggattaaagcgcgtatgacatcgggactttttcccgatccggccggcaaaaaatcccgagcctcggccgtgcggcgcagctcactgcacgacatcgagcctgacattggcgacgcccttgccgatcatgccgagcgactgggccgcggaatacgagacgtcgacgatgcgcccgggaacgtagggcccgcggtcattgacgcgcacggtgaccgagcggccggtcttgacgtcggtgacgcgcagcttggtaccgaatggcaatgtcggatgcgcagcggtcagttcgtgcgcgttgaacttctcgccgctcgcggtctcctgctcgtcgctgtagaagctcgcaacgccttgcgatgcgatcttgctgtcaccggtcttgcgcgcggcgtagggcgcgtgcctgtgcgcggttgccacatgggtgcgcaccgcggacgacgcggcccgggtcggctcagccgatgccggccggctcgcgagcgcctgcgagcgctggctgacgacggatgattgtgcgcaagccgcgagcgaggccgcgccgatcaccaccgcgaacagccgcagcggctttcgcgcatgggcaaaccggatcgcgggcgcggcaccgcgcgcgcggcagataacgtcgacgtacgaaatgactgcatcgtcgcgtgtcatgttgcatccccaactcgcgccccagcccaagccgaaaatccaacaccagcctaatgagccgaatccaaacagggcggaacggtggcggagcgcgatcagacgcgccgcacgtcgcgcgatttcccttcaggtgtggtggacacgccacacaacccgaggagattcaccggacacgcagtcctggcgaccccggctgccggctccggttcccgaaactcctcaacctctccaccctctcgccttgctttggtcaaacccgactggagttgtggggaccgggccaggggtcgatacagagcgaaatttgccggccgcccatttgcggttgaccttggactgaaacggggaccgccatgcaatcgacgatgaaagacgcagatccgcacgatatttttgcgatcgaacccagcttcgctccggcccggccggaccatgccgctgcgcctgcggcagccgacgaggcatcatccggacagcgcgagccgtggttcggcccgagcctcgcgccctcgtccacgccaccggttgcgccggtcgcctcggtgccgccggtcacgccggtagcggtgacgccggctgtgccggaatacagcgctgcaagccatgacggcaggctggacgacatccggctggagcgcgcgccgcgtcccaccaacaaatgggcgatccgcgcgttctggttcctgttcgcgatagccggcgccatgggcaccgcggcgtggcagcactacggacatcgcgtcaagcagatcgtgaccgagtacgtgccgcaggcagaggccctgacctcgctgctgccgggcaaggcggctcccgcgtccgaccaggcaagcccgcccgtcgcgcaagcggcggcggctgatcagccgcctgacgccgctccggccgtggcgccgcagaacgtcgccggagcggccccggctgccgtcgcggcgccggttgcggcagcgccggccgcagccgcacctgaccagacgcaattgctgcagtcgatggcgcgcgatctggcgtcgatggggcagcagatcgaacagctcaagaccagcatcgatcagctcaaggccagccaggatcagttgtcacagcgcgtcgcgcgaacgaccgagaccagggccgtcgaaccacggccggttgcgccgcgcccgcgcgccgcgatcacacctcaggccgtgccgcatgcggccgttgctccaccgccgatccgtcggccggcgcaggcctatatcccgccgccgcctccgtcggcatcagcagcgccgctgccggcccccgtcgcagtcgcgccgcaagctgcggcaccgcggccggtgctgccgcagcagcagtcgaatatcgtcgatgctgatgacaacggccccgtggttcggccgccgatgccgctgcgctgacggctgaacaactataaaaaaagcggccgatcgcgatgacgcgatcggccgcttttgcacttcgcgtgcgaattacgcgctctgtcccggcggcagcacgaccacggtggcgcccggcttgacgtgctggtagagatcgatgacgtcggcgttgttcatgcggatgcaacccgacgagatcgcctgcccgatatattcgggctggttggtgccgtggatacggtacagcgtgtccttgttgccttggtagaggtagatgccgcgggccccgagcggattggccggcccacccgcgacacgcgccggatacggcccgagccgctcctggatatccttggtcggaacccaatccggccactccgccagacggccgaccgtggccacgccggagaacgccatcgcctcctcgccgacggcgacgccgtaacggatcgccttgccgccgggcagcacgtagtagagatagcgcgcgtcggtatcgaccagaatcgaccccggctgctccttgcgcgtgtagtcgacaatgtggcgctggaactgatccggaatcttggcctccgcatagggcggatgcgccagcaattgccgatcacgcggcgtcatcgcggcatccgtcaccggcgacaaggtcgcctgcatgcagccgccaagcgcaagcgaaccaaccagcaccgcagcaagccccaacttcgacacgatcattctcccctgcgtcaacttgtggcacttgctgccgaaatcgtgctgaaatcgtggcggtaccgtttggaacacggctgtttgatcggttccttcggcaagtgtgtccttgcggttgcagtcggttcccgcggacgctagccttgcggcaaaatgcttaagacatcgggaggaattcgatgcgttacgctttgctgatcggcggcctaatcgtcgcggcgacgccggcccacgccgatccgcgcgcggcctatgtcacgatggtgctgcgggcctttgccgccaaggtcgagtgccccggcaccgatctggtctatcaggacctcgtgcagcgcgcgcaggacatgcatctgcccgacggcaccaccgaacaggtgcgcaaggcgatcgcctacatgcacaccggcggcaagatgggcgagaagcaggccgacgatctgatgaccgaagtcgcgatcgcaacccagaccaccgacctcgatcagcgccgcgccggcagcatgacaacctggtgccaggaccagaagacgcggctcgcgggctacatcaggagcaaggaatagaaagcatcttcaggcgaagtcggcaccggctcgcgtgaggaagacggcgctcagtacggcggcgccttgcgcgcgcgctgggccttggccgcttcgatccaccaggtgaaatcgtcggcgaagcgtggaaaggcacgctcgagcgctttgccgccctcgccgatcggcttgccttctgcggatagagtctgcgcgatcggtcctgcgctgatcgtgctcgacaccaccaccatccccatctcggacagcgtgccgtgccaggcggtggcggcgcgcgcgccggcgaaccgcccggccgagtagctcgcgatcgccgcgggccgccagaaccattcctcgaggaaatgatcggtcaggttcttcagcccgggctggatgccccaattgtactcgccggtgacgaacaggaagccgtcggcgtcgcggatcttgccggcgagcgcctcgagcgcggccggcgcctgccccttgggatgttccttgtacatgcggtcgagcatcggcaggccgacctccttggcgtcgatcaactcgacgtcgtcgccgcgcccgcgaaggccgtcgatgacgaaatgcgccagccggatgcccatgcgatccgaacgataggagccgtagagaacgagaatgcggtgggtcatgatgcgccgatcctagcatggccctgcgacggccgtcgcgcgacttagcgcgaagacccggcgcgcagatgttaaccgccgcccccgcgtattttcccggcgttaagcaattggtcgcacgcctgccgcggtggccaaaaatcgccagatttgttttctggatatgtcgtcgcttcgagaaaggagaaccgacatgccgatcgcaaggctattttttgcaggctcgctcgccgccattgccgccatcgccacaccggcgctgggcaagaatgccgagcggcagaagcccgacgagaagtctaccaccgccacgccgacaggttgccaggcctatcagcaagcccctgacggcacctggaaccagcttccctgcggcgaggcgggctcgggcggcacgacccagcaccgcgcagcgaccaagggcgccgacgacgacgagcactgaaccgtcacgcctggccctttgccctggccgagccttgccggcctgtcgcgatcggggcggtgcggcgcgtttcaaatgatcgggaccgctgggaccaccgcggccccgtatcataaacccaagcttaatgcgcacccggtacggttgaggcctctccctccctcgtcaagaaatggcgcgcatcccatgaaaattggtactctcctgacggccgcgatcgtctcgttgtccgcggtcggcggcgggctcgcggcctatgtcgcggtcaccaagtaccagaccatggacaaggtctcgaccgcgcagagccggctcgagatcgtccgcgccgtcggcgatatcccgcgctacatgaactccgagcgtggcatgtccaccaacctgctgttcagcaccggcgcgatcgaccagaagcagatcggcgatctcgacaagctgcgcaaactgaccgatggtgcgctcgccaaggtcaatcaggtccgcgctgcgctgcccggcgcgctcgacgatggcgaagcggtcgcgagcgcgatcgacgcgctgaaggcgaagttcgcggcactccgcgacgcgatcgagaaggcgatcgcaggccccctcgacgcacgcaaaccggcggccgccaagatcgtcgccgacaattccgtgttcaatgccggtgtcaccacgctgctcgacgaacaggtgcgccgcctcgcaggcctcgacggcaatgcctaccgccaggccagctacgccaacgtcgcctggacgctgcgcgacatcggcgggctcgacgccagcctgcacaaggccctggtcggcgccaagcgcgtcgccaccgagcccgagaaaatggagctctatcgctctaccggccgtacccagcaaatcctctcgacgctgcaggagctgcgcaacaaccccgcaacaccggcgaacgtcatgacggcgctcggcaagatgcaggccgactatgtggaacgcttcggcaaggcgctgaaattcgccaaggaaggcgcaacctcgggcaagtacgagcaggacgtcgagacctactatgccgagtcccagttcggcctcgcctccatcgtcaccgtgcgtgatgcgttctacgagaatgccgagcagggccttgccgccgcctattcatcggcgcgcttcagctttgtggtggcgttggtcggactgctcgcggtgatcgccggcagcgccggcctcatcgtgatggttcgccgccgtatcctcaacccgattgccgccctcaccggccgcatgtcgcgtctcgccgcgggcgaagtcgccgaagccatcccgggcgctgcgcgcaatgacgagatcggcgcgatggccgccgcggtgcaggtattcaaggacaacaagatcgaagccgatcgtctcgccaccgagaaggaagccgagaacgacgtcaagatgcgccgcgcccgcgcgctcgacgatctgacccgcgccttcgaggccaaggtcaccgaactggtcggcggattgtccgcggcgtcatctgtcatggaggacacggcgcaatcgatgtcggccaccgcatccgccaccaatcgccaggccgcagtggtggccgcagcgtcggatcagacctcgaccaacgtgcagacggtggcgagcgcgaccgaggaactgacctcctcgatctcggagatcgcccgccaggtcgcgacctcgaccgagatcgcagcgcgcgccgtcgaccatgcccgccgcaccggcgacaccgcgcgctcgctggccgagggcgctcagaagatcggcgacgtcgtgaccctgatccagagcatcgcggcgcagaccaacctgctcgcgctcaacgccaccatcgaggcggcccgcgccggcgaggccggtcgcggctttgccgtcgtcgcttcggaggtgaaatcgctggccggccagaccgccaaggccaccaccgagatttccgagcagatcaccgcgatccagaccgcgagcgacgagaccgtgaccgcgatcaggaacgtcgtcgacgtcatcaccgagatcgaccagatcggcaccgcgattgcggccgcgatcgaggaacagggctcggcgaccaaggagatctcgcgcagcgtgcaggaagccgcgcgcggcacccaggaggtcaactccaacatctccggcgtgcaacgcgccgccgacgatacgggcgcggcggcaacccaggtgctgggcgcggccgagcaactctcgacgcaatccaaggacctcgccggccaggtcaaccgcttcctgtcagacgtccgggcggcgtagtcgcaaatccgtaggacgggtagagcgaagcgaaacccatcaattgcgctggcgcggcgagatgatgggtttcgcttcgctctacccatcctacattctgcgctcgcaatgacggcatgagcttgagggcctgctagcccctagcctccccgcaggccgagcacgcggcgggcgatcgcctggcgatggacttcgctcgggccttcatacacccgcatcaggcgagccttctgccaaagcgcgttgagcggcaactccagcgtcacgccgagcgcgccgagcgtctgcatggcgtggtcgcaggcgtcataggccatctccgtcgcgaacaccttgatcatcgaggcctcgtggcggatatcctcgccgcgatcggtcttgtcggcggcctcgcgcaccatcagccggcaggcatgcatgcgcgtggaaatatcggcgatccaccactggatcgcctggcgctccgcgagcctgacgccgaaggtctcgcgctgcttggcgtgctcacacatcatgtcgagcgcgcgcttggtgatgccgacacaggtcgatcccatctcgagccgccgcgtgcgcaggcgcagctgcatcggcgcgtagcccttgccgacctcgcccagcacggagtcctttgggatgcggcaatcctcgaacacgatctcataggtcgagccgccgccgaccatcgggatctcgcgctcgatgatgaagcccgccgtgcccttttcgacgatgaaggaggtgatgccgccctggcgctggtcgttgccgatccgcgccatcacgatgatgaaatcggcggcgcgcgcattgctgatccagatcttgcggccgttcagcacccattgctcgccctccagcacggcgcgcgtcttcatgccggcgggatcgccgccggcgccgggctcggagatcgcgatcgccgacaccatccggccctcgatatagggctgcatgtatttcttcttctgcgcctcggtgccgaccgcctgcagcatgcgcaggttcggcgaatccggcggcagcacgaacggcacgcagctgcggccgagctcctcatgcaccgccgccatcgtgcgcgtcggcaaatcatgaccgccgagatcctccggtgcatcgaggccccagagcccgagctccttggagacgtcgcgcagccgcttgcgctgctccgaggtgagttcgggatgatcgctgccgggcagtttcgatttcagatattgcggctcgagcgggatcagctcgcgatcgacgaacttcgcgacggtctcgcggatcatggctgtctgttcgtcatcgctcatctgggattcctcacctgtgctgtttcgcttcacaaaaccagtagcgcattttttgtcggcaagaatagtcgaaacgcgcgctcacgctcaccgtcgcgcgagggtttcatggtgcggaattcaatatcccgcgacgcggtgagtagcagcgaaatcgcgcgaacagttcgcggctagagccccgttccgatggaatcggaacgggactctcggttcttgtcttgacgcgttttcttcacgcgaaccgatatccacttcgcccgaaaacgctctactcggcaaagccgacataacggacgaagtcgctgttggcctcgcggtccgaccgcaccgcattggcggcgaaactgtcgtcggggtagcccatcgcaacgcaggtcatgatcacctggtcttcggggatattggcgacttcgcgcacgatgtcggagcgcatgatgccctggccgttgatcacgctgccgaggccgcgatcccaggccgccagcacgatgccgtagcagagcgcgccgagatcgaaatggcagaccgcgccgggatcgaggatccggtcgtaggccaggaccagcgagaccggggcgtcgaactggcggaagccgcgcagcacccaatcctgccgcatcggcttgtcgtcgcgggcaatccccatggcgccaaacagcttcttggcgatgtcgacctggcgaccgcggtgcacgccctggtattcgccatggctgacgatgtcgcgcttggccttggcgccggcgaccatctcctccatgttgcggcggcgcacttcctccagcggcgccccggtcaggacgtggacgtgccagggctgggtgttcatcgaggacggcgcccgcttggccacctcgatgatctcctcgatggtcgcccgggacaccggctgcttcttgaacccgcgcacgcttttgcgtgtctgtaccagcgtctcgaattccattccgcgtttcccccactttgttccgcgccgcacacggaatttttccgcggctatccgggtattttatagacaaaatcggctgtgggaacttgatcgggccaagaatccgatatccaattcggccctgatttggtttagggagaacccagatgaagcggattttcttggcggccgtgatcgcgacctttgccgccggttcggcatttgcgcaggacgcctcctgcgagacgaaagccgtcggcaaggacggcaagccgctggccggcgcggccaagacctcgttcatgaagaagtgcacgaccgacgcctgcgagaccaaggcggtcggctccgacggcaagaagctcgccggcgcggccaagacctcgttcatgaagaagtgccagagcggcgcctgagccgctcgccggcgcgtttctcccctcaatcgggacagatcatcgggtcgcgccgggcgcgacccgatgattattggtgggtggccgtacgttgtcggcgaaggcccggggtcctcagaacgagacgccgaccctgacgcccctggtccagacccgccggcaacgcttccgggtgttgccgtggaacatctcgaaacgctccggcagctggatcggcttggagaactccaggcaggccccgccggcggaatagtcgaccaggcggcattcgatcagcggcgtcttcgggtccagctggagcttgaccacactggagacgcaacccgacggtcgaacacgcgcaaatcgccggggatgcatcaggccgcctctggtggaatcgtaccgacagattccccggcccacgttaagattccgttcagacggattgttacgattcgtgtctgcccgatgacgaatcggggcgcgcgcgggaggccgctagcgtctccgacggcgcttcgccgaactgcgaccggtagctccgcgagaagtcgctgaggtgccagaacccgtaagccagcgcacaggccttgacgctaggcgcgccggcgagcagttgcttgcgcaccagccacagccggcgcagccgcagatagcgatgcaggctgacgccgcggtagcgctggatggcgtcgtgcagcgtgcgcaccgagacgccgatctggttggcgagttcgccgctatagatcggatgcgcgacgtcgccggcgagaatggcgcgcgcgtcgttgaacaccttgaactggcgcgtcgtgttggcgcgcgtcgcccatctggccggcacgatttcggcgaacgcgttgtcgatcgccgcaagcagcgtctccttgatcgatgcacccgtggcgaactcggctatcgtcacctggtccgacgtcacgagcaacgcctgcctcacaagttcacgcagcagatcctgcgcgcgttgtgagatttcgtgaatgctgaaatggagaccggggttcggccaaccgcggtcaaggatctcgggcgtgaacatcaccgaggcgtaccggcggggtgtctcctcgacggacgtgtagaacgcgccgctgccgccgagcacgatcaccgcgcggtcgcgctcgacgccgttgaagcgcatcggcacgccgtcgtccatcgtgaagccgatcgcggtcgtacgcggcgcaagctgggcatcgacgatccgcggaaacgactgcgtgtagttgagctcgcatcccggcaagctcaggatgacctgctcggccgaaatcttccgcgcaagtggcgtgaaatcgacatccagatttcggatcgaactccggaatgcgtcaacatcgtcaaaacgaaagactctcggcaccagcaacggcgccgtcaaatgaccgctcccatgaaatgttcttctcgaaatatcttgcaccacgccgcgaccggcgcgccggcgttatcgataatgtccatgcagcaaatgcgaatcgtctgacgatttcaatcgggaaaaatgcgggccattggtcgcgctggaccagcaggcaagtatcgtcgctgccgaatttcgatagtgtttgccgggatatccaccgtcgagaccagccatccctcagattctatacccctattggagattcggggagcagattggcgtcgggaacaatgacgttcccttgtcgcggaacattttaggaccgccatgacagttattgcctccgatctgattgccaagctcgaccacgtcttgaaaaccggctcccctgacctgcgcacgcggatgctgcaggaggtggctgggctgtttctcgaggacgcacatcgcctcggtgcgcgccacgtcgaggtgttcgacgatatcctgatccgcctgaccgagagcgtcgagctgcggaccctgaccacactcagccgctccctcgccgacctgcatctggtgccgcgggaactcgcacgtcgcctcgccaaccatgacgacgccgacgttgccgctccgatcctgcggagatgcgaatgcattccggagtctgatctgatcgacattgcctggatgcgggccgagggacacctcggcgcgatcgcagggcgcaaggccgtgagccaggagctcacggatattctgctgatgcgtggcgacagcagtgtgcttcgcgtgctcgcgagcaaccccggcgctgatatgaccagcgcaggccttgccatgatggtcgatgccgccgaacgcgacgagggcatggcgggcgcgttgatagcgcgcaaggacctgcctgaccgcgttcttgccgacctcgtgatgcgatccacgccgcgccagcaggcccggctactcaagctggcacgccccggcatccagcatgcaatccgcgccgccatcgacgccagcactgcccgcgcccccgcaaacccgccagccacgatcgacgatgcgcaggcgcggtccgggtgacgctgccccgaacgttcgcgacgcctactcccgcttgaagcggtagtcgaagcggtcgccgtccgccttgatcaggccgacggtcggggaaggaaaatggatcggcaggatcagcgtgtcggtcccggcgacggaggcaaagaatttccgccgcgacaccgccgattgcttcggatcccaatccggcttcgccgaccactccggctcgcggcactggatcgcgtggtgcatcaggtcgcccgcgaccaccgcgcgctgccccttcgagacaatgttgacgcagcaatgacagggcgaatggcccggcgtcggcgtcagcgtcacggtatcgtcgagcgcatagtcgtcgtcgaccaggagcgcctgcccggcctcgacgatcggcaggcaattgtcgcgaaacaccgtgccgggtggattggcgcccctggcgttctcggcctcccaggccgcatactcgcccttgtggaagacgtatttcgcgttcgggaaggtcggcacccagcgtccgtcgcgcagcgtggtgttccagccggtgtggtcgatatgcagatgggtgcagaacacgtagtcgatctgctcataggagatgccgagcgcgaacagctcgttgcgccagcgctccttgcccggaaagtcgaacggcggcgggtgccccttgtcctcgccggtgcaggtgtcgaccaggatggtgtagcgcggcgtccgcaccacgaaggtctggtaggtgatcaccatcatgccgcgggcggcatcgaagacttcgggctccatcgttttcaggtgatgcttgaacacggcgtcgtcataggtcgggaagaagtcctgcggccgccgccacggtccttcgcgctcgatcaccgcgtcgatcgtgatgtcgccgatcctgatctgcttcatggccgtctcgctcccgcttttttgttcaagcgtagcgggcgacgcctggcctcacaagccgagcagcacgcagcgtgccatgctgctttgcatcgctgaaagcgccagtcgaaccctgccaacagcgcggtgcttaaggacgcgatggtgcgggcgattgccgcaggcgacgcactgaaaaaccagacagcaggtgcctgctctcttctcctgtcatctcgccgtaatagaaatcgtgcgactgaaacggcccgccgcatcgaggacagattcatggccgatccgaagccttcccgccccaagattgccgaaaccgtcatcgagccgacggtcaagctgcgggaggtcaaggtcgggcgttgctgtgaagtgctcggcgacaccgcaatcgaatacaccgagctcggcgattactcctatctcggcagcggctgcatggtcgcggacgccgtgatcggccgcttctgtgcgatcgcggcgcaggtccggatcggcgcgcccaatcatccgctcgagcgcccttcccagcatcgcttcacctattgtccggaatattacacggacaccgccgagcgcgatcatgacttcttcaagaacagacgcgcagatcgcgtcgtgatcggaaacgacgtctggatcggccatggtgtgatcgtgctgcccggcgtcaccgtcggcgacggcgcggtgctggcggccggcgcggtggtctcgcgcgacgtcgccgcctacaccatcgtgggcggcgtgccggcccggccgatcaaggagcggttcagccgcaagatcgcggccgagctgtcgcagatcgcctggtggaactggccgccggaaaccatctgggagcgcctgccggagtttcagtccggcgatgtcgaagcgttctgcgcgcggtggcgaacttgagctagctccgcaagcccggtgcttcctgaccggtgcgcgcgacgtattcggtgtagccgccgccatattggtggatgccgtccggcgtcagctccagcacgcggttggagagcgcggcgaggaaatgccggtcgtgcgagacgaacagcatcgtgccctcgaactctgcgagcgcattgatcagcatctccttggtggcgagatcgagatggttggtcggctcgtccagcaccaggaagttcggcggatcgaacagcatcttggccatcaccaggcgtgccttctcgccgccggagagcacgcggcacttcttctcgacatcgtcgccggagaagccgaagcagccggcgagcgcgcgcaacgagccttggcctgcctgcggaaacgcgtcctccagcgattgaaacacggtgcgctcgccatcgagcagatccatcgcatgctgggcgaaatagcccatcttgacgctgccgccgatcgcgaccgcgccgtcgtccggctcggttgagccggcgaccagcttcagcagcgtcgacttgccggcgccattgatgcccatcacgcaccagcgctccttgcggcggatcatgaagtcgagcccgtcatagatccgcttgctgccataggccttgtgaacgttcttgaggctgacgacgtcctcgcccgagcgcggcgccggctggaattcgaacgccacggtctggcgccgccgcggcggctcgacccgttcgatcttgtcgagcttcttgacccggctctgcacttgagccgcgtgggaggcgcgcgccttgaagcgctcgatgaacttgatctccttggcgagcatcgcctgctgccgctcgaactgtgcctgctgctgcttgtcggaaagcgcgcgctgctgctcgtagaactcgtaattgccggaataggtggtgagctggccggcgtcgatctcgaccaccttgttgatgatgcggttgatgaactcgcggtcgtgcgaggtcatcagcagcgcgccttcatagcccttcagaaactgctcgagccagatcaggctttccaaatcaaggtggttgctcggctcgtcgagcagcatgacgtctggtcgcatcagcagaatacgcgcaagcgcgacgcgcatcttccagccgccggagagttttccgacgtcgccgtccatcatctcctggctgaagccgaggccagacagcgcctcgcgcgcacggccgtcgagcgcatagccgtcgagctcctcgaactgatgctgcacctcgccatagcgcgcgatgatgtcgtccatctcgtcggccttgtcggggtcggccatcgcggcctcgagttcccggagctcggccgcgacctcgctgaccggccccgccccgtccatcacctcggcgaccgcgctgcgaccactcatttcgccgacatcctggctgaaatagccgatcgagatgccgcgatcgagcgagacctgaccttcatcagggatttcccggcccgagatcatccggaacagcgtggtcttgccggcgccgttcgggccgacaaggccgatcttctcgcccttctggagcgccgcggaggcttcgatgaagaggatctggtggccgacttgcttggagacgttatcgaggcggatcattcgaatactggagaattgagggtttccggcctcttattcgatctgggacgtgggtggaagcccattcccgtgggttttgcgccgtgctgcatgcatgccacgatcatggccgatggaatatgacatgacatccttcggtgatcgggtctggggcatcacatgcaagtctggtttctctatctcctcgcactcggcgccggcatcagcgtggccacgcagcaggtcctgaacggcaatttgcggtccgccctcaactcccccgcctgggccgggctgatcagctatctcggcgggctcctgaccatggcggtcgtgctggtcgcgacgcgggagccggtgccatcatggaaactggtgacggccgtgccctggtgggcctggagcggcggcatcctcggcggcgtgttcatcctgttgatgatcctgctgctgccctcgctcggtgccgcaacgttgctggcgctggtggtcgcgggccagatgatcgcaggcatcgcgatggaccatttcggcgtgttcggtctggcgcagcatccggtatcgatttcacggctggccggcatcgccctgatcatcggcggcgtgcttctgatcaaggattgaggcgatcgacgagcccgtcgacgcgaatgattccctgaatgagaaagcttcgctgaatccggcatcgcgtgacgtgatgacgcaaccacccgcgtcatatcgaagtgtggacacccgccgattcgtcacttagctgtaggcacccgctcgcgttgtgctgcgttgcgcgggatctacaccccctgttcaccactctccagttcattgcgtccaagcatttgcgcattccgctaatgttcgcgcggccgcgacgttggcccgaggcctcgaggtgcatcacatgatcaatcgctttcgcttggccgctgcgctggcgctgctgctcggcagcggtggcgctgcgccggcacagtcgatgcccgactacatggcgccgatctcgggcaaaacgacgtcaacgccggccgatgtcgcgaccaaggacgtgctcgcgctcaacaccggcatgttcgagctctatggcgatgcggcgcggatcttccagaagaacatcctctacaagcacccggtgatcctcggcctgttctccggcgccggcggccgcctgatcctgtaccggccgggcaagccgccgaccgaggcgccgcaggtgccggtcgtctatcagctgctcaagtcggtcggccacagcacgatggcgctggccgaggtggtcggcccctatgtcgacaatcctgacgacaaatcgtggcgcgggtcgatgctggcctatcgcagccggatgcagtcggcgctcgacgggctcgatgcgacgccgatgcaggcggactggcgggacaacaaccgcgctatcctcaccaacaacatcgccttcatggacgaatgcctcgccgccggcgccatccccttcgtgaagctcgaggccttcggcaagaagcaagcgccgctgctcgccaggaacgtcgcctgggcggcgcagacccaggtcgcgcactggatgaccgtgatggccgactggaaaacccagctcggcgccgactgggacaagacctatgccgccagcaacacgatctatgtggcgcggcagaacaatgtgatcttcagcgtgctggcgcagttcttcgggcctgacgccatcaacagccgcctgatgctgatcgagaccatctccttcaccacgacgccctcggacatgctggaatcgctgacccggatcatcgccgaccgctcggtgggcgcgctgttcttcggcagctatcacttgatggactatgagttgatgggcggcgacgcgcgcgaggcgatcatcgccgagaccaggaagcgcggcatgacggccttcctgccgccgctggtgccgttcggttccaaacaatggccgaccctgatcacgccgggccctggaccggcaacgatcgccgacctcaagtgaagctacgacctattccggcattgccgttgcactcgctttgccgcaatactttcacgtgtatttcaaatattgttaaaccccggcgcgatacgccgtcgaggtgtcgatgaaagatcggaccatgcggccctcgcgacgcgaattcgtgaagtggttgtcggcaggcggcatctcggtcagcctgtcgcatctggcgctggcgaaggagccggcattcgggagccgcgagacgcttccggggcgcggccatttcaatccagcggcgaaaggcgccggccgcgtcgacggtgtggccaaggtcaccggcgcaaagctttacgcttccgactttcgtgccgccgacctgccgggctggcctgcgacgacctcgcacgccatcctggtccgcgccaatgacgcaacgcatgtctatgccggcatggacctcgcccgcctcgacggtccggcgaaaccctcgatgatcgtgacggcggccgacctcgaccggatcggcacgcgggtgccggagttctacaccggcgacctgttctgtcccgtcggtaagaccccgctctacctcggacaaccggtcgcgttgttgatcttcgagcagttcgacgcctacgatcgcgcgcggctcgcgctgcgcgacgtcggcttcgtcaagttcggcgacgagaccgggccggtgatcctgccggattacggcgcgtatcgcttcacgcgcgtcgccggcgcgacatcagatgcgcccgacgtctattcgccgatccaggcgggttgggtgtcgccgagccggatccagaacgcggcgctgccggtctggctgccgctcgccaaggagaccaaggccgactacgccaaggctgcgacccatggcgagcagatccgcgcccagcttgccaaggatgatccctcgcaactcgtgctcgaccgcgagttcgagacccagtcggtcgatccgatgttcctcgaaccggagagcgggctcgcctggtacagcgacaacaacggccaactcgaactggtgctcggcgtgcagtcgccctatgaggcgaccgagtcgatcgccttcatgctcggcaaggcccgtgcgccgttacggcccgcgcacatcaacgcccagttcgcccatgtcggcggcggcttcggcggccgcgaccacaccccgttcgtgctctacgtggcgctggcggcaatgttcttcccgggacggccggtgcggctggcgcacgaccgctaccagcagttccagggcggcatcaaacgccacccgatcaagatgcgctcgcggatcgggatcgatcgcaagagcggcaagatcacggcattcgccgccgatcatgtgctcgacggcggcgggcttgccaacttctccgccaatgtcgccaccgtcgctgcgaccgcggcgatcggcatctacgacatcccgaaggtcgacgtcaccactgtggcggtgcattcgcgcggcgtcaccgccggttcgatgcgcggctacggcacgctgcagaccatgaccgcgctggaagtgctgatcgacgaggcggcgagcgagctcaaggtcgatccgatcgcgttccgccgcaacaacgcgctgaagcagaacggccggaccatgaccggcaatccctacatcgtctcggtgcgcacgcctgagatcctcgacaagctcgagaagcatccggtctggcagcagcgcgctgacttcaagcagaaggcgccggaggggcggctggtcggcaccggcctcgcttgcgtcaccaaggattacggagccggcgcggattgctcgctcggccgcgtcgagatcgatcaggagggacggatcgcgatccactgcgatcacgttgagatgggcaacggcatcggcaccgcgctcgccaaccgggtcgcgggccatctcggcactgtggccgacgaggtcgcggtctcccgggtcgacagctacgacgcgctcgggctcgtcacctcgggcgatccctacacgatggatcagaagacccaggatctcgccgagaagaacccgtgctgggtgcctgcgatcagctcggcgaccagcgcatcgatcggtgcccatgtcggcacgcattcggcggccgaggcggcgcgcgtcatcttccgcttcggcctgtggccggcggcgctcgagctctggcacatcgccaaggccgatccgcgcgcccggcaatgggacagagcacgctggcaggacggccagctcgtgctcgacgatctcgcgccgctgcccttgtccaagcttgccgcgaccgcgcatgcgcgcggcttcgtcaccggcgcaatcgcgcacagcttttcgcgctgggcctggtcgcgcgcgcgcttcccgctgttcggcgagcaggttcgtgccgagatcgatgcgctggcgatccgccgcggtagcggcaagttcgaaaggatcgatcgcgtcagcgtcaagtttccaccgaccgacaacaaccggatcggcaccgcctacacctcgatgtgcggcacgctggtccgcgtcgagatcgagcgcgcgaccggtatcctgcgtatcgccaaggcctacagcgtgttcgaatgcggccaggcgctggtgcctgaagtggtgctcggccagtcccatggcggcttcgccatgggcgtcggctacgcgctgctggaaaccctgccaccattcgaaggcggtcccggcaacgggcagtggaatctcggccagtacctgattgcgcgcggctccgacctgccgctgcacgacctcgagatcgagatgctgccgcagctgacgccggacgaaccgcccaagggcatggccgaagtggtgatgatcccaatcgtgccggcgctgctcaacgccatcaacgatgccaccggccaccgcttccgctcgttgccggtgacctcgagcctgctcaagggagcgcttgcgtgacgacgctcagcctcaccatcaacggccagaagcatggtccgatcgagatccgcgacgacctctcgatgaacgatttcctgcgcgagatgctcgggttgaccggcaccaaattcggctgtggcgccgcgcagtgcctgagctgcgccgtcatcatcgataaccctgacggcaccagctacaccacgccgacttgcgtggtgccggcggcgaatttcgacggcaaggcgatccgcacggtcgaaggccatgccaaggacggcgagctctccgcattgcagcgcgcgttcatcgaccacttcgcgttccagtgcggttactgcacggcgggtttcctcaacgagggccaggtgctgctcgagcggcttgcgaagacgccggtagcgcgggaccaacttgagaccgtcatcgcggatgcgctcgacggccatctgtgccgctgcaccggctacatcaaatatcaccaggcggtgcgcgacgtgatcctcgccgattccaaccgctatctgaccgccaacaagtgagcccgcgatgacatcggaaacgcggtttcggatcattgcggtgctgacggctctcgcgaccagcctgtgcgccggctacgcagcgtcggagagcgcaagccacgccctcgcctcgccggaaggctttgccgggatcgagaatgtcgagcagcgctccgctgcgatcttcaccgagctccgcaaggtcctgacccatccgcgctgcacaaattgccatcctgccggtgacagcccgcggcagggcgacatcagccgcatccaccagccgccggtcacgcgcggcgccgatggtcacggcaccagcgcaatgcgctgctcgatctgccatcagcacgccaatttcgatcccggccgcgtaccgggtcacccggaatggcacctcgcgccgcgcgagatggcatgggccggcaagaccgtcggtgagatctgcgcgcagctccgcgaccccgcacgcaacggcggccgcaaggtcgaggacctgatcgagcatatcggcaaggacacgctggtgggttgggcctggcatcccggcttcggccgctcgccggcgcccggcacgcaggcgcaggccggcgcgctggtcgaggcctgggtgaagaccggtgcggcctgcccggcgccatgacaacgccaccggctagtggcgcttgaagtactgcacgtcacgctcgtgcttctgtgccgcggcgcgtgacttgaaggtgccgagattgcggcgcttgccggtcttcggattgaccttgcgggaatacagccggtactcgccggaagtcagcttgcggatcatgacgtcgcctcgccaatgcctgtcacgggccaacgatacgcgagaacgagcgttcctgattgatcagaagcaaagattggtcacggcattgccgcgcttgtccttgatcacgtagggacagcgtgcccgctccagtgccttcttggcttcctcatcgccgagcgcggcggcgcgctcgtaataggccttggcggcatcgctgtccttcggcccgccgcggccggcctgcgcgaaggcacccatccgttccagtgcgcccggatggttctgcgcggcggccttctcgaacaatgcccgcgcgccggcatcgtcctgcgcgccgcccttgccctccgccagcatcaggccgagctggtattgcgcctcggcattggtctcggcggatttcgcgagcagttcgcgcgcacgtgccgggtcggatgccgtgctgccgccgagcgccgcgagattgctgacaccgcgcgcgttgccggcctgcgccgcgcgctcgaacagtttgcgcgcctgcgcctcgtccttggcgacgccggtgccgttgccgtagagcacaccgagctcgaccatcgccgacgtcgagcccttgtcggcggccttgcgccaggcgcttgctgcctccagcgtctgcttgttggcggcataggcgcggccgagttcatacatcgcgcggcgcgaggactttgccgccaccgcgcagtacctgatcgcggtcgcaatatcggccggcgcgacgtcaggcacgcctttcacgtcggccggcttgtcgggatcggtgggatcggcggcgagccggtcgcacagcacaaggtcggccgactgcgcatggacaaatgccggcgctgccagcgctgcaacaacgaaaatggtttggaggggtctgaacatggacatcaggttgcgtcgcggtgcaggcaaattcaaggctcgagcccggtctcgcgcagcaccggcgcgacctcgggtgccgacagatagtgtagcagatgctcggcggcctccgcgcaccgcgtggcggccatgcggcctgccgagaacactgccggggtctgcaaatccagcggaattggcccgacgacctcgacgccatcgacctgcttcaactcgctgatctgctggatcgcaagctcggcttcgccgctgacgagcttctccgcggtgaagcccatcggaatgattaccgcgcgcgcattgatcgccccggcgatgccgagacgcgcgatcagctgcgcgaacaggatgccgctggcaccgagccgcgaataggccaccgcgcgcgcgccgagcagcgccgtacgaagcgcggcttcggtcgcgatgtcgggatgcggagctccagccttcaccgcgacgccgacataggagcgcgccaggtcgatcgcgcttgctcgcgcaatgcgcccctcaccgatcatcgcgtcgaggccttcgcgggtcaggatcacgagatcggccacctcgccgccagccaggcgttcgagcagagccaacgtcggcgcgaaatccgcatcgatccgcaccccgctcgccgcctgatacgccgcggcaaggcgcaccagcgcgcccttcagcgccagcgtcgagagcacacgaaccgtgttgtccatttcgcttacgcccgccgcatcagcttgagcgcggcggtcaggcgaagactgcgcttgccggccagcgcagtcgcttcgagcacggcgctttccgcatcgcaggtgccggcgaagccgatgccgacctcatggccgccgaagaccgggttctcgcccatcgccgaggtgtgctcctggttgaggatctggcccttccagcggcccttctcggaggtataggtgccgagatagtagaagaacgcatcgccgccgaggatacggccgtcgttcagcagcatcacgccggtcaggccgccatcgacgccgtcgagcacgtggatgcggatcgagtagagaccattgacgataccaccctcgccgaccccgcctgcgatcgggacttcgtcctcggtgatcggcgtcatcaccgactggaacggcacgccgggcaattccttcagctcgcccttgaaacgatagagctcgccatcgggcgcacccttagcaatgagcgtcgcgtcatcggtgccggccatcgcgcggtagttcggatcggggttgtggcggacggtctggatctcgaccgcgacatcctcaccgtgcttttcgtaggtgccgatatgggcgaaggccgagttgccgccgagcatcttgccgccaccgacatacatcacgctgcggccgacggcgccgcccagctcgaaccggaccttgtaaaacccttcaaacaagcgccgtgtccccggcagccaacatgcaatcgttatctagcttggttcataacgcagcgaaaccgctttcggccgaaggccgcccacaaagacagtcgttaaaatgcaagggtccgccaaggctgttgccctggcggaccccattggggtaccggatggctccatccgggtccgatagcgctaggttgcggccattaagcggcggccttggcgccggtcggaacctcggagatcgtcttcaggatctgcgaagcgatctggtaggggtcgccctgggagttcggacggcggtcttccagatagcccttgtagccgttgttgacgaaggaatgcggcacgcggatcgacgcaccacggtcagccacgccgtagctgaacttgttccacggagcggtctcgtgcttgccggtcagacgcttgtcgttgtccgggccgtagacggcaatgtggtccatcaggttcttgtcgaaggccttcatcaggctctcgaagtactccttgccgccgacttcgcgcatgtacttggtcgagaagttggcgtgcatgcccgagccgttccaatcggtgtcgccgagcggcttgcagtggaattcgatgtcgatgccgtagctctcagtgaggcgcagcatcaaatagcgggccatccacatctggtcagcggcggtcttggagcccttgccgaagatctggaattcccactggcccttcgccacttcggcgttgatgccttcgtggttgatgccggcggcgaggcagagattgagatgctcttcgacgatcttgcgggcgacgctgccgacgttcttgtagccgacgccggtgtagtacgggccctgcggcgccggataaccctcttccgggaagccgagcggacggccgtccttgtagaagaagtactcctgctcgaagccgaaccaggcgccttcgtcatccagaacggtggcgcgcttgttcgagacatgcggcgtcctgccgtccggcatcatgacttcgcacatcaccagcacgccgttctcgcgcgcggcgtcgggatagcaggcaaccggcttcagcacgcagtcagagctgtggccttcagcctgctgggtggacgaaccgtcaaagccccacagcggaagctgttcgagggtcgggaacgacgcgaattccttgatctgcgtcttgccgcgcaggctcggcgtcggcgtatatccgtcgagccagatatactcgagcttgtacttggtcattgaacctctctgttgatgatgcaaatccgtgaggaaccgaaagccagtcggccgccgcacgcgtacccggccaccatcggccggctcttactaagcaattaaaatgccagtcgctgcactgcggcaccgcccagcctgcggatgtccacagcgggcatcgcattttttgctgcgacaaagtagcgcggcaaacatgcgccacggtcagccaaaatcttctctctgtcccctcagccgcccgtttctgcagcaaattcggctacggcatcatccgccgattaatgcggcggcagcgccgtgtgacagttcgtgtccaaccgcccggtgcccggcaaccatcggctcggcccaagcgttggtcagctgcatcctgcctcgcaggaagcaaaccgggatttgcacacgaattggacaaaacctgactatttcttggtcacttgcaccctgccgagcccggaccgatgttgaaagcacggtaaccacacgcgaatgggtcgggcgcaccatggaggctcgcaccggccaaaggagactttgacatgatcaccacgggccaaaatcagggatcggcaacgatctatcaattcccagcagggggccgcgcggctctcggcggacgccgctacggcgaagtgcggatggcgcgcgatcttgccgctgaggtcgagacctcggcatgcagcgagagctggtaccaccaggccgccatcgacgacgccaagccgagccgcgatcactgatgtcgatcaggcagagaggcgtgatacacaaacgtcagacgacagagcagtaagagagggtcggaacgcagcgtttcggcccttttttcatgcctgctcgcaggccgtcaccggccgcttcgcatgccgcagcctggtcaatccggcccggccgatctcgagcgtgacgccaccgcccttgtaacgcgtgccggtcagcgacagccgcttcgtcagcgtcaccgccttgccgtcgacttgcagatgcgcacgcgtgtcaccatcgaagaacgctgtaatgaactgcgtgccgtcggcacaacgataattccggaagtcggactgcgccggcgctgccgaggaaccaaagaccgttgtaagaattgcgccgatgacaacggcatccccgcgataagtcatattctccccccgagaggccggttatagaccttccgcgccgatactcgtgcgccaagacgtcctggatcaagatcttatcaacaggcccgcccgatgtcagaagctcctgcccgtcacctcaatctcgccggcgccagcaattttcgtgacctcggcggctaccagacgcgtgacggccggacagtgcgctggcggcagatcttccgctccaatcatctggcgcatctcaccgagcaggacgtcgccgtggtgcgtggcctcggggtcagaagcgcattcgatttccgcggcgtcgccgagcgcgccgaggcgctgtgcggcatgaatgacgtcaccgtgcattccctgcccgtcgagccgacggtagtggccgcgctgcgtaagatcgctggcaaccgcgagctgtccgaagccgacgcgatcgacgtgatgcgggattcctatcgcggctatgtgcaggacaacacaccgcgctatcgcacgctgtttacccatctgctcgaagaccgcgcgccgctggtgatccactgcacggcgggcaaggatcgcaccggctttgcctgcgcgctgatcctgcacgcgctcggcgtgtccgagcaggtgatcgcggacgactatctcctgaccaaccggttctacaagcgcgatccggctcacagcaccgagctgcccgacgacgtcaagcaggtgctcggcaccgtgcgcgaggcgtttctggaggcttcgttcgaggcgatcgatgccgactatggcagcctcgacggctatttccgcgatggcctcgggctcggcccggccgagcggaaggcgcttgaaggccgctatctgcagacctgatcaggtcgctcgatcagtagacttggctcaggccgccgcggcctcaagctcgagctccgcatcgagatcggcgatcacgtcctcgaaggccgagatggcctgctggatcgccgcgatctgcatcaattcccagctgctcaccggtccggtacgattctgcagcgccacgacgaggtcacgccgctgctccttaagctgaacgagcggtaaaccgtgatccggaagatatcccattgcaaacccctaccttggctgaggttccgcttgtacggaaagggttctgcaaacgacttacagaactgccgcaaattttatcgaacctgtcctccccgtagtcttacgtagtgaagcccgcacgtcaggtttcggcgctctgggtcgccttcaggatcgtgtcgcacagcccgcgggcgagccgctgcgtgcttgcgtcgctctggtgcagttggtccggatcggtcggatcgatcatgcgctcgaacgagatattgttatgcacgtgccaatgccgcatcagcgcccagcggtgaaaaacgctgacacccttgagttctgcctttttcgaaatcagcttcaccatgcattccgagagctccgccttgtcatccttcagcatggccgtgacatattgcggatcaatcagcatgacgtccatcttggtcgacttggcacgcaacagatcgagtcccgcttcgatcttctgggcaacggcttcgatgttgtagtcctgtcggtgaaagaccgcgttggttccaacctgccagatcaccaacgtcggctcgagctcgaaaatgtcctcctgaaagcgatcgaactccttgtcggcctcctcgccgcctcggccgcgattgataacatcgatccgcgcattgccgtgggtcgccggatcgttccgcaaatacatctcgagccaatagggatacggcaggacatccgctctaccggcggtcgacgacgatcccatagcgacgatcttgatcggaccgccgccggcgattgccctagctaggcaaggcaatttgtatttgaaaccgatgacatcggcaggcagatcggcaaacatcaaactatcaaccatttgaaatactcgctcgttggcgccatctcacgttgcatatctcgccgcaaaatggccctgcattgcaaatgaaatccgcctgatcatagtggacaggaacctgttgctgatacggagaccgccatgaacggaaaagccatcgtcatcaccggcgcccttggcgcgcttggcaaagtggtcgccgaagaagccctcgcgcgcggggcgcgcgtcgccggcatcgatcacgccgcctcgcagcttgcggcaaccgccgatcgtatcgagctcggtggcgtcgatctcaccgacaccgtgcatgcgaccgctgcgatcgacaaggcggccgcgcatttcggccggctcgacggactgatcaacatcgccggcggcttcaccttcgaggcggtgagcgacggcgatcccgcgacctggcaacgcatgtatgcgatgaacgtgatgacggcattcaacacctcgcgcgcggcgatcccgcacctcatcaaatccggcgccggacgcatcatcaatatcggcgcgctcggcgccttgcaggccgcctccggcatgggtccctacgccgcctcgaaggccggcgtgcaccgcctcaccgagtcgctcgccgccgagctcaagggcaaggtcacggtcaacgccgtgctgccgtcgatcatcgatactgccgccaatcgcgccgcgatgccgaaggccgatatctccaaatgggtgacgccgaaggaactcgccgaggtgatcctgttcctcgccagcgacgccgcgagtgccgtcaccggcgcgctgctgccggtcaacgggcgggtctagtccgcaaccaagagccgcagcttcgacctgaagcggatgctctgcttgccggcgagcgctatgccttcgccctccgcggtctcatcggtgtaggagccggtaaacccgatggtcaccaccttgcgttcccagatcggacgctcgccataggtcggcgaatgttcctcgttggtgacctcgcccttccacttgccgtcggccgcggtgtagctgccataggcgaagaagaacgagtcgccgccgcgcatctggccgtcgcgcagcaccatgacgccctggttgccgccagagacgccgtcgagaaattcgacggtgatgtgatagagcccgttccggatcatgcgaatggtcgcgccattgtccccggcccgacaatagccgctcggccgcgctctgggcaaattcgatccgccgcaatgggcgcaattccgcgctatgctgcggcaccgagtcgcggccggatgccgcaggagcctgcctgttggaaaccacgctttatccgcccatcaaacgcttcctcgaaaagctcggcttcacggtgaagggcgagatcggcggctgtgacctcgtggcgctgagcggcgatgatccgcccgttgtcgtggttggagagctcaagctcgccttcaatctggaactgatcctgcaggcggtcgatcgcgccggtgctgccgacgagatatggatcgcggccaaggtttcggcccgcggcaagggccgcgagagcgacgcgcggtatcgcaatctgtgccggcggctcggcttcggcatgctcggcgtcaccgaccgcggcgacgtcgaggtgctggtgccgccgccgaccgcgacaccacggcgcaatccgaagaagcgctcgcgcctgatcaccgagcatcgcaagcgcaagggcgatcctgcaatgggcggatcgacgcgtgcgccgatcatgaccgcgtatcggcagcaggcgctggcctgcgcctccgcgatgtcggatggaccgcggcgcgtcaaggacctgcgggccgaatgccctgacgccggcaagatcctgcagcataatgtctacggctggttcgatcgcgccgagcgcggcatctatgtgctgaccgatgccggccgcgccgcgctgaagcgctggccgcagcagccgaatggtacgtcaggggcagaagctgccccgtaactaaccaactgggggagatcatgattgtcgtcaccggcagcgtcaccgcccgccccgactcgttcgacgaggtgaagcgtttgagcctcgagcatgtgcatcgctcacgcaccgaacccggctgcatctcgcacgcagtccatgtcgactgcgagaatccgctcaggctggtgtttttcgagcaatgggccgaccgcgccgcgctggcggcgcatttcgcggtccccgcatcgcgcgatttcgtccgctccctgcaatctctggcagctgcgacgaccaccatcgaactttatgacgctcacaagattgagagactctagctgcatggctgtattgccatcctacattcatattgcaatgcaacattgggcaccttacgtatcttccgcgattcaaggatgaggcggcgatgagcggagactggaacaccaaatacggcactaggcgcgtgcggcacgatccgccgacgctggaagaggcaatcttcgccgccatcggtatcaccgacgacgtggaggcccaggccgagatcgcatcgtccctgatgggcctgccctatgacgaggtgctggccgaggtgaagaagaccgcgcgtgtcagcgcccgcaccggcaccgcaacccgcgtgatcgccggcgaacagggcgcccagcgctccgtcgtggtcgagcgccgcgtggtccgccgcttcgcgatcgacaaacgcaccggcacctgaaaagcaacatccgttggttcaaagaaaaagggcaatccgctgagcggattgccctttttgtatttgatctgagtttttgagctcaggcggcccggccccagccggacatctgcatcaccattcgccaataggcccggttcatgtcgacgagcgcgcacgcggccgcgacagctgtcaccggggcgatcgtcggcgcaggcacgggttggtgttgctcggtcaggtcgatgctgccggtcgactcgccgtggcggaacgtcagctgcgcaccgaacttggtggcaagcgcgcgcatcgcgtcgttctgcgcgccggtggtgatgcgcaggcttgtgtagcccttggcatgcgcctcggcgatcagcttgcggaacagcgtgctgccgacgcccttgcgccgcaccgaccgctcgacgctgaaggcgatctcgggctgcgcgtcgggcgactgctccggcggatgcagctcggccgcaccgcgaaccacgccatcctcgaaataggcgatgatgaccgtgccgtcgttggcgcagcgctcggcatagcggcggatgaaactgtcgtcgatgaagccatgaaaacgatcatgacggctggttcgatccagtctcagcagatgatcgcgcagcagaggaagctcctcctgctggctcaacgtccgcacggtgcctcgggcagatgtcgaactgatggaatcgtggttcacttcataactcctcttggtagccctcgaggaggcgtcgactccctaacccgtcctatattgtgcgccgcaccatataattcaagtgtctagattcatttaaataaacagtgatgtgatcagaaaatcacatcattgccacatcataataccagctgcgtctgggtaacgaccgcaaccagtttcccatcctcggtttccagcctggtctgccagacctgggtccggcggccccggtgaaccggcgtcgccgtggcgatcacagtgctcccctccttggcgccgccgatgaagttggtcttgctctccagcgtcgtggtgcctttggcgtcctcaggcaggttgatcacggtggcggccgcgccgaccgagtcggcaaaggccatcactgcgccgccgtggatcgtgttccgcagggtacagaggtctggccgcaccaccatccgcgcgaccacgcgatcctggctggcctcggtgaagatgacgcccttcagttccgcgaacggcatcttcatcgactggatcttttcgagcggcgtcatgggcactccctgctttgtagccttcgtaccggcatgatggatggaccggccgggcgcggcaatgacgtccgaggtaatggcgaccatgacgttatgccgtcggtgacaacgggccgccaagcctgcataccgtcgtcgatgcgcgacttccctccccgccggatcgtctgcttgaccgaagagacggtcgaaacgctgtatttgctcggcgagcaggaccgcatcgtcggggtctcaggctacgcggtgcgcccgccgcaggtccgccgcgagaagccgcgggtgtcggcattcatctccgccgacataccgaagatcctggcgctcgaccccgatctggtgctcgccttctccgacctgcaggccgacatcgtcgccgatctcgtgcgcgccggtgtcgccgttcatgtcttcaatcagcgcgacgtcgccggcatcctcgcaatgatccgcagcctcggtgcgatggtaggcgcggccgatcgcggcgagcggctcgcgcaaggcctcgaacaacggctggccaagattgcggcaacgccacgtccgacgccgcggccaaaagtctatttcgaggaatgggacgagccgctgatcagcggcatcggctgggtgtccgaactgatcgagatcgccggcggcgaggacgctctgccgcacctgcgtgcgcacaaggccgccagggatcgcatcgtctcggcagatgccgtgcgcgcagcgatgcccgacgtgatcctggcatcctggtgcggcaagaaggtcgtggtcgaccgcatcagggcccgtggcggctggagcgacattccggccgtccgcaacgatcgcatcgtcgagatcaagtcgccgatcattttgcagcccggccccgccgcgctgaccgatgggctcgatgcgatcgtcaatgcgttgtggtcgcggcacccatgattactcgcctcaatcagtataaggctttgggatagcgctcgttgctcacgtcaccgcattcacgacctgatattcttgccggcgccacacctcgccattgatcacttcctcaatgatctcggcggccttcagcacctccgcttcgccgatatagagcggtgtgatcccgaaccgcatgatatcaggcgcccggaagtcaccgatcacgccgcgggcaatcagcgcctgcatggcggcatatccgccggcgaaggcgaaggaaacctgcgacccacgctgcgcatgcgccggcggcgttaccagcctcagcgacggacagcgtcgcgcgatctcagctatcaacaggtcgcctagcgcgagcgagcgagcgcggacttcgcccatatcgacacgatcccagatgtcgagcgatgcctccagcgcggccatcgccagcaccggcggtgtgccgacacgcatgcgctcgacgccatcagcaggttgataaccaagatcgaaggcgaacggctttgcgtgccccatccagcccgacaacgcggcgcgcgcttgatcggcatgcttcggcgcgacgtaaaggaaggccggcgcgccgggtccagcgttgagatatttgtaggtgcagccggctgcgaaatcggcgccgacgccggcgaggtcgaccggcagcgcgccggccgaatgggccagatcccagaccgtgacgatgccgagcgcatgcgccttcgccgtcagggtccgcatatcgtggcgacggccggtgcggtagtcgacctcagtcaaatagagcaccgcaacctcgtccgacagcgatggctcgacctcctccggggccaccagccgcaattgatggccgcgcccgagcgtggcgatcaggccttccgccatatagagatcggtcgggaaattacccgtgtcggacagaacgaccttgcgctcccggttcatctcgagtgcggccgcaagcgcctgatagaccttgagcgacagcgtgtcgccaatcatcaccgtaccggacgcggcgccgatcaggcgagcgatgcggtcgcccacgcggcgcggctgcacataccagccggcactgttccaggcgcgaatgagctcatcgccccactcggccgtgatgacatgcgcaacgcgttcggcaacgcccagtggcagcgcaccaagcgagttgccgtcaagatagatgacgtcagcaggcagatggaacatcgccttggtgtcgtcgtagacgcgcagctgcgatttcgcttcgatcatgacaattcgcctagaggacggtgcggacacgccacagttcgggaaacagctcgacctcgagcatccgcttgagatagctgaccccgccagtaccgccggtgccgcgcttgaagccgatgacacgctccaccgtcgtcacgtgattgaagcgccagcggcgaaaataatcctcgaagtcgaccagtttctcggcgagctcgtagagcgtccaattggcctccggagcttcgtagacgcggcgccaggcttgcatcacgccctggtcgaagtgatgggtctcgtggacgtcgcgtgacaggacggtcgcgggcatggtgagccccttgcggtcggcaagccggagcacctcgtcataaagactcggcgtcgcaagctcggtcttgagcaaagccgtcacctcggagtcatgcgcatgcggcttcaacatcgcgccgttgcgattgccgagcagatactcgatcagccggtattgatacgactggaggcccgaggattgtcccagccgcgagcggaaatgggtatattcgctgggcgtcatggtccgcagcacgtcccaggcattgttcaactgctcgaagatgcgggagacacgcgcgagcatcttcatcgccggtgacacttcttcgcgggcgatggcgtggcgggcggcccggagctcgtggatggcgagccgcatccacaattcggaggtttgatgctggatgatgaagagcatctcgtcatgcgcgtcggaaatcgggtgctgggcgccgagcagcgcatcgagttgcagatagtcgctatacgacattttccgggcgaaatcggtctcggcgccctcgaccgcgggatcgtagtcgttgctgctcatgacacatcctctcgatcgatctccgcctcaagcaaggcccagaaggcacctcgtgatggcagaggatggatccttcagcccatcgacaacagtaaaatggttatgcccggggtcgacgacgagatgcgtgggcacgtcgaatccggtccagatgttagccatcagctcagcctgacggatgaactcgggtcgctcgcttctgccgacccaggtggtcagcggcgacttgcctcgtggcagatgcaaagcggcgctttcgagcgccgcctcgcccatgttcatccgcagcgtcccgttcattgccgtcttcaggagcggtcgcaggtcgtgcagaccgctgatcgacagcgtcgccacgatcctgtcgtagacctcaggttcgagacggctatcgtcgcacagcatgcgcgtaacgagatggccgcctgcggaatgaccgaccaatcgaataggcccggagacttgggcagcagccgaagcgatcgcgcccgcgatctcggccgtgatgtccgagatgcgcgcggccggtgccagcgtgtagctcggcagcgccaccgtccagccgtggcttcgcgcaccctcggcgaggtcggtccatgacgatttgtcgaagcgcatccagtaaccgccatgcacgaagacgacgagacctttgctgtcgccgtccggcaggatcaggtcgagacgctgccgctctcccgatccataggcaatatccgccttgaatgatttaagtccggcacgataggccgcagcccgctccgcccaccgcgccggcagcgcatccgaccccggcacgtgggccgaattggcgtaggcatcatcccaatcgcgcatcgtggctcctcggagactcgccgtcgatcaggcgccattttgccaccggcgcggctgttcgcccagcctttattttaaacctaaagcatctggttgacccgcgcccgatccctccccggcaaacggagcgatagcgcggcgggcccgcaatgcagaaaggctacgccttctccaccccgcaccactccgtgatgaacagcgccatggccttggtcgcttgccgcagcgagtccagctcgacatactcgttgaacccgtgcatcgccgcgccgctggcgccgaagcagaggctcgggatgtcgtagttcaggccgtagaaccgtgtgtcggtcagcgcggtgaaggcgcgatcctccaccgccccgccatagaccgcctggtgcgccctggcgaatgcggcttccggcgcctcggaattcaccagctcgtagccctccgacaggaagcccgaccattcgacctgcggcggattgttggaaaggaagcggtggtcgcgcgccgccgccgacacgcaggccagaatctccttctggcactcggtgatcgaccagcccggcagcaccgcaatgcggcagtcgacgtcgcaccaggccggcacgctggaggcccagtcgccgcccttgatgatgccggggttgaagttgatcggatgattgacgtccttgaaatgcttgtcggccttggcgcgctcgttccaggcgatctcgagcttctccagcgcgtgcaccaggtgatacgccgccatgatcgcgttcgatccggcaccggcctcgaacacatgcaccgggaagccacgcaccttcaggcggaaccagatcacgccgacctgcgagcggatcatcttgccgttggtcggctccgggatgaagcaggcatcggcgcgatagccgcgctgcaaggtcgagagcgcgccgacgccggtgctctcctcctcgatcacggactggaaatgaatccgcgcggtcggcttcaatccggccttcttgatcgcatccagcgcatagagcgcggcgatggtgccggacttcatgtcgcaggcaccgcggccgtacatcctgccgtccttgatgacgggcgagaacggcggcgtctcccacatctccaatggaccggtcggcacaacgtcgcagtgcccctgcaggatcagcgatttgccggcattggtcgcggggcggtaggtgccgaccaccgtgcgcgccttcgagaaatcatgctcgatcgggccgaatccgcgcagatctctgagatcgtcgagattgatgtgccagtcgtcgacctcgtagccgcgctcgcgcagcaaatcgccgatcatgtcctggcacggcccctcggcgccgcgggtcgaggggatcgcgacgaaggcctgcgtcgtcgcaagctgcgcatcgaatccctcgtcaacggcggcaaggattcgttgttgcgtctcggcagtcatgcggcagctccatggggggacatcagacaaggtgggagccgcagcgtaacctgctttcacccggccgggtattgcgcaaaataggcatcccgcaatgcatcttcgagcagacggccttcggaatagccatcgagcgtcttcggccgcgtcacgccgtcgagcagccgcggacacggctcgggcgcaccgagcacggtgcgcaccggaatccgctcggcatagatcggcagttcgtaatcctcgtcgtcgtcggcgacgcccttggcgcgtaccttggccgaggcctcctcgatctccatcgcgatgaacgaggtcgccttgatctcttgcttgttgctggcgcgcaggcccgcggtgcggtcgggaaagaagcgatcgaccatcgcgacgaccgcccgctccttctcctcgggatcggtgacgagataggccgacccgaacgccatcaccgcgcgatagtcggccgagtgattgaaaccgcagcgcgccagcaccaggctgtcgagatgggcaaccgtcaggcacacgcgctggccctcggactggttctccagcatgcggctcgcgctcgagccgtgccaatagagtttggtgccctcgcgccagaagaaggtcggcgtgcaatagggctggccgtcgatcacgtaggagacgtggcacagcatcgaagcgtccaggatcctgtgcacggtggcatgatcgtagaagccgcggtcatggcgacgcttgacccggttgcgggacgacgttgggtaggacgacttgggataggacggagtggatgcgccttcggtcacggctcgcctcattgaaatctggaatctgtccagagttgtagctgttcatttggtctgcgatagtgccaattccatgcgaaaaattccgaccaattcccgagaaccagcggcgcgcaagccggagctgccgctcgacctcaccggcccgcatgtgacgccgggcgcggcctcgcagcagcggctctatcaggctctgtgccacaccatcgtcggcggcctggtcaagccgggcgagccgctgccgccgtcgcgcatgctggccaaacaaaccggctttcgccgcaacgccgtcaccacggcctatgagcgcctgatcgccgacggctttgcggtggcgaccactggctccggtacgttcgtcgcgccgcggattccggcgcgggccggtgcagagcgacgcaccaagatcgagatcgagccgccgcagcacaatgcgctctcgctcggctgcacccatatcgacgagcgcgcgctgcagcgcttccgcgcctttgccggccgcaggctacgcgccttcgggtccgagcatctgcactacggcgatccccgcggcagcagcgagttgcgcgccgcgatatcggatcatctgctgtcggcgcgcgggctgcgctgcgaccccgaccagatcatgctggcctcgggcacgctgcacgcgctgcgcatcgtgctcggggccatcctcaagcctggcgacaaggtctggtgcgaagaccccggctatccggcggcgcggcgcgcgatcgagcattgcggctatcggccggtctcggtgtcggtcgatggcgccggcatgcgcatcgacaaggggcgcatctccgggccgcaggcgcgcgccgcctatgtcacgccgtcgcaccagtttccgctcggtgtgcagatgtcgatgccgcgccggctcgaactgctcgactgggccagggacgccggcgccttcgtgttcgaggacgactacgacagcgagttccgctatgacggcgcgccgctgctctcgcttgccggcatcgatcatctgcgccgtgtgatctacatgggcacgtttgccaagacgctgtttccgggattgcggatcggttactgcgccctgcccgaggccttgatcggtccggtgacggcggcgcgcgccgcgctcgaccgctttcccggcacgttgatggaaggcgcggttgccgacatgctgaactccggtgccttcgctgccaatctgcgcaagtcgcgaaagctctatcgcgaggcgcgcgacgtcctggccgcgacacttaccgacgcatcggagggtgagctcacggttcccgtgccgtcacagggcctgcatctcgtggcgcggctcgatcccgcaaccgacccgctggttgctgcgcaggcaaaggcagccgcaggcgtcggcggctggctgctcgccgagacctatcgtcgcgcgcggccactgcctggcttcgtgctgggattctccggtcatccggttccgcaactcgtcgcggcggcggaacaactggcgaagacaacgctgacagcgctgcgcgcgacgcgcaagcaatccacgaaggcgcgaggtcccaaagcgcgatgagattggattgaatcgtcatggcgctttagctcgttgtttgagcatggtcttttcggaaaaccgcttcgcacttttccggatcatgctctaggagaatcggagccgcctgactatggtcgccgctcgttcagtcagtgtccgcccaaggagataccggatgcccaatcgcaacgtcctgtatctcgtgatcggcgcgctggtcgtgatcgcaggcatgctcggttacaatctttatcaggcgaagaagcaacccgaaggcttgcagatcaatgtcggccccgacgggctcaagatccagaacaagtgaaggagacagcgatgctgcgcatgaggctggtcgcgctggtcggcgccgtcgcacttggtgcgatcgctcactccgcctctgcgcagcaggccttgatgcgcgagggcgacatcgtcgacctgagggtcggtcagcgggtcctcgtcgatgatggttcgtgcccggccgggcagatcaagcaggtcatcggctccaggctgagcgagaccggtgtggttcggaccctcacctgcgtgccgcggctcgccaaaaagtaaaacgcctcgctgtcgggaggcgcttccttcatcccaacatcgaaacgctactcagttcgagatcggctcgaacatgcattgcagggtcggcttggcgatcttggtgaacgtcgggccgatttcgctttgcttggagggcggcacccaatcggtctcgatggtcggcacgccggtctcgctgattccgcgcaacagcgcctggcgcagatcgggatcgtccaccgtcgcagccgcgtggtcatgcaggcaaccgcagacggcttccggatgcgcccagcggccgagcatatgcggcgcgcactggcgcacgaattcgtcgcgcggctcaggcacccggtacagcgaccggatctgcatcgattcgagcggaagttgggattgggcctgcgcggaacccgccaaaacgccggtcaaggcgaacgatgcgaacatcgcggcggaacaaattcggagcaacatgggaagcctttaccggcgtttctgttttgcgcgtcgcgatcagttggcctgcgccaccaccatcggggccgaggtgacgaccggcgagccgttataggagaaggtgccgatgccgggcaaaccgttgtcgggggtcccggccatcgacgaaccggccatcacgaaggcgaaggcgaggataaggctcatggtccgcatctgacagtctccgtcattcgggtcggcgcctggcgccgttgtgttgacggattgataacgatctgccgtttcgggagttctgcggaacaagccgaaaatggtttcgtcggaatgagaattgtttcgtcggccgatgctcgacgaaacattcggcggaaaatcccaatgctttcaatggtggcgctcgataaagcagcctgatcaagatttcgagcggtcaaccgacccggctgtcggtggttcgattatgcctgcgaattgagtgggctaccgcgctttcttaactttcctctgctgagacaggaagcagcgcagaagggcggcgtgaaccagcggacggttcggtcgactcatctgggcaccgtgcaaccatctccgcggtggcacgttgtcatgatcgtgatccaacgatccaatccaacgagggatgtcagtcgtgggcaatggcaacatcggtgttggcaatgaatccgtggccggcaagtccggccagcggcagcagatgaccgccgcgatgccgcagcagggtgctcatgtgatgggcgacaatgagtgcgcgccgcagaagctggtccgcctcgtcggctgccgcgactcaaagctcaagccgggcttcagcatgcgcgcgaaccagttcgggcaaaccaagcgctagctcgccagttgcttgaaccacccgggccaagcccctgcttctgctactgaatgaactcgccgcacttctgcacggcggcatcggtcgcgccccatggcatgatcggcaccgatgacgtggagttcttcggcgagccctcgatcagcttgtccgaatagaccatgtaaaccagcacattgcgcttggcgtcgcagccgcgcacgatctgcatcttcttgaagaacagcgaccgtcgctgccggaacatgtcgtcgccctggccgagcttgttcttgaagcggatcggcccgatctgccggcaagccagcgagatatcggagacttcttcggcgaggccgagccagcccttgaagccgcccttctccggcaccgtaaagtgacaggcgacgccgtcgacttcggggtcgtcgacgccataggtcgcgagcttgtcgttggggctcacccatttgaacaccgtcgagcggcggaagatcaggtccggttcgtcggctgcgatcgcgggaactgcctgccccagggtcaccaacgaggtcagcaacaccagcagcgccgcacagccccgtcgagacatccgacgcacgtcacacaagctcacagttctcgatgtcatagaggtctccgcgggtgggtctcgcctatgtagtgcgcaaacgccgcacaggaaggcgctgacagttcggtgatcagaccgggcgctttaacctcttgtgaggcttttttgctactctttcgtcgaaaattcgccgctcacggaagggttagatcgcttgcgctggtgaacgcattccgcgtctgcgacaaccaaggaatagtttggactgggattcggaatatgcgcgcaagcggacatcggatttctatttttgattctgcgaatgggcggttctggcagtttgcaattctgacggcggcgggcaccattgccgcctcctcgcaagccgatgcagcgctgttctactggaaccgtgactccgcctattacggcgatgtcgagccgatgccgcagccggttcggccaaagccgaagcgcaacccggccaagaagactccggcgatcgagaaggaggccggcagcaagccgcagggtcccctgatcatctcggtctcgatcgaccaccagcgggtcagcgtctacgacgccaacggcctctacgccgagagcccggtgtcgacaggcatgaagggacactcgaccccgatgggtgtcttcagcgtcatccagaagcagaagtaccaccagtccaacatctacagcggcgcgccgatgccgtacatgcagcgcatcacctggtcggggatcgccatgcacgccggtgtactgcccggctatccggcctcccatggctgcatccgcatgccgatgtcgttcgcggtcaagatgtacaattggacgcggatgggcgcccgcgtgttcgtgacgcccggcacgatctcgccggagaatttctcgcacccgttgctggtgacgcagaaggtcgcgccgcagcagccggtggcggacgagattctgaagatggatgcgccgctcggcgtcaagagcgacaagggcgcggacaagccgcagaccggtctcgatttgcgcagcagcgtcggccatgccgccgccgcgtcgctgcgcgacaatacccacaccgccgacgccagcggcgcgatgccggcggcgagcgcgtcggtgacgatgtccgacgcgtcggccgcggcgagcgatcccatcgcggagaagctggcagcggacccgtcgcagccgacgaagcccgcgactgcgacagccgacaagccggcagagaccaattccgccggcaacggcagcgttgccgccgacgacaagacggtcggcgaaaccaccggcagcaccgacactccaaagaccgaggtctcggcgaacgacccggcgaaggccgaagccaaggccgacgagccgaagccggatgctgcgaagcctgatgtcgccgcggcgcccaacagcgaagcttccaaggccggcgcgaccaagagcgccgacaagcccgccgaggccgcaaccgcggccgatgcgcccgacgccaacaaggatatcgccaaggatccggccaaggatccggccaaggatccggcacggttgcccggcatcgccaagatcgacgtgtcgaagcgcgccggccagatcgcggtgttcatcagccgcaaggattccaagctctatgtgcggcagaactttgcgccgctgttcgaggtgccggtgacgatcgcggccagcgatcggccgctcggcacccatgtgttcaccgcggaagccgacaaatcagatgccaacctgctgcgctggtcggtggtgacgctgccggcccgcaacgccgcccgcatcgacgtcgaggagcgcgcctcgcatcgccgcaaggtcgcggccgcagcaccggtcgaggccaagccgcagccggcgaccaacagcccggccgaagcactcgaccgcatctcgattccatccgacgtgatggcgcggatcaatgaagcgctcggcaccggcggttcgatcatcgtctccgacctcggcgtgaaccagggcgagaccggcgaaggcaccgacttcatcctgccgctgcgctgagcccctctataacggcttgttgaatgcctgcgcctgcccgccggactatgatgccccgcatccgttccggggacgagaccatgatgaaccgcaggacactgatcatggcggccttctccgccgccgcaggctcccgcgcgctgcatgccgagcagcccgcgatgagccggatcaccgcctatgccttctcatttccggcattgtccggcggcgacattcgcctggccgactatgccggccatcccctgatgatcgtgaacacggcctcactctgtggcttcacgccgcaatatgccggcctgcagcaattgtggaccgaattccgcgatcgtggcttcgtcatcatcggcgtaccatccaatgatttcggcagccaggaacccggcggcccgaccgagatcgccgagaccgcgcagcatcaatacggcgtcacctttccgatcgcggcgaaagccgtggtcaagggcccaaacgcgcatccattttaccggtgggcggcggaagcgcgtccgaaggacgtgccacgctggaatttccacaaatacctgatcggccgcgacggctacatcgccgacgccttccctgagtcggtgacgcccgacgacacccgtatcaagaccgggatcgcacgggctttggcggcggcttgagaagcaccgataatccccggaattaactgggatttcggacacaaccccgccaggttcattgccttggcgccgccactgcgactagggtacgatgagttgggggcgaaagcggcccggtcgcggcaaggccgccacccggaacgcgatcagcagggaaacacgccatgcgcattgcagcaggtctgattttcgcagggaccgtatcgttgctcgcgtcgagcgcggcttggtcgcagcagacgccgccggccaagggcgccgcagcggctcccgcggccgccgctccagcgcctgccgcggcggcgcccgcgccagccaccgcagccgcgccgccgaagcaagcgcctcagccggcgcg

SEQ ID NO: 33 - DNA, 100737 bp, Bradyrhizobium enterica
caggtcgcggccctcgaacatgatctcgccttcgacgatcttgcccggcggcatcgcgatcagtttcaggatcgacatcgcggtgacggtcttgccgcagccggattcgccgaccacgcagagcgtttcgccacggttgatcgagatgtcgacgccgtcgaccgcctgcaacacgccggcgtcggtgttgaaatgggttttcaggcccttgatgtcgagcagcgccatcagatcaccttgcgggcgtcgagcgcatcgcgcagcccgtcaccgatgaagttgatggcgaccaccgcgatgaagatcgcgccgcccggaaacagcgcccaatgcgggccgatgtcgagaaaatccttggcgtcatagaggatgcggccccaggtcggagtgtcaggcggaaagccgaggccgagaaacgacagcgtcgattcggcaatgatcgcggcggcgacgtcgatcgtgccggcgatgatcacgggtccgagcgcatttggcaggatgtggcgcaccacctggcgcaccgggcttgcgccgagtgcacgcgcggcctcgacgaactccttctcgcgcagcgagagaaactgggcacgcaccaggcgggcgaccggcatccagcgcaagccgccgatcacaagcacgatcaggatgaagatgccgccctccgggccgaacatcgccttgagcccgtcgcggaacaaatagatcagcatcaggagcagcggcagctgcggcagcgacaggaacaggtcggtcagccacatcagcgcatagccgagcgcgccgcgcgacatgccggcgagcgcgccgatcagcgtgccgacgaacaccgagaccagcatcgcggcgaggccgaccgcgagcgagatgcgtccgccatagatcatgcgggcgagcaggtcctggccgagatcgtcggtgccgaacggatgcgccagcgagggcccttgcaggcccgccaccacgtcgatgtcgctgatcgagacgcgccagacgaacggaccgaccaccacggccgcgatcagcagcagcagcagcgcggcgctgatcacggccggcctgtgccggcggtagcgccgccaggtttcgcgccagggcgaatagccgcgccgttcagcggaaggagatgcgagggtcaagccagccatagaggacatctgcgatcaggttgaacagcaccacgagacacgcgaagacgaaggtcacggccatcacgaccggcgtatcgttggcgaggatggatgaaatcagcaatgagccgatgccgggaatccggaagatctgctcggtgacgatggcgccaccgaacaccgcgggcatctgcagcgcgatcagcgtgacgaccgggatcatcgcgttgcgcatcacatgcttgacgatcaccttggcctgcccgaggcccttggcgcgcgccgtggtgacatagtcgagccggatcacgtcgagcatcgccgagcgcacgaagcgggtcatcgaggccgcctggaacaggccgagcaccatcaccggcatgatggcctgccggatcatctccagcacccaggggatgccgctccccggcacgctggtgtagacgaagggcagccagtccagcttcaccgagaacaccaggatgaacaggatgccggtaaagaaggtgggcagcgagaagccgatgaaggcgaaggtgttggcgagctggtcgaacagcgaatagggccgcgtggcggcatagacgccgaccgggatcgcgatcaggagcgccagcagctgcgacgagccgaccacgtaaagcgtggtcggcagccgctgcaggatcagcgtgtcgacatcgaccctgctgacgaacgagaagccccaatcgccgtgggccattgccacgatccagtgcaggtagcgcagatagatcgggtcatcgaggccgaacttggcacgcagcgcggcctgcacctcgggcggcacgttcggattggtcgcgagctcgctgaatggatcgcccggcgcgagcgccagcacgacgaacaggacgaccgaaatcccgagcaggctcgggatcgcgatcatcaggcggcgcaggatgtattgactcatgaacggatcatctgacttacgcttgcaccttgagcaggttgatttcgctgtccagtcgataggcgagctttacctcgccccgcgcggggagaggtcggaattcaagccaacgggtcggcgcgaagcgccgcccgatgacaggctccgcttgaattccgggtgaggggactctccgcgaactcacctctcaacgcagttgcgaataaagcccctcactccagccctctccccccaagaacggggagagggaggagcacatctcgagcccccagcggctcagctttcacgataccagtcttgcagattgtcggtctggttggcccagcccgagagcgcgggccgcagcgtgttggaggaggcttcgaccgcgagccgatgcatcacggggatcatcacattgtcctgccacatcaggtcattgcccttgatgtagaggtcggcccgcttgatcggatcggtctcggtatcggccgcatcgatcgcggcatcgaattccttgttggcccagcgcgggaagttcggcccctgccacttgttctccttggtggcgacgttgcgcgaatgatagcggcgcatgtgcaaggcgggatcgggctgcgtcatcgggatctggaacatctcgatgtcggcgtagaaatgggcgtaggtgtcgggattggcgacgtcggaggagaagaacaccgaggccaccaccgatttcagctcgacgtcgatgccggccttctggcaggcctgcttgacgatcgcctgggtcttctgccgcggaccgttgatcgaggtttggtacaacagcttgagtttcttgccgtccttctcgcggatgccgtcggagcctgccttccagccggcctgatcgagcagcgcggctgccttctcgatcgagaactcccatttggtgttcttggagacgaactcctcggggccgttgagataattcgccgtggcgcggccggcacggccgtagatcgccttcttgatggattcgcggtcgaccaggagcgccagcgcctggcgcacgcgcgggtcggagaggatcggatgcttggtcttgatcgacgagcgctcgccgtcgatttcggtgttcggatcggtgaagttgatcgcaatgaactcgatgtcgccgccgaccgcgaacagcgccttgcccttgccgcccttttccaggcgctgcagaacctcgtcttcgacctggatgttccaggcgaaatcatattcgccggtctggatcaccgcgcgcgccgcggagacggcatcgccgcctcccttcatctcgatcgtgtcgaagaatggacggttggccatgtggtagtcggggttgagctcgccacggatcagatcgcccggtttgaactcgacgaatttgtaggggccggtaccgacgggtttcagattgttgggcgcctcgcgggacttgccgcccttgtagtccgcgaacagatgcttcggaatgatgctgccatagcccccgacaaaggcattggcccagaacggtgtcggcttcttgaagttgatgcggatcgtgaggtcgtcgatcttctcgacggtcaggccgctgtaggtttcaatcgataccgccgcggtcgcggggtcgctggcatattcccacgtgaagacgacgtcgtcggcgctgagcggctttccgtcatgccatttgacgccgggcttgagtttccaggtcaccgatttggcgtcggcggagagtccgccattctggatcgaggggatctcggcggcgaggatcgggttgagatggccgtcgacgtcccagcttgccagcggttcgtagaagatgcgcgagccgtcctggtccttggtgccggtggcgaaatgcgggttgagcagggtcggcccctgccaccacaacaacttgagcggaccgccgccgccgcgcttggtcggcttgtaggggttggggctctgcgccatcgcgacgccgccgaggctgaggatctggttcgccatcggcgcggtaaggccgacggcaatcattcgcttgacgaaagcccggcggtccagccgtccgtccttcacgtcgtcgatcatgcctcgcagattattgtcgaacatagtcccctcggtcaggctcacgtgtgattgcggcgggccttggaagcggccgccgttctggcggcagatggcacaccgaatgaccgccaaggtcaacgtccggtgtgacctcactcatagatcttttggctacgacttgtgcagaaccgctccgtgccgcacatcgtttcggcatttcggcgccaaaactacgcttatccgcagctcgcagctgcggaaaatttgttcgttattctttgttccgagatgcttttttgccacaagcgaacgttcgcaagcgtagcggctgccggttcgcgccaacaagccgcgttaacgtggctttggccggaccttgcagaaagatgcaggtccggctcgcaaacctggctcgtcaggcgaccgacatgtccaacggcggtgcaacatgcgccggcagcggactgacatagggcgttcgcgtggtccgcttcttgagatcggccttggcggcggcaatcagttccggctccagcagcgccttgacgccgagaccggccatcgccttggccgcctgcaccatcgccttgtgcgcggccggggtcttgccctgcgccaccacctgccaggtgtggaacggggtgccgattgcaaccgtcggtgcatggacctgcaccgtcggcaccacccagctgacgtcgccgacatcggtcgagccgatcagcggattgcgtttggcgtcgatcggcaccaggaaatcggcgagcggccggtcggtcggctccatgccgatggcgtagtagaccgaggcgatgtccttgtcggtcagcgtcgcacgaatcttgccggcgaactccttgtcggcatcgtcgaaatgcggcgggccgagatcctccatgatccggtgcagcgtctgttccagcggggtgttgggcaggatgttggagaccgcggagatgatcttcatctcgaccttggtctcggtcatcagggcggcgccctgcgcgatcttgtgcacacgctccaccagctcgttcatgccggggaggtcgcgggcgcggatcgaatagcggacccgggcatgggcctgcaccacattgggggcaatgccgccggtgtcgagcagcgcgtaatgcacgcgggcatcgctcggcatgtgctcacgcatgtagttgacgccgacattcatcagttccaccgcatcgagcgcgctgcggccgagatgcggcgaggctgcggcatgcgaggtgcgcccggtgaagatgaaatcggcacgggtgttggcgagcgacggcgtcaccgcgacttcccagaaactgtgcggatgccaggtgatggcgatgtcggcgtcctcgaacgcgccacagcgcaccatgaaggcctttgcggcgccgccttcctcggcgggacagccgtaatagcgcacccggcccggcaccttgttggcggcaagccagtccttcaccgcggtcgcggcgagcagcgcggaggagccgagcagattgtggccgcagccatggccgtggccgccggtctcgaccggacgatgctcggcgacgccggcctcttggctgaggccgggcagggcgtcatattcgccgaggaaggcgatcaccgggccgccctcaccccattcgcccatcaccgcggttggaatgtcggcgaggttctcggtgatgcggaaaccctggtggcgcagttcggccagatgttcggcggaggagcgcgcctcggtgtagcagacctcgggcatcgcccagacccggtcgctcaattcgatgaaacgcggcttgatcgtgtcgacgccgcgccaaacatcactacggttgtccatttgctccgatcctcgagtaaggcaatctgaagcgcaaaaggctagcagcttggcgcgccgccgcctagcacacggcggcaaaccagcttttccgaaagtcacgtcttggtgtggtttgctcccgatcatggcatgatcgtcgcatgacgcgctccctcccgatacggtccagccatgcaagatgcaattccgtcactgttgccgagaacttcgggccaccagttcgtgatctatgccgacgcctgctccggcgttcccggcgcgctgcatgagcgcactttcgcatcggtcaacgatgtggtccgccggctgcatccgcagcccgaattcatccttttccccggcgacgagatcatcggcctcaccgccgatgcggatgcgctgcgcgcgcaatggcggtactggctcgatatcgaaatgggctggctggaccggcgcgcggtgccgctgtggcacacgaccggcaaccacaccacctatgacgcgatgagcgaggcggtgttccgcgagacgctgaagctgccgcgcaatggtccgcccggccaggaggggctgtcctactgggtccgccgcgacgatctcgtgatggtgttcgtgcacacgctgtggagcgggctcggcggcgaggggcatgtcgagaccggctggctggaaacggtcctccagcagcacaaggacgcgagatacaaactggtgctgggtcaccatcccgtctacccaatcaatggctacagcggcagctatcagcgcgagatcggccacgaatacagtgcgcacttctgggatatcctggtgcgcgccggcgtgaccgcctatctctgcagccacatcctcgcattcgacgtccaggtccatcgcggtgtgctgcagatctgcacagcgggtgcgggcaccgcgcaccggatgcccgaaggcgtcgagtacctgcattgcgtgcaggcggcgctcgatcaggacggtctccgctatcaggtgctcgacaccgaaggtgtcgtgcgcgagcaattcgcatggccgctgccatcgctcgaccgggccgcgtggtcgccattgccgcacggggtcagcgctgcgccgctgtcggggatgccggcgcccggaacggtcgtcgccctcaaattgtcgggccgcagcgccgcggcatgcgccgcgccgcaaacgctgctctgcacgccggtgccggacatgatcgcgccgctctggctcggcctgcgcgggccgaaccagaccctcaccttgatcctcggacgtgagcaagggcgtagtccgcactactgggtcggtccggatctcggcggtgagcgggatttcgatctcgacatcgccttctatccggacatgggaccgggcggcgtgctgtggcgatggcgtggtgacatcaactggacgtcgtgcgcggcgatctcggcgaccgggctcgagcggttctcgtggcccgcgctctggagcgtcgggtgcggacagcatggaccggacgacaggcgctatgccgggccgcggctcgagatcgctgcgaccgttctcgcgctgtcatgaggccaaggcgacggtggatcgctccggcggacgaacggagcatggagcgatgggctagtcagctcgtttcggcttcccgcgttccacgctcttcaattcgcgatcgatcaacatacagacgcggcgctgcgccagcaggccgaggcgcgcgcgcgtggtgccgcgcttggtcgtgccgttgatttcgaatttccagctccagaggtcgggttcgatgttgctgagtgtgtattcaatgtcccggtggcgatagatcagcttcttcatgccgtttctttttgttggcggaagcttgcatatcgagatcgcgaagatgtctgtatccggacgactacttacacaattggtctaagcgtccgcgtggtggaattttcgcaatcactgagttggggtcgttgtcccggggctatgactcacaaaccgtgccgcacacttgctgtcgtcccggcgaaggccgggacccattgccacgcatgcgaattgttgtgcgacgccggggccgcgatcccgctcatcaccgagcgcggtggttatgggtcccggccttcgccgggacgacgcgcggaaggagccgtgtgctcaacactctccggtgtcaccgcccggcgatgacatcggagatgagtggcgcgggacagcgaatagcgggttcacaaattgatcaccccgcgccgtgcagcgtgcgcgacggcgtcggtgcggccggtggcgtcgagcttgtcgagcagggagccgacatgaaattttgcggtgtggacggagatcccgagccgctgcgcgatcatcttgttggacgcgccctcggccagcagcgccagcacgtcgagctcgcgcggcgtcagctcgaagtcgccgcccgctgcctcgcggttgcgtgcgacgatcgtagccgttgcctgctcgcccggcgcggcaaggcgcaggccggcgacgctgccgagcaacgtcgccagccggtcggcgagcacggggtcgtcgatctcgagcgcaatgacgatgtcggaggcaggctcactgttcacgtctcgggcctttcgccgaccttcaccttgaagctcatcggctcgccgccgcgatgcacggtgagctcgacgacgctgccgacgctctgcggtccgaggccgcgcgacagcgcccgcacgcccgacagcttctccccattgaccgcaacgatcacgtcgccctggcggatgccggcggcagccgatgggccggccttgtcgatattcatcaccatcgcgccgaggccatcttcgagacggactggctgcagcccgaggccgagatatccgcgcgcgatgcggccgcttgtctcgagttgggttgcgatccgctcgatggtcacagccgggatcgtcagcacgcggcgcggacccagcaccgccatgccgaacggcatgccgctcgcgtcaagcgccagcccgccctgctggctgtgccgcagccggatgtcgagctcgatccgggcgtcgatctcgcctccgcgcaggctgcgccaggcggcgcctgaccgcgagaccatgccgagccgcgcgaccggtgcgccgcggtcggcggcgaccagcaccgcgagcgctccgagtgccgggatgtcggtcgacagcttgatcggcgcgacgtcgccattgacgcgcagcagggcgatgtcggtggtgtggtcgcgtccggcgacggctgctggcctgcggctgccgtcggcgaactggatctcgatctcgccctcgtcggccagcgcttcgtcggcggtgacgatcaggcccgctttccagacaaagccggaggcgcgcgcgcgatgcgaatgcacggagacgaccgatggcgcggcgcgcgcgatggtcgccgatagggctggtgacagcgaggcaaggatgttcggttcggtcatgggaaactccgttggcttcccgcaatctgggatgttgcggccggcggcgaaactggccggatgggcagggccgcagggcgccctgggtgcccgacccggtcagccccggtcgcgagtcctcaagccaagcagggcgaagcccgcgatcagcgcgaccacgatcagcatccagatctggccctcgaagccgaggaagtgaaacggttgaatcaggaactgcaccgcgtgccccttttcggggcacgctaaggctttctcggtcagaaatatattatttttgtatatatgccggccggcggccggccggatgctcaatcggcaacgctggtctccagccggttctccagccgatagccaaccccggactcggtgacgagcaggcggggctggttcgggtcggtttcgatcttctggcgcagcttgcgcaccaggatgcggagatactggatgttgtcgcgctgattgccggtccagatctccttcagcagctgatcgtgcgtgaccaccaggccgacatggaccgccagcacgtgcagcaggcgatattccttccgcgtcagtttgatcctggtctggttcagcaaaacggcccggctgacgagatcgacggagagcggaccgaccacgaccaccggattctcggtgctgctcttgaaatagcggcgcaacgcggcgtcgctgcgcgccagcagctcggccatgccgaacggtttcacgacatagtcgtcggcccctgcctgcaacaggcgaaccttctcgtcctcgtcggattcgactgagagcacgatcaccggaacattggaccaggagcgcagccgctccagcgcctcgctgccgtgcaggtcgggcagaccgagatcgaggatgaccagatcgggggcattgaaggtcgcgatcttcaagccgtcagcggcgttctcggcctcgacgacggagaagccgtggatttcgaagcctgcgtgcaggaaacgccggatcttcggctcgtcgtcgatcagcaggacaaggttacgcggcttactcatcgtcggaggtcaccaattccggatccagggcgtgctggaccggtagcaagatcgatgccgttgtcccgaggccctggccgcggctggcgatctccacggtgccgtcatgcgccctgatgaaggtcgatgcgatccagaagccgagcccggagccggggacgcttgcctgatggcgcgggctgcggaatgacttgcggccgaggtggcgctgctcgtccggtgtgacgccgaccccttggtcgatgatcgacatcacgacgtgcccgcggtcataacgggtctgcactgatatcgtcgacccggacggggagtatttggcggcgttttccagcagctggccgcaggcctcctcgatcaacccggaatcgactttgagcagcggaaggtcgtcgtcaaatccgatctcgagatgatgcgccgccagccgccgcgcacgggccttgatcgcggcgttgacgatgtcgcgcgggtcggaccattcgaggcggggcgtcagcccgccggccgtcacgcgcgtcgcgttcagaaggttgcggatgtggccgtcgagccgaatcacttcatccctgaccgcttcgaccagcgagcgcaaccggtcatcggtcgcgacagctggcatctcccgcatgacgctcaccgatccctggatcgcggcgagtggcgagcgcagttcgtgcgagagcgtgccgtggaaggcgtcccgcaacagctcggcctgcagatgcagtctcgcgtcgtccatcgccttgccgatatcgagccgttgcagggtcaacgagacctcttcgagcaccgcttcgacccggcgcgcgcgcaatttgatcgcatcatgggtgccgcgaccgacattgatggcgatgaccccgtgcaccacgcttttcgatccgatggcgcggagcagccacacctcctgggtctgttcatcgacgacactgcgatctgtcgcgccgacggcgacggccatcgccgcaacgctttcctggacggcgggcggagccgcacccgatccaggcgaagattcgaaatgacctcccgcggacgcgacgaacagcgccgcgcgctggccgagcgtatgcgccagataatgcctgatggcatcgatcaggtcggagatggtgaagcaggcggccaggcgtttggagagctcatagagatgctgaatctcccgctcgcgccgacgcagcctttcggtttcctgttgcaggcgcgatgccagattgctgctcaccagcgcgacgacgaggaagacgaggaggtcgatggcttcctgcgggctatcgacccggaggctgtagagcggcgtgaaaaagaagaagtcggctgcggcgattgcggtcagcgaggccagcgtgcccgaccagatgccccatctcgtggctgcaaagatcaccgggatcagataggcgatcggcaccagattcgcggcgatcggctcgtcgagcaccaacaggaccgccgtgatgattgcgactgatccgaccgaccacagcaggggcaggacgtcggcccacaccgccagccttggcttcgcgtcgaagcccggcgcgaacacatgctccgcttccgagcggcgcgcgcggacatgcgcgagccgttgaaacaggggcagggagtagatcaatgatttcgccttcgtagacaaagacaccggaagatccccgtcacggccatcccggccagcacgaaatccgtccctgcaacatccgatgggaacgctgacgacgcgaggttcagcgccgtcagaacggcgtatgccctcgccaatgattcaacgttcgaccgtcgggtgctgctccgatgtcaccaactacccagcgagccgagcattccccaggaacggatagaaaatccatgttgttgaggcggacgagaaatataaaataaatagtcgcggtgcgagaccggcggccgaggggtcgatcgcgcgccggtgaggcaccacggtgccatgcgtcctcagcgccgctcgagcagagcggcatcatccgacttctgcagcagctcaccgacatagctgagcgccagccgttcgccggcaagctccggcctcgacgcgcggtagaggctgaactcgccggtctggctcgcccgcggcggcgtcagcttggcaatcgcggtcgcgctgaaatacttcggcgggtagagatagaagtccatcagcggcgtctgcgagccgccgggttgccgcttcagcaccgcaagcgcgcgcacgccggcctccggatagagcgcggtccagcccgcaaagctgctcgccaatatctccagcgacaggatcgccgtcgcgatctccacaaaaccctggttggacttcttggcgcttcgggtcgtcgaggccttgcgcagccgctgcctgaattcgtgatgccgttcgatgaacggcccgagccgcgcccgccacagcatgtcgggcaggcaggcatagccatggatgtcgtgatagctctcgatcaagttgcggcattgcgccgtgagatcggccggcaggaaattcagatcgatgtcgccgatctcttcgctcgcactgttgatcacgttggccacgatgcgcggcgctccgttgcacctgcggcgaggattcgccggatgaagtcagcctagccgctgcgcgcgtatatcttcgatgcggtttcacgacgatctgcgtagcaataaaatagcgcgcgcgttgatgagggacgctgcaccaatcgagctatggcggaaatggcacaggtcgcgtggattctctcgcaccgcaacgcgcggctgtcacaaaaccttacgattcttgccgagttcttcagcaatcgctgatgcaaatgacgcgtatctgcgcaggcggggcgaagcccgtcgttccggatattttatcttaatgaaaccgcggcgagacccgtatcgcctttttctcaagcccccacgaaagattacacagacgttaatcgcgagagcgctcgaagcgtcggtagcaatatcctggggcataatcatgaagagacttgttttggcgggcgtatcgttgacggcgctgagcctgttcaacgcggcacacgcagccgacgccaatccgcctttgttgaaggcgccgtcatcgacgtgcgatccttacaagaattactcctgcctcgatagctatctcggcagtgacttcttcacgcggttcgtcaactattaccggctcgaatggggccacgattctgcaccgtcggatccgaaagcgccgccgtcccgccgcgactattggccggcgacgccgcaaagcacgccgccgatgccgttcacggaatggccgtatggcggcacgaccagcattggcgtgacgcggccgagctcggtcgacagcccgttgatggcggcgctcggcacgacgcccgcgggacagtggatgaacgacgcgcatattcaggtctacggctggatcaatgccggcggcaatctgagctccaacacggtgcgcggcggcaacgcgccggccgcgtacgattacaatccgaatacggtccagctcgaccaggcggtgctctacatcgagcgcctgcccgacacggtccagaaggaccacgtcgactggggcttccgcatcgctccgatctacggcgagaactatcgctacacgaccgcgtacggcctgtggagcaatcagctgctgaaccagaacaagaactatggctacgacctgccgatggcttacggcgaggtcttcattccgcagatcgccgaaggcctgctgctgcgcttcggacgcttcatctcgatccccgacatcgaggcccagctcgcgccgaacaactacatgtacacgcactcgatgacgtacacgttcgacaactacaccaacaccggtcttcagagcacgctggcggtcaccaagaactggatgctgcagctgggcgtttcggtcggcagcgacaccatgccgtggaatgccaacgcgaagatcgccaacccgtcccccaacccgctgttccccggcaccaccatgttgaaggatccgggtgcggtgccgagcatcaccggtggcgtgcgctggaccagcgattccggcaacgacagcgtctatgtcgtcgccgacgcgatcaacagcggcacatggggttacaacaacctgcaatggtacggcctgacggcgtaccacaagttcaacgagcagtggcatatctcgttcgagacctacaatctgcaccagaacaatgtgctgaacgccaacaatcccgctgcaatggctgctttcaatgctggtgggacgccgttctcgccgcaatacctgccgttcaacgcgccgggcctcgcccagtgcagcagcgctgcggtgttcgcctgcacggcgtcggtgcagacctatctcgcctacctgaactacaaggcgtcgccgctcgacaacatttcgtatcggatcgagttctacgacgacaagcaaggtcagcgcacgggcgtgaagacgcgctacgtcgagaccggcatcggctggcagcactggttctcaccgcagatcgagatccggcccgaggtctcttactacaagtcgctggatgcgaatgcgttcaacggcaactccaacctcggcatcgccccgaccaagaacttcgctctgatcggttcggcggacatcatcattcatttctgaccgcgagcgcgcccggcatgcccgccgggcatttcgtcagaacaagggacaggggaaaaacatgaagcgaattcttctcacatccgcagcgctcacgctgctggctgccgcctcgccggtgctcggcgccgaccttccgatgtacaccaaggcgcccgcgatcgcggcgccggcttacgactggtcgggcttctatgtcggcgtgttcggtggcggcggctacggcaaccacaatctcaacaacgcgctcggcccggccggcttcgccaactacaccatcaactactcctccactggcggaatcgcgggcggcgagctcggctacaacgtgcagagcggcaacatcgtggtcggcgtcgaagccgacggtttctggtccggcatcaagggtagcgatgtcgatcaattcaacgccggcaccttgccgatcggctcggttgacgcgaccagccttcgcgacggcttcacgcttcgcgcccgcggcggtatcgccgtcgaccgcttgcttctgttcttcaccggcggctgggcctatggcgaattccagcacaccaacaccgatccggtgttcggcgtcgatcggttcagcgccaacaggagcggcctgaccgcaggcggcggcatcgcctatgcgatcaccaacaatctgatcggcaagttcgagtatcgctactacgacttcggccgatacgagcgcgcggcgccgctgaacgcgcagatcccctacaccgtcgacaacacctactcggtcgtgacgcttggcctcgactacaagttcggcggtccggtggtcgcgaaatactgaacgggcaggaggaaggcatgacagtcgcgacgttgaagcaggcgttgttgcgctgcatcgtggttgccggtctttgcgccacggttgccggctgcgccagtgaggtgacaatcccggcggccgatggctccgccggcaatcacatgcgctactatggcggaccgaaatcgccgatgtggtcgggccaataggtgttccgaattgtacttggtcggattcagccgggtgccgctttcttgatcgacgcaataggttgtccaaaaaatcggcagctgatgatttttgttgcggttcggcggatttgagatcagcatcgctcctcattaacgaggcgccgagcagaggcgtcgtctaggaaacgcccgttgctattcggtgtctcagcctcctggagggtgcgatgctgaagtctgttgtcactctgatcggcattcttgcgatgaccgggttgctggcgccggtcgctcacgccggtgcttccgccagtgcgccgtcgaaatacgcacagcgttcgcagcagacgacgcgcgtgcatatggtcaagcagaccaggcggatcgacgcgccgatcaccgatttttcggcgcaggcaaggacggcgtcgtttcaccgctaggccgctcagctcagccgctgcagggtcgccttcgggctctcgccgaacttggcgcggtaggcgcttgccatccggctcagatgggtaaagccgaggtcgaatgcaatgtcgacgatgcgttcgcccggccgcgccgtcttgaggcgggcattgagatgcgcgaggcggatgtcgagcagcatttcggacacggtggtgccgaagtggcggcggaagccgagttgcagcgcgcggacgccggtgccggcgatctccgcgagctcggcgagatccagcggctcggtcgcgcgggtttccagataggcccgcacccgcttcagcgccgccggctgcgcctcggtgcggccgttgaagacatcgatcgccgagctcaggctgtgccgctggtcgttgagcaggacgttgagcaattgttcgcgccaatcggccgccgcgaccgccgacagcgatttgcgcggcccgagccgctcggccgtcgtcacgagctgctcgatcctggccgagagcgcctgcccgagcggcccgctcagttcaaccgccggatcgaattcgaccggccgcaccgtcgcgccgccaagcgcagcagcacgatgctcgaccagcttgcggtcgagcagcaggatcagctgggcgcagtcgccgcgccaggtcatttcggttggaatggtcggcgatagcagcgatgcgcagtgtcgcggtccggtggtgagctcgcgcgcggcggtccgcaccgcggccgagccggacagcggcatctgcagcaggaagaagcggtcgaggcagcccggattgatcgcgaccgatccgccataggcgacatagttgaccgagaagccgtcgaagtctgcgcaattgtgatgcgcggagaaatcgcgctcggaatgatcgaccggtgtcaggtcgtgcggacagaagatgcggccgatcgcttcggctgcgtcgtcgacgcgggcggtggcgacgcgcgcgaaatccttcagccttgccctcgcgggatctgctcttgttgaaacctcgtcgccaacaacagtcacgccggccgtccggagttgtttgaggtctaaaatatcacgcagcctagtccattcgccggcagaggggaacgccgtttcgtcgcgcaatctgcccgatcggcgcgcacacagctgcagcggcgtcgggcaggaacgacgggctcgatgctcccgcactgcagcatggtcgcactgcttgcggattcgtttatcggctagacagccccaccggccggcgacaggctccgtgtccgtaatacgcagcaaactggagaggctgacatgggcacgctcgaaaaaggcattacccgcaccggcaccggctacggcggcaagacctggaatatcctcggccaggtctattatccgaaagcggtcaccgactcgaccttcgcgttcgagaccaacagcgatcccggccagttcgtgccggtacacatccacccgacccaggacgaattcatcctggtgcaggagggcgtgctcgacctcaagctcgacggcgtctgggtgcaggcgaaggccggcgacctcgtgcgcatgccgcgcggcattccgcacggctatttcaacaagtcggacaagccggcgcgggcgctgttctgggtgtcgccgatgcagaagctcgaggcgctgttcgagaagctgcacaatctgcaggaccccgtcgaagtggtgcgtatttccgccgagcacgaggtggacttcctgccgccggaagccaacgactaggccggctgccaaacagacgatgcacacgaggcggcaatcgccggagctggctccggcgatgtcgaggatgtgcgcgctgacgaattttgcgtctgttcattcatatgggagcggtttcatggtcaagcagaagcatgtgtgcgtcatcggcgccggcatttccgggctcgccgccgccaaggccttcgccgggcgcggccacaaggtgaccatcatcgagcgcagtggcgatctcggcggagtctgggagccggtgcgttcttatcccgacgtgcagacccagagtccgaaggagctctatcgctacaccgacaaggcgatgccggagtcctatccggaatggccgaagggcccgcaggtccacgcctatctgcgcgactacgcgcgcagccatgggctcgacggcgcaatgcggttcaacaccagggtcgagggcatgaagcggcgcgccgacggcaggccgggctggacgctcgcgctgcgctccactgacggcgccaccggccatgaggatttcgacttcgtcgcggtctgcaccgggcagttcaacgaaccgcagtcactgccgctgcccggcgaggacggcttcaaggcacagggcggccagatcctgcattcgtcgcaatacgccgatcctgatctcgccaagggccgcaaggtggtcgtgctcggcggctccaaatccgcgaccgacatcgcggtgaacgcggtcaattccggcgccagcgaggtcaccatcgtgtttcgcgagccggtgtggcggattccctatttcatcggcggcctcgtcaacttcaagcgcatcctctacatccgcgcgcaggagcagatgttcgcgagctggggcatcggtccgatgggccgcctcgcgcatgccgtggcaaagccgttcgtctgggcgaactggcgcgggctcgagagcatgctgaagatgcagctcaagctgaagcagtgcggcatggtgccgaaggagcggatagaggacggcgtcaactgctcggtgccgatcgcaaccccgggcttctatccgatggtcgccgacggccgcatcaaggcggtgcagggcaccttcgatcattatgagggcaagaccatcgttatgagcggcggccagcatgtcgccgccgacgtcgcggtgctcgcgatcggctacaagctcggcgtgccgttcctgcccgaggagtaccagaagaagctggtggaagccgatgggcaataccggctctaccggctgatcgccaatcccgatctgccggacatgggcttcgtcggcttcaattcgagcttctgcaccgtgctgtgcgcggacctcgccgcgaactggctggtgcgctatgccgacgggcagctcgcacggcagccgagcgcggccgagatgcgcgacaacatcgaaatgatgctgaacttcaagcgcgtcgggcgtcccgccgccggcgtctatggagggctatgcgtcgcgccctatcacttcaagcatttcgacgagctgctcgcggacatcggcaccaaggcctcgcgccgcaacccgctcgtcgaaaagttcacgccgccggacgcggacgcctatgcgcgcttccttgcgaccgcgccggtgtacaaggcagtcgcgtaacgcatgatccggaaaagtgcgaagcggttttccgaagagatcatgcgactcaaaagtcagtcgcggccggcatccatgaaggcctgcgcgaggcgttcgggattggagaagcacagctcgtggctgcccggcacctggaccaggcggaacagcccgagcttctccgacagccgcggatgccagggcaggccgtgcggcatcgcggtgtcctccgtgcagttgacgtaggatttcgcgatcggcatcccggccggattggtccgcaggacgatcttgtcctggaaggtcttcagcgggtgcgggttgagcttgtcgtaggcgcgctgcgcgagctcgacatcggcgtcgttgatgaaggcctcgcgccagaccgggaaaggcagcaccaccgagccgtcgccgcgctcggcatggatggcgtcgaacaggccgacatagtgcggcggcaccatgtcgttgaggcactcgccattgttcggcacgaacgcgttccagtacaccagccggcggatgcgattggcggtggcgtcggcaacgcctgttatgaccatgccgccatagctgtgaccgaccagcacgatgtcgttcagattgtgctcagcaagatagtccacgatcgactggatcgcctcggcaagcccggagtctttcctgtcgccgggccggttacccttgatggtcggcgtgtggaccacgtggccggccttgcggatagtagccgcaaccggctcgaactcggcgccggtatgccaggcgccatggacgagaacgtaagtcgacatgttgtacctccctgcgtggtttggtcagatcaatcgcggcgtccgggatggctccggaatgtgcgcgggcttcatgcggctctcgacggatattgacccggaccccgggaacgcgcttggctgtaaccgaaccggactgggctcggagtgaactgatgcagcaaatcgcggccgcggatcgctcgcgcgggctgagctggaataccgcggacaccaggccgggcgagcagttcgcctattatcgcgaggcgatctgccaggccttcatgaacctgacaccggagcagccggcgacgcccggattcctggcacgggtcgagacggtcgggctcggcaacggcgcgatcaatcgggtcagcttccccgagcacgtggtgcggcgctcggccgccgacatcgccgcatccagccggcgctgctactatctcaatctcaagctcgccggccgctgccgcatccagcaggcggggcgcgagatcagcctgtcgccgggccaggtcggaatcttcgacagcggacagcgcttctcgctgctgcacgaccgcggtcccgtgctgcaggtcgcatcgttctgggtgccggccgaggcgctggatgaacggctgcggtcggcaccggcggtggccccggcgcgggtgtcggatgatccgtttgtcggtcacctcatcgccgagaccgcgcaggtgctgaattcgtcggcgctgcgcgcctcggacgccgacaatgcgcggctgttcggcgtgttgctcgacctcgttgcacttagcctctcgcgcagcagtcgcacaggcgttgccgagagcgcgggccttgcggaggcgacgtggctcgcgctgcgtcgtgccgtggaccgcaggctgcgtgaacccggcctcggcgttgccaccatcgctgccgcgatcggcatcagcgagcgctacgtccataaattgttcgagcgggccggcaccacattcgccagctatatgatggatcgccgcctcgacggtgcggcgcgcgacctgaaggacccggcgatcgccgggcgcgcgatcggcgacgtcgcgttcgactggggcttctctgacctgtcgcatttcacccggcggttcaagcatcgcttcggctgcacgccgcgcgactggcgtcgcggctgagcaacgttcggaaaccgccatggctcaatcattcatctatcaagtcagcccgatgcgcgtcgtgttcgggaccggcacggtcgcgcagctggcggacgaactcgatcgtctcggcatcgcccgtgcgctggtgctggcgagccggcggcagcaggccgagctcggcgatctcgcaagcttgaccggcggccgcatggccggcgtgttcgacggcgcggtcgtgcacacgccggtcgtggttaccgaacgcgccatgcagttggtccgcgagttgaagcccgacggcgtggttgcgatcggcgccggcgccgcgaccggcctcagcaaggcgatcgcgctgcgcaccgacctgccgcaattgatcgtgccgaccagctatgccggctccgagatgacgccggtgctcggcgagaccgttgatggcgtcaagaccacgcaatcgtcgccgaatatcctgcccgaggccgtgatctacgacgtcaacctgaccctctcgatgccggcaaagttctcggcgatatccggcctcaacgcgatcgcccatgcggcggaagcgctgtatgcgcgggatggcaatccgatcacctcgctgatggcggaagaggcgattgcgaagctcgcgtcgtcgctgccggaggtgatcgaccggccgcgtgatctcgacgcgcgctcggatgcgctgtatggcgcgtggctgtgcgcggtctgtctcggcactgtcggcatggcgctgcatcacaagctctgccacaccgtcggcgcgctgttcgacctgccgcatgccgagacccacgcggtgctgctgccgcacaccatcgcctacaacacgccggccgcacctgatgcgatcggccacgctgcgagggcgcttggcgcggctgacgcggccgatggtctgttcgatctctccgcaaaactcggtgcgccgcgttcgctcgccgagataggcatgcccgaggacggcattgccaaggccgccgcgcttgctaccaggaatccctactggaatccgcggccgatcgaagagcgtggcatcgccgatctattgaagcgcgcatggtccggcgcgcggccgcacgcgggatgatcagacgccgatcgcgttgcgcgcgatcacgtcgcgatagaatgccgcgctcagtttcggcaggcgcgcctgactctcgaaatccacgcgatagaggccgaagcgtttcttgtagccgaagatccactcgaaattgtccatcaggctccacaggaaatagccttggaccgggacgccgtcggcggtcgcgcgctgcaactgggcgaggtagttgcgcaggaacatgatgcggtcgaggtcgtagacctgcccgtccggctccaccttgtcctcgccggacgtgccgttctcgctgatatagatgctcttgatgttccagagcttggccgcgatccgcggcgcccagtagatcgtctctggcgcgatccgcagccaatcggaattcatatgcgggaacgaggccggcatcggcagcggcttccagccgggcgcgctgtcggtggcgaggacatagcagtgcggcgcgtagatgttgagcccgacgaaatcgttgggctgcgcgatgatcttcaggtcctcggcggtgaatttgggcgcatcagtgccggcatattgcaggaaggcctcggtgtacttgccttcgagcagaacgccgagaaagcccgcgttcaactcgcgcgtggcgatctcggtggcgcggatgtgctccggcgtgttgatcgccggcacgcaggcggtgatgttctcggccggtccgacccgcgtgccggcgcggcccttggcgcggatcgcctgcaccgcgaggccatgcgccagcgcgacgtggtggcgcgcctggttcacctcggccggcggcagcgtcagccccggcgcgtcgacgccgagcgcatagccgaaggggaggaaacgcccgacctcgttgagggtgaagatgttcttgacccggtcggtcaggcgctgcgcgacatagccggcatagtcgccgaatgccttcgaggtgtcgcgcgagcgccagccgccgacacggtcctgcaacgcctgcggcaggtcccagtgatagagcgtggcatagggctcgatgccgttggcgagcagttcgtcgaccaggcggttgtagaagtcgaggcccctcgggttcggtgggccgtctccgtcgggaaacacccgcggccaggcgatcgagaaccggtaggctttggcgccgagttccttgatgaggcggacatcctccttgtagcggtgataatggtcgttggcgcggtcgccggtcgagccgtcctcgatcttgcctgatctatgggtgaatgtgtcccagatcgacgggccgcggccgtcctcgttgaccgcgccctcgacctggtaggacgaggtcgcggtgccccagacgaaccccggtggaaagttcgcgccgtcaggccgtggggcgtggttcgccgcctcaccgggggccgacaggccgagcgccgagaggcctgctaggcccgcgaattgccggcgcgagaatttttcgaacattgttgtctccggtcgccggccgtcgcggctggatgccgacgacaagttaaccttccccgccgtcgcgcaacaagggccgattggccggagtggcgcagcgattgtccgccggtcaatcgggacctttgcgatctcaatgtcgcggagttgtcagttttgcggcaacattttctctactagattggttgctacgtccctccgcaatgacctccgagaatccccgaggttcctcatgagccgcgcgcgatgaacaagcttgcaaccgatgtccgaaccgctctgctgcgtcgtcttgccacggcgatcggcttgctgctggtcacatttgccggcgcacaggccgagcagacgttctcgttcgacagcacgcccggaaagttgccgaagacggtcgtcccgttgcgttactcgatccggctttcgcctgacttcaccaccctggcattgcacggcaacgagatcatcgacattgaggtgggggcgccgactgcgcagctgacgctgaatgcaatcaacaccacattcgaagtcgtcagcgtcgatgggacccagactgctgacgtcgcgaccgatgcggccgcgcagacggcgacgttcagcttcgccgagccgctcgctgcggggcggcacaggctcgccatcgcgttcacggcgcagatcaacaggtttggcacgggattgtttgtggtcgactatccgaccaaggccggcaccaagcggctgatctcgagcaagctggagcccgctgacgcgcggcgaatctttccctgctgggatgaaccggcattcaaggcgagctttgagctggccgtcataattccaaagaacctactggcggttggtaacatgcccgttgccgaagagcagccgctcgccgacaattccaagatcgtcgcgttcgcgccgacgccgaagatgtcgagctatctgttcgtgctcacgatcggcgagcttgaacgtgtcaccgctgatgccggcggcgtcacggttggcgtggtgacgacggcgggcaagagcgggcagggccagtttgcgctcgacagcgcggtgaaactgctcggctactacaacgactatttcggcgtgaaatatccgctgccgaagctcgatttgatcgccgttcccggcgggttcggcggcgcgatggagaattggggcggcatcaccttcttcgagagccggctgctgttcgatcccgcgaccaatgcggagaccgccaagcgcggcatcttcggcattatcgcgcacgagatggcgcatatgtggttcggcgatctcgtcaccatggcgtggtgggacaatctctggctcaacgaaggctttgccagctggatggcgaccaaggcctcggagcagttctatccacaatggcagagctggctgaacggctatggcgccaagcagttcgccatggcgctcgatgcgcgccgcacctcgcatccggtgcagcagccgatcgccgatcacagtgaggcggtcacggcgttcgatgccatcacctacaacaaggggcaggcgctgatccggatgctggagaattatctcggcgagcaaccgttccgcgacggcatccgcaaatacatggccgcgcacgcctacagcaattccaccacggccgatctctggcaggcgctcgaacaatccggcggcaaaccgatcaccggcatcgccgcctccttcaccgaacaggacggcgtgccgctggtcgtggccgagaccgcctgcgatggcgacgcgcagcgcctgacgttgcggcaggaccgcttcgcgatcgcggcggccaacgatccgccgctgccggctcacagctggcagatcccggttgcggccggcccggtgcacggcagggcccttgacgagatcctgctgaaaggcagcgccgatattgcggccggcgcttgcggcgatgcgatcaaggtcaatctcggggacgtcggctactacagggtcgaatacgggccgaagaaccgcgcggcattgctgaacgcattcccgcaaatgcaggtcgatgaccggctcaatgtcgtcaccgacagctgggcactggtgcaggccggccgcgccgagccgccatcctacctcgcgctgctcgacgcgctcgatgccggcgaccgtcgtgcggtgtgggaccaggcgatctcgtcgcttctcacgctcaaccgcctgtcgcgcgaccgcgccgagcggccggtgatccaggcctatgcccgagcgaagctgcgcccggtgttcgatcggatcggatcggacggccacggagcgggcgacgacgacaccgcgctgctgcgtgcgagcctgatctcggcgcttggcgatctcggtgacgccgccgtggtggccgaggcgaagcgtcgcttcgcggcattcctcgatgattccaacgcgctgccgaccacgctgcgcgatgccgtcacccatgtcgtcggcatcaccgccgatcggaccacctatgacagactgctgaccctggcgcgcaacagtacggtcaccaatgagcggctgcgctattacttcgccgccgccggcgcccgcgatgccgaactggcgcacgcaacgctcgcgttgacactgaccaacgaactgccggatacgatcgttgccggaatgatcggcgccgttgcatccgcgggcgagcagccgcagcttgcgtgggacttcgtccaggccaatttcgacgcactactcgccaagcaggggccgaacttccgcgaccagttcgtgccgaacttcatgaccaattttaccgatcaggcccatgctgtggagcttgccgccttcgccccgtcgcaatcgaccagcggtggccgggtgatggtggcgcgcgctttgcaggcgatcgcgatctcggccgatctctcccagcgggtgctccctgccgccgacgcctggatcagggcgcacaagccgtgagatcgcgagggagtttccggcggcgcgcgatgcggctatgctcggtgcgcggcatgcaatcaacaatgtgaggctgagatggtcaaaggttccgatttgctggtcgcggcgctcgagaacgagggcgtggagcgggtgttcggggttcccggcgaggagaatctcgacgtcgtcgagagcctgcgcaaatcctcgatcaagctgatcgtgacccgccacgagcaggcggccgccttcatggccgcgacctacggccggctgaccggaaagcccggcgtctgcatcacgacgctcggcccgggcgcgctcaatttgaccaccggcgcggcctacgcgctgctcggcgcgatgccgatggtgatgctcaccgggcagaagggcatcttgagcagccggcaggccaagttccagatcgtcgacatcgtcaacacgttccgaccgctgaccaagctgtcgctgcagatcgtcagcggcgcgacgattccgacgctggtccgcgacgcgttccggatcgcgacgcaggaacggccggggccggtgctgctcgaactgccggaggacatcgcgggcgaggagaccgcaccggtcgagctggtgcatccgcatccgattgaaattccgatcgcgcacgccgccgcgctcgaccgcgccgccgacatgatcctgaaggcgcagcgtccgctgatcatgctcggtgctgcggcatcgcgcccgcgctcgaccgcgggcatcggcgacttcgtgcggcggaccaagatcccgttcttcaccacccagatgggcaagggcacggtgtccggcggcaccaatcaatacatggggaccgcggcgctgagcgagcgcgactatgtgcatgaggcgatcgaccgcgccgacctgatcatcgcgatcggtcatgacacgatcgagaagccgcccttcatcatggggccgaagggcccccaggtggtccatgtcagctacatgccggccaatgtcgagcaggtctacttcccgcaatgcgaggtgatcggcgatgtcgggccgagcctcgaattgctggctgaccggctcgagggcaagctgcctcatgccagcgcgctgctcagcctgcgcgagagcattctggccaagatcaccgaccgcgctaccgagggccgctggccgccgacgccgcagcgtatcgtgcacgatgtgcggcaggtgatcccggaagacggcatcgtcgcgctcgacaacggcatgtacaagatctggttcgcgcgcaactaccgcacgctgctggcgaattcgctgctgctcgacaacgcgctcgccaccatgggcgccggcctgccgtcggcgatgatggcggcaatgctgtatccgaagacccgcgtgctcgcagtgtgcggcgacggcggcttcatgatgaattcgcaggagctggagaccgcggtccgcctcaagctcaatctggtgatcctgatcctggaagactccgcctacggcatgatccgctggaagcaggcggtcgacaatttcccggatttcggcctcaccttcggcaatccggattttgtcaaatacgccgaaagctacggcgccaagggctcgcggatcgagagcaccgaggcgatcgtcccgacgctcgagcgggcgttctccggcggcggcgtgcacctcgtcgtggtgccgatcgactataccgagaacaagcgggtgctggtcgacgagctgcgcgagaaggtgcagcagatcgacgtcgaatagcggattgccgctgacggcaaggaacgaaaagcgctcggcttgattgaacgttagccaccatggtagcacgccgcaacatcacccgttgtgctgatgtccggcgataccagatctgagaggtcacgtgactgcaccaaatcctgccgccggcaaacccatcgatccctcagcgctcgccaatgtgccgcggctggtcacggcgtatttcgccggaaagccggaccccagcgatcccacccagcgggttgcgttcggcacctcgggccatcgcggctcgtcgctgaagaattcgttcaacgaggaccacatcctcgccaccacgcaggcgatctgcgattaccgccgcgagaagggcctgaccgggccgctgttcatcggcatcgacacccatgcgctggctgagccggcgctggccagcgcggtggaagtgttcgcggccaacggcgtcgagatcatgatcgacgcgcaaggcggctacaccccgacgccggtgatctcgcacgccatcctgagctacaacaggggacgcagcacgggtctggctgacggcgtcgtcatcacgccgtcacataacccgccggaggacggcggctacaaatacaatcctccgcatggcgggccggccgataccgacgtcaccggcgtggtcgagaagaacgccaaccgctacatcgaggccgggctcaagggcgtcgcgcggatgccgtatgaccgcgcccgcaaggccgcaaccacgcatctgcacgactacatcacgccctatgtcgccgatctcggtaacaccgtcgatctcgcgctgatcaagtcggccggcgtcaggatcggcatcgatccgctcggcggcgcggcggtgcattactggcaaccgatcatcgcgcgctacggcatcaacgcgtcagtggtcaacactgcggtcgatccgaccttccgtttcatgaccgcggactgggacggcaagatccggatggattgctcgtcgccttacgcgatggccagcctgatcgggatgcgcgaccgcttcgacgtcgccttcgccaacgataccgacgccgaccgccatggcatcgtcacgcgctccaacgggctgatgaacccgaaccatttcctcgccaccgcgatcgcctatctgttcgcgcaccggccgcaatggagcggggatgccgcgatcggcaagaccatcgtgtcgagctcgatcatcgatcgcgtcgccaagaagctgggccgcaagctggccgagacgccggtcggcttcaaatggttcgtcgacgggctcggcagcggcggcttcggcttcgccggcgaggagagcgcaggcgcttcgttcctgaagcgcgacggttcggcctggaccaccgacaaggacggcgtcatcctcggcctgttggcggccgagatcatcgccaggaccggacgcgaccccagcgaattgttcaacgagctgaccgccgagctcggcgtgccctattacgagcgcatcgacgtcgcggcgacgccgaagcagaagagcgccctgaaagcacttggccccgagcagctcaacatgaccgagctcgccggcgatccggtgcgcgcggtccgcaccagggcgcccggcaacgaccagccgttcggcggcatcaaggtcgagagcgacgccggctggttcgccgcgcgtccctccggcactgaagatgtctacaagatctacgccgaaagcttccgcgggccggatcatctgaacaagatccagggcgacgcgcaggccgcgatcgccaaggtgttctgagggcgcgccggcgctgttcgcgcggcagggctggcagctgccgaaatcgagcggccgaatctacgatgccggcaaggccgaacggctgctcggtttccgcgcggtaaccgattttgcggcggtgctcggcgccctgcgcggcggcgagccgcttcccttcgcgcacgatcccgattatgtctcgccctcagcgaggctcgcacatggctgatttccacggcgtctttccgtatctggtgtccccggtcgatccagccggccatgtccgcaccgaggtgctgggccggctctgcgacgatctgatcaaggccggcgtccatgggctgacaccgctcggctcgaccggcgagttcgcctatctcaacaacgcccagcgcatgcaggtggtggcgaccacgatcgaggccgcgcagggccgtgtgcctgtggttgcgggcgtcgcctccaccgcgacggccgatgcggtggcgcaggccaaggcctatcagaagcggggcgctgccggcattctcgcgatcctggaggcgtattttccgctcaatgacgcccaggtggaatcctatttccgcgccattgccgacgccgtcgatattccggtggtgatctacaccaatccgaatttccagcgctccgacctcacgctcgacgtcattgcgcgcctcgcccagcacccgcgcatcggctacatcaaggacgcctcgaccaataccggccggctgctgtcgatcatgaaccgctgcggcgacagcctgaaggtgttctcggcgtcagcccatattccggccgccgtgatgctgatcggcggccatggctggatggcgggcccggcctgcatcatcccgcggcagagcgtcgagctctacaatctctgccgccgcgcccgctgggacgaggcgatggtcctgcagcgcaagctgtggcgtatcaacgaggcgttcgcccgcttcaacctcgccgcctgcatcaaggccgggctcgcgagccagggctacgatgtcggcgaccccgtgccgccgcaggcgccgctgacggccgagcagtgcaaggtggtcgaggcagccctgcgcgatctcgcctgaaactggcttgcgcgttgcgggcgctctcaccacttcgtcgttccggggcgaggcgaagcctcgagcccggaatccattggaccgtatgcttcgtggaggaatggattccgggctcgcgccaagggggcgcgccccggaatgacgctggtggtggttgtctaaagccagcaatccgttaaaacccgccgaaatttctgaactcaaggaccctgcgatgaacattcttcccggcaatatgcgtttcggtgcgggccagccagtcaagcgtctggaagaccagcggctggtcaccgggaaggggcatttcatcgacgacaagccgcaggacggcacgctctggctgcacgtactgcgctcgccgcatgcccacgccaacatcaagtcgatcgatgtcaaggcggcgctggagatgccgggagtcaaggcggtctataccggtgccgatctcgtcaaggacgatatcggcacgctgccgacgctcgcgatcttcaagcggcccgacggttcgccgatgaccgtgccgccgcggcgcctgctggcgcacgaggtggtgcgctacgccggcgagggcgttgcggctgttgtggcgacctcgcggacgctggcgcagaccgccgcggaagcgatcgagatcgattacgaggtgctgccctcggtggtcgatccggtcgaggcggtcaagcctggcgcgcccgtggtctggccggaggcgcccgacaacatcgtcgctgcgatgagctatggcgacgccgccaaggtcgaggcagcttttgccagcgccgcgcacaaggtatcgctcgacctgatcagccagcgcctggtgccatcggcgatggagccgcgctcgaccatcgccgagatcgagaagaagaccggacggctcatcctccacgtgcaatcgcagaccccgggctcgacccgcgatctcctcgcggaatcgatcctgaagcggccgaaggacagcgtgcgggtgctggtcggcgatatcggcggcggcttcggccagaagaccagcctctatccggaagacggcatcgtcgcctatgccgcgaccaagctgaacgagacgatccgctggcgcggcgaccgcaccgacgagttcgtcggcggcacccacggccgcgacctcacctcgaccggcgagttcgcgctcgacgccaagggccgcgtgctggcctaccgggtgcgctcgatcggcggcaccggcgcctattcctcgggcaccgccaacatcattccgctggtgctcggcccgttcgtgcagactggcgtctacgacctgccgctggtgcatttcgaggtgaagtcggtgatgacccacaccgcgccggtcggtgcctatcgcggcgccggcaggcccgaggccgtgttcatcgtcgagcggctgtttgacgccgccgcgcgccagatcggcatggacccgcgcaccatccgcaaggtcaactacatcaagccggcgcagctgccctacaccaatgcggtcgggcaggtgtacgattccggcgcgttcgcccacatgctggagcgcgcgtccgatctcgccgactggaacggctttgccgcgcgcaagaaggcggccaagaagaagggcctgctctatggccgcggcctgaccagctacatcgaatggaccggcggccgcgcccccaccgagaacgtctcgctgcatgcgaccgccgaaggccgcatcgtgctgcattccggcaccatggcgatggggcaggggctcgcgaccacctatacccagatgatttcagatgcgctcggcatcggcatggacaagatcgacgtgatccagggcgacacggaccttgccaccggcttcggcagcgtcggctcgcgctcgctgttcgtcggcggcaccgcggttgcggtctccgccaacgacatgatcaacaaggcgcgcgacaaggcctcccatttgctggaggcctcggtcggcgacatcgagtatcgcgacggcttcctcaccgtggtcggcaccgacaggcgcatcagcctgttcgagatcgcgaggaaagaaagcggcgcgaaactctcggtcgagagtgagggcaatgtcgacggcccgagctggccgaacggcacgcatatttgcgaggtcgagatcgatcccgagaccggcgtcacgcgcgtggtgcgctacaccacggtcgacgacgtcggcgtcgcggtcaatccgatgctggtgaccgggcaggtgcatggcggcgtcgtccagggcatcggccaggcgctgtacgaaggcgtggcctacagcgaggagggccaacttctgaccgcaagctatcaggactattgtatcccgcgcgcctcagacgttcccccgatgtcagtgacgctcgatccctccgcgccgtgcaagaccaatccgctgggcgccaagggctgcggcgagtccggcgcgatcggcgggccgccctgcatcaccaacggcgtgatggatgcgctgagcgaggtcgggatcacccagctcaacacgccgctgacgccggtgaagatctggcaggcgatcagggacgcgaaggttggggcggcgtaaggccgttctctgtccacccgtcattccgggcgcgcgtaagcgcgagcccggaatccatcgcgccacacgccatgcggcctgatggattccgggctcatcgctccgcgatgccctcagatgcgcaattgcgcatcggggaatgacgaggcagagtgccttacaatcccagcaccatcttcgcgatgatgtcgcgctggatctccgacgagccgccgaagatcgtatacgcccgcccgttgagatattccgggaccaccggcaatagctcctcgggaatcgccggctcgtggttgagccggtagaacggccgcgccggctcgacggcaaggccgtcctggccgatcacgtcgacgccgagccgcgtcaccgcctggcggatctcgctgacgcggagcttgatcagcgacgataccgcgccgggattctgcccggtctgcagcgccgacagcaccctgagctcggtcatctccagcgcgtcgatatcgacctcgacctccgacatccggatcgcgatgtcggggtcctcgatggctcggccggtgacatcggagcctgcgagatcggagatcgtcttcagcgcctcgcgcagttttgcagatgcgatcccggagccgcgctcgaactcgagcaggtacttgccgtaggtccagcccttgccttcctcgccgacgcggttggcgaccggcacccggacgtcgtcgaagaacacctggttgacctcgtggtcgccgccgatggtcaggatcgggcgcgtggtgatgcccggcgtcttcatgtcgatcaggatgaagctgatgccatcctgctgccgctcgccgtcgctggtgcgaaccagcgcgaacatgcggttggcgtggtgcgcatgcgtggtccagatcttggtgccgttgatgacgtagtcgtcgccgtcgcgcactgcgcgggtcttcagcgatgacaggtcggagcccgagcccggctcggaatagccctggcaccagtaatcctcgccggagagaatccgcggcagatagaagttctgctgctccggcgagccgaaaccgatgatgacggggccgaccatcttcacgcccatcacgttgacattcggcacgccggcgcgggcgcattcggcctcgaagatccagcgctgcgccggcgtccagtccggcccgccatgttccaccggccagcccggcgcgccccagcccttcttgtgcagcgcgcgttgccaggccatgccgatatcggggtcggagaacaccgacggagtcagcgcggtggcgcgcttcatctccggcgtcaggctactggcgatatagtcgcggacttcctgttcgaaggcgcgctcttcggcgctgaaggtgagatccatgatgcgctctccgttacgcgtgggcgcggccgctcagcgcggcgtggcggcgataatgatgggcgctgccgccgaacagcgtgtcgaaggcgagcagccgcttgaaataggcgccgatgtcgagctcctcggtgacgcccatggcgccgtgcagctgcaccgcctgctcggcgacgaaacgcgcgcatttgccgatcttcgccttggcgccggaggcggcacggccgcgggccacgggctcggcgttggccatcagcgccgcgcggagcgccatcgagcgcgcctcgtcgacctgcatcgccacgtcggcaaggcgatggcggatcacctggttggccgacagcggacggccgaactgttttcgaatcttggtgtattcgagcgtggtgtcgagcagcgtctgcatgatgccgaccgcctccgcgccgagcgccgccatcgcatggtcgaccacggtttcgatcgcgggcagcgcgtcgctgccgtcgccgagcaacgcatcggcgggcagttgcacgtccctgagatcgagattgcagccgcgcccgccgccgagccgcgcatagtcgcgcagagtgaggccgggcgcaccggtcggcaccaggaacagggcgagcttgccggatgcgccattggcgttggcaacgcgggcggacacgatgatctggccggcggccgcgccgtcgagcacggcgatcttgctgccgttcagccgccagccgccggcggtcttggtggctgtcgtgtcgacatgggcgaggtcgaagcgcgcagcgcgttccgaatgtgcaaaggcgagcgtcagcgcaccttcggcgaccctgggcaggatcgcctgctgctgtgcctcggtgccgcattcggcgaccagggctgcgccgatcaccaccgtggagaggaacggctcggacacgagcccgcggccgaacgcttccatcaacagcccgatctcgatcgcgccgccgccgagcccgccatgggcctcgctgatcggcagcgccagccagccgagctcggcgaattgcttccagatgtcgggcgaatagcccagcggatcgttcaccgccttcttgcgatgctccgatgtgaaggtttccgccacgaagcggtcggcactttcgcgcagcaggcgctgctcgtcactgagggtgaggtccatctggctttctacacgttggcggttttcttgacggagggatgcagacccgcggggtctaccaccatgccgaattcctgaaggttgtgggcgtggcagagctgatgcagcgcgaaggcctgatcgatcgcggccggctgccccatgatgtcgatcgagcggttcaccgcctccttgctcagcttcagcgcaaaagcgggttttgcggcgatcctgcgcgccagcgccagcgtgaacgacgagagatcgccgcgcggcaccacatggttgaccatgccgaggcgatgtgcctcgtcggcgctccagacatcggcagtgaacagcatctccttggccttgcgcgcaccgagttcccagggatgcacgaaccattcgacgccgcagacgcccatcgtcacaacgggatcgcagaactcggcgtcatggctcgcgacgatcaggtcgcaggcccaggccagcatcagcccgccggcaatgcacttgccgtggatttccgcgatcgtcggttttgccaaattgcgccagcgccgtgtgatctgcaggtagatctcctgctcgcgcgcgaaacggccgtgggcattgggttcggcgaagccgccccaatttccgactggcgggaaatcgacgcccgcctcgttcttgccggccggccgcagatcgtgaccggccgagaaatgcgggccattgccggcgaggatgatgaccttgaccgcatcgtcctgcaccgccttgtcgaaggcggcgttgaggtcgtaggtcatctgcaggttctgggcgttgcgcgcctcagggcggttcatcacgatccgcgtaaccgcagggtcgggccgctcgacaacgatcgtctcgaattgttcagataccaatggatcctcccgggatcgatttttccgccatgatgaacggcgcggggagggataggcaagggccatcatccgcaaaacaaggcgcgaaatccgcaccacgggattatcgggcgaaaatctgttaccgtgttggggaatccaccgggaggaccatcttcatgcgcaagctttggaccgtgctggcagcgctggcgaccttgagcctgaccaactgcggctacaacgcgatccagaccaatgacgagcaggtcaagtcgagctggtcggaagtggtgaatcagtaccagcggcgtgccgacctggtgccgaacctggtcaactcggtgaagggttttgcgcagcaggagaaggacgtgctgctcggcgtcaccaacgcgcgcgccaaggtcggcagcatccaggccacgcccgaggtgctcaacgaccccgcggcattccagaagttcacgcaggcgcagggcgaattgaccagcgcgctgtcgcggctgctggtcgtcaccgagaattacccgcagctgaaatcggatgcgctgttccgcgacctgatggcgcagctcgagggcaccgagaaccgcatcacggtggcgcgcaatcgctatatcaaggcggtgcaggactataacgtcggcatccgcaccttcccgaacaatctgacggcgatggcgttcggctacaaggagaagccgaacttctcggtcgagaatgagaaggagatttcgaccgcgccgaaggtcgatttcaatccgccgccatctcccgcggctgcgccgtcgaaatagcgccgtcgggcgcccgtcgcgatgatcgccgcacgcgtcatcctgttcgccttcctgctgggcatcatctgcccggcatgggccgaggtcgcggtgcctcagctcacgggccgcgtcgtcgaccagaccggcacgctatctgcaggcgatatcgcgtcactgaacgacaaactcagggatctggagacccgcaagggcagccagatcgcagtgctgatcgtgccgacgacggctgaggagaccatcgagcagttctcgatccgcgtcgccgaggcctggaagatcgggcgcaagaaggtcgacgatggcgcgctgttcgtcgtcgccaagaacgaccggcatttgcgcatcgaggtcggctacggcctcgaaggcgtgctgagcgacgtcgtcacccaccgcatcatcgacgaggacatcacgccgaaattcaaggccggcgatttcgccgcgggcatctcggccggcgtcgaccggatgatccgcctcgtcaatggcgagcaattgccggcgccggagcccgagcattggcaggggcccaatctcgtcgatctcgccaatccggtgacgatcttcatcgtcatcatcgtggccagcgtactgcgcgcgatactggggcggctgttgggctcggtcgcgaccggcggcatcgtcggcgcgttcgcctggatggttgccggctcgctcgccaccgcggtcgtcgtcgggctgttcgccgccgtcgcggcgctgatcttcggcggcttgaacttcggcggccccgcggcgggctcgggaccctaccggcgcggcggcggttattccggcggctggtccggcggcggtggctggggtggcggcggctcgagttcgagcggcggcttcagcggcggaggcggcggcttcggtggcggcggcgcctcggggagctggtagggatatgggcatcaagcgtatcggcaagcatctgctcgaacatcgttggcgcgttcggcgcgagtttccaccgcgcgtgctcgacgccatcgagcaggcgatcaaggccggcgaggccacccattccgggcagatccgcttcgtcgtcgagggcgcgctcgacggtgtgccgttgttccgcgatcagccggcgcgggagcgggcgctcgacgtgttctcgcatttgcggatctgggacacccatcacaacaatggtgtgctgatctatctgttgctcgccgaccgcgacgtcgagatcgttgctgaccgcggtatcgacgccaaggtcggccaggccggttggagcgcgatctgccgcgcgatggaagccgattttcgcgcaggccggttcgagcagggcgtggtcaacggcatcgccgcggtgtcgcgcgagctggctaagtatttcccgcatgcggagggcggcccgaacgagctgcctgacaagccggtggtgatttagcgcactgctcctctggaggggcagggcaatcgcagatgcaaagttcagtgtcgtcccggcgaaggccgggacccataaccacagggccttgttgttgaacaaggctgtggctccagctcgcttttatcaccacgccgtgtggttatgcgtcccggatctgcgctccgcttgtccgggacgacgaagttcttgtgccatatgcgattcccctgtcctggaggaggcgcgccgcacgcaatttccgaataatagaattatgccgctgagttgcccgacatgtcaagaaccccgtgtcgaatgccggcacgccgccggctactttgcatggggttgttttcgatgttttgtcagcgcgcccctccgggaggcgggctatatgcgataaccctgcccccaagggagggtgaagctcgacctacgccttcaccgacggccgctcgccgacgcgattgaaccaggcgacgatgttggcgttcgattgatccagcggctggccgacctggttgccgaaatcgatccagcagtagagcagcatgtcggccagcgtgaagcgttcgccgcagatgtatttgcggccgtcggccatctggtcatcgagccatttgatgcggttggcggcgatcatcttcaagcccggcgaggcttcgggcgccaccggaatccgcttctcgaagaatttcagcgcctcgccgaagcggtagccgttggcgagcggctcggcgatgttgagatcgacgcggcgcgtccacatccggcactccgcgcgctcttcgggcgtggtgccgatcatcgcaggcgaggggtgcttctcctcgagatattcgcagatcgcggtgatctccgagaggtagttgccgcaatcgagctcgagcgccggcatctggccgtgcggattgcgcctcagatgcgcctcctcgcggttctcgcccttgcgcaggtcgacggtctgcttggggatctcgatgcccttctcggccatgaacatgcgcacgatgcgcggattgggcccgatcgagtcgtaaagcttcatggtcctctctccctgtcttcttgctttgttgtgactgttgaacaggccgcgaatggatttgtcaaatgtacgggagggcgaagatcaatcgtcgagcttgttgaggtcgcgcaccgactgcatgatcggctcgaagttcgagcgggcatcgagtgcgtcgaacagctgcgcggtgtcctcgagcagggcgtgcgagcgttgcagcgcgatccgcacgtcgtcttgcggcgtatcggacaggcggccatgacccgacagcaggatcttggaattgaggcccttcagccgttccagcgactggatgtaatcggcgatcgagccggagccgaacacgccgcccatcacgccacccggcatcaacgtgtcggcggcgaacaacaggcccttgtcctgatcgaacagcgagatgcaggccgaggtgtgacccggcgtatacatcacgttgaggcggaaattgccgaggtcgatcagattgccttcctcgagccagatgtcgacgtcgatcggcgcgttcggttcgttgaacatcttgcgcagcatcgagaagtcgtcgcgcagcatgatcttgttggcggcgagccggtgtgcggcgatgtaagctgagccgtggaaatgataggccgctccgatgtggtcgagatgctcgtggctcagcaccaccatgtcgatcatcgcgggcgtcaccccgagatggtcgagacaggcgacgagcgagggataattggtcgacagcccgacgtcgatcatgatggtccgcttgctgccgcgcaccagataggcgttcgccgcgcggttcttgaagcggatctggtagacgtcgtcggctgcctggatcagggtggcgacgtcggcctcgaacagcgttctgaacgggcttggtttgcgctcactcatgtgcggccgccgcccggtaagtgacggcgttggacgcgcgcaggcgtttcgagagcgcatccatcaccatcagcgcgaaggccggctgctggctgaccaggtagacgaagcgggcgtggttgatccgcatcacgcgcgtcgcgggcgcggaggcgatggcggttgccgagcgcgccgagccgtcgatcacggccatctcgccgaagaactcgcctttgccgaggctgacgatgacggtcttgtttccgccatcgatcttggcgatgtcgaccgtgccgtcgagcacgacgaacaactcgcggccggtcgagccttcctcaaaaatgacgtcatcgacatcaaattccttgatgcacttctcgatcgtcatggcactcccctgccttctggctggaagatggcggtatgttaattgggaaagcgccgcgcgcaaacggagctgacgcagattgccgcagcgccgcatcgcccaaatccggcccggaaaactccctaaaatttaggtaatggcgcgacggggtaaccatttcgcaagcaataaaagttaccgaattgtcaacctagcctggagactttgaacgtgagtgagcagcagagcaagccggtcagcggtcagaccggcgccgaaatggcggcgaagagcgagcccgcaatggccgcggccggtgtcgaggctccgaggctcgcgcccgagcaggaagagacgtcgccaaaggccgacgcgcccaggatggacgcgccgaaggttgaatcccccaaggttgagccgtcccggctcgatcccatgatcgaggccaagatcgacgccaagctcgatgccaagatcgagccgaccaatatggatgtgcccaaggtcgagaccggcaagcgagcagagccgcgtttcccgggcaagctgatgatcatggcgcccggtgaccggacctgggatcatgaggcgaccgcctccaagccgggcgccgagcaggctgccaaaccggccggcacccgtcggttcggggcgatggccgcggtgatcgcgctggcgactgtggcaggcgccatcggtggcgcgctcgcgaccgcgggcctcggccatctcaccagcccagccgctgcctccgccaaggatacggctgccaaggagacggccgccaaggacgcgctcgacgcctcgatcgccaggatcgatggcgaaatcgctgccctgaagtccagcatcgaccagaccgccaggaacgggaccgttcagttcagcaaggccagcgagcggatcgagaaggtcgagaaggcccaggccgagccgatcgccaggctcaacaagctcagcgagaccgtcgacaagctccgcgccccgcagacgaccgtcgcggcggcgacgcccgcccgcgaggtcacgggctcggtcaccccggcggctgccgcggctgcaccggccgcgccgaggccggaggtcggccgcctgccggtggtcgacggctgggcgctgcgcgacgtcggcaatggtggcgcgctgatcgagggccgcggcggcatctacgaggtctatgctggcgatcccgtcccaggccttggccgcgtcgacgccatccgcaagcaggacggccgctgggtggtggtcaccagcaagggtctgatcgtttcgcgttgattgcggaaagacgacgataccaaggcgcttcaccgcgatgtgaagcgccttttttcttgaatagggtttgccgcgcggtgttagtggaggcatgggccgcgcgctgaaatgcctcctgataatgtccgttctgctcggtgccgccgtgcctgcacgcgccgcagaggatcgcgcgctcgagcgtggcgtggcggtgatcgatcccgcgattctgcgcgagctcgatcacagccgcttcagcctcggccggatgctcgcgccggatcgctccgccgacacgccgttgtccaatcgcgacctgttcgccttgcccgctctggtgccggtgcgcgaggcgctcgaccacgaattcgatcgatatgtatcgaagcatcaggcaagcctgccgaacgagagcatcggcgtcggcgacgcttttgcgtttcagctgttcgaccgtgcgctgctggggtcacctgatgtccgcttcgtgctggctggcatcgtcaaccgcatggaccgcgcctatgtggcgccgaaggactgcggcgagatccggctgatctatcgactgacgcgcaccgatgtgccgctgatcggcgagaacgcggtctcgcagcggctgccgatgacgctgaacctggtgctgaaggcgaagggcgacggcaatgacgcgtcgctcagctgccgcgagatcgcgcggcgctggctcgcgaccgctagcgcgccgcctgcgatggataaattgttcggcaaggacgggccgctcgatttgatcgatgcccggaatatcgatcgcatcgagaccaatctgcagattgcgcacgcgccgaaatccgcggtgcgcgatttccgcaccgactatctgctcaaggtgttcgactatgacggcgcggcaaaacgctttgccgaggcgccgctggagaaccagatcgatcgcgaccgcatcctggcagacgaggcgctcaagcgcgacttcaaggcctggctgctcgatcccaaacattttgtcgaactcgatcgcggcaccttgctgatcccggatcgcttcctcgcaatctcggcggtggcgcccactccgatcggtttcgatgtcagcaacctcgagcccgaattcggcctggtgcagggcgaggggacgtccggcgacgcggtgttctcggacagcgatgtcgtcggtgccttgcagaaggccgcgtcggacggaacgcggctgcaaatcatccagtcgctggccggcttcgaacgacgcctcaacgacgtcacctgcgccggttgccaccagacccgcggcatcggcggttttcatttcccgggcgtcgactggatggcagcaaagccgtcgaactccaccgtggtgccggcctcgccgcacttcttcggcgaccagcctcgccgccgcgatatcctctcaagcttccgcgacggcaagacgccggatttttcccgcggcttctccaaccggccgcagctgcgggccagcgccgagcttgccggcactgagtacagcgacggctggggcgcgcattgctatctgccgggcaccaagccggccgaggccgaccgcagtttccgcggctggacctgtgccgaggggctagcgtgccaggtcgcggggaagacctcgcggatggggatgtgcttcgtaaaggggaggtaactcctcactggaaccgaagcgtctccgcgtcattatttgatgctacactcgagcttgccaaagacctgaagctcttgaccggagaccggcctgatgagtgcttccgaggacaacaagcaacgcaaccgcgagatcgcggccaacgaggccgagcgtcaggcggtcagtgccgtccgcgtcagcagctgggcgatcgggctcgcggtcatcatcggcatcatcgtggtagccatcgtctgggcctggatgaaacgttgatcccggatttcgtttcgctccatccgggccactcacgacgtggtcgatgtgctatgccaccgcgccggacgcacgcagcttccggatcgtggcctcgtcgtagccggcctggcgcaggatctcgtcggaatgctcgccgacctcgggcggcttgcgcggctgcaccttcttggcgccgtcgatgaagatcgggctgttgacggtcagcatggtgtcgttctcgaagcgcaccagcacctcgttctcgatcatctgcttgtcgttcgggatgtcgtcgaggatgccgacgacgccgaacaccaggccgttgccgtcgaggatcttgcgccattctgcgagatccttgctcgcgaacacctcgtcgaagatcttgatcagctcgaccgagcgcgcatggcggtcagctttggtcgcgaagcgggcatcggcgacgaggtcctcgcggcccatgcagcgcgccagcgtcggccattgccggtcttcgttgagcagcgacaggatcagccagcggccgtccctgcacttgtagtggttggtgacggcgttgagcgcctcttcgcgcggcttgcgcttcttgaacttggcgccggcgagcttggcctgcgccagcacgccattggcccagacgccgttggccatcagattggtcgagacgtgcgagcccttgccggtcttctcgcgctggaacagcgcggtgacgatcgcgccgtagaacgccatcgcgcaggggtgatcgcccatgccggcgaccgaacgcgccggcgtggtgtcctcgtcggcgcgcaccagatccatcaggccggagcgggcccaataggcgttggaatcgaagccgggcttgttggcctcttcacccttctcgccatagccggtgaaggacgcgtagatcagccggtcgttgagatggccgagatggtcgtgggtgatgccgagcttttcgcgcacttgcggcggcatgttggtgatgaacacgtcggcctcggcgacgagcttgtagagcacctcgcgcgcctcgggcttggtcagatcgagcgcgaggctcttcttgttgcgggcctccagcatccacgcgaaattatgctcgcttgcgggatagccgggcagattgggcaggttgcggtagggatcgccggcgccgggcggctcgatcttgatgacgtcggcgccgaagtcggacagcacggtggcggccgcgggcgccgcgatgaagctcgcgcagtccaggaccttgagcccgtcaaaaatgcctttttccatcgtgccctcgctcccgtggcgcttgttggtgtttttccggtagctggaattatcgcgtgcgatcattccgatcggatcgccatttgacccatctcgggggcacgatgcaacgggttgttggggcgtcattgcgaaaggagcgaagcaatccatacctgacctcggggatggattgcttcgtggcttcgctcctcgcaatgacgcgtccgactactcgacccctgccatcagcgcggcgttgccgccggcggcggcggtgttgatcgtgatcgtctgctcggtggcgaaccgcgcaagatagtgcgggccgccggccttggggccggtgcccgagaggccactgccgccgaacggctgcacgccgacgaccgcgccgatcatgttgcggttgacatagatgttgccgacctgaaggcgctcgatcacgtgttcgatggtgtcgtcgatgcgggaatggatgccgagcgtcagtccgaagccggttgcctcgatcgcggcgagcacctcaccgagccgctcggcgcgatagcgcacgacgtgcaggatcgggccgaacacctcttcgctgagctggcttgccgacgacagctcgaagatatgcggcgcgacgaaattgcctaatggcgcctcgccggcgagatgcacccgcgcctgctgtttcatccgcgcgatatgcgcgtcgagtcgttgcttggcctcagcatcgatcaccggtccgacatgcgtcgatggctcggagggatcgccgatcttcaattcgcgcgcggcgcccgcgatcatctcgatcatgcggtcggcgacgtcgtcctgcacgaacaacagtctgagcgccgagcagcgctggccggcggaacggaacgccgaggtcacgacatcgtcggcgacctgctcgggcagcgcggtggcatcgacgatcatggcattgatgccgccggtctcggcgatcagcggtacgatcgggccgtccttggccgcgagcgtccggttgatcgagcgcgccacctccgtcgagccggtgaagaccacgccggcgatggcgggatgattgaccagcgccgcgccggccgcgccgtcgccttgaaccagatgcagcgccgacgtcggcacgcccgcctgatgcagcagggcgacggcctcggccgcaatgcgcggcgtttgctcggccggctttgcgatcactgcattgccggccatcagtgccgccgtcacctggccgaggaagatcgcgagcgggaaattccatggcgagatcgcgacgaacgcgccgcggccgtgcaactccagcacgttgctctcgccggtcggccccggcatcgtctcgccttgctcgaacagcgtccggccttgtgccgcatagtagcggcagaagtcgatcgcctcgcgcacctcggagagtgcgtcgtcgagcgtcttgcctccttcgctctgcagcagtgcgaggaagtgggcacggcgctgcgcgagcagatcggcagccttgtccagcatggccgcgcgccgtgtggccggcgtcgcgttccaggccttgaagccgctgcgtgcggcggcgacggcggcattcgcctgttcgttcgtcgatgccgcgaccgcaccagacgccgccttgggttcgactgttatcgccgacgtcaacgcatcgagcgcctttcgctcgccgaactcgatgccgtgcgaattctcgcgctgcggccggtaaagatcggccggcagcggaattccggaatacgccgcgttgtcatcggcgccgatgatctcggcagggcggcgcaacaggtccacgatggagacgcgattgtccgcggccagcgccacaaacgacgaattggcgccgttctcgagcaggcgccgcaccagataggcgagcaggtcgcggtggctgccgaccggcgcataagtgcggtgggcgatctcaggacgatcctggccgagctgcgcgtagagcgcctcgcccatgccatgcagccgctggaattcgaagcttgagggatcgtccgacagttcgaggatggtcgcgacggtcaacgcgttgtgggtggcaaattgcggaaacagctgcggccgcagcgccagcagcttgcgcgcacaggtgatgtagttcaggtcggtcatcgccttgcgggtgaacaccggatagccgtcgagcccacgctcctgcgcgcgcttgatctcggtgtcccaataggcgcccttgacgaggcgcaccatcatcctgcggtcgagtgcgcgcgtcagcgcgtcgatatagtcgatcacgtcggtggcgcgcttctgataggcctggatcgcaagcccgaagccgctccagccggcgagcgacggatcggcgaaggcagccgcgatgacgtcgagcgacagctccagccggtcggcctcctcggcatcgacggtgaagttgaggtcgtacgccttggcgcggcgcgccaggtcgatcagctgcggcaccagctcgcccatcacccgcgcatggctcaccgcctcgaaccgcggatgcagtgcggacagcttgaccgagatgccgggccgatcgggcagggcctgatcgccggccgccttgccgatcgcctcgatcgcgcgggcgtaggattcgaaatagcggcttgcgtcgtcggcggtgcgcgcgccctcgccgagcatgtcgaacgaatagcgcgagccgcgcgccgtgtgcgattgcgcccgcgccagcgccgcctcgatggtttcgccgagcacgaaatggctgcccatcagccgcatcgcctgccgcgtcgccgcgcgcaccgccggcgcgccgagccgcttggtcagccggccgatcgtgccctgcggcgtctcgccgggctggatcacgcgcgccgacatgccgagcgcccaggccgaggcgttgaccaggaatgcgctggatttggtctcgtggttgacgaagtcgccctggccgagcttgtcctcgatgaactggtcggcggtgcgcgcgtcgggcacgcggagcagcgcctccgccagcaccatcagcgccaacccctctttggtcgacagcgcgaactcccgcagcatgtcctcgaccccgccgagcggatcgtcattggccctgatcgcttcgatcaggcgggtcgcgctgcggtcgatcctggcctccttgtccgcgcccagcccggcgttctgacgcaggcggctggcgatcgccgtgtcatcgggggcgtagggcgcgctgaacgggggcgggagctggtctggcatggcggtttctcggcggttcctcggggttgcacgggaacacctacgcgtccgtggaccgtagttcgatagacaaattagcagatttgccttagaaaatctggatagttgatggtttggccgtggatatgacagaaatcgacaagacagaccgcaaaatcctctcgatcctgcaaggggatggccggattgccaatgtggaactggccgagaggatcggcctgtcgccgacctccgtcggtgaacggctgaagcggctgcagcgcgacggcttcgtcgagggctatggcgcgcgactcaatccgcaccggctgggccttggcctcctggtgttcgtcgaggtgctgctcgacaagaccacgcccgacgtgttcgagcgcttcgccagggcggtgcagaccgcgccggaagtgctggagtgtcacatggtggccggcggcttcgactatctggtcaaggcgcgcgtcgccaacatgaccgcctatcgccggtttctcggcgagacgctgctggcgctgccgggtgtgcgcgagacgcgaacctatgcggtgatggaggaagtcaagcgcgacgcgccgctgccggtcggctgatctgatccacagccatgcgccggataccttggcatcgcgccgcacccgcgataattctccctccagttgggggccgcgacatggacgataccaatcagccgatacgtgcgaagcgaaccggggttgccggcgcgttatgcgtcgcgacgttgtccctgttcgcgatgacgccggcccctgcggccgagctcagctccggcatcatgcagctctacacatcggtgtcgatctatccgccgtcggcctcggtgatgacggtgtgctacggcttcgtctgccggcgccgtgagatgctcgacttcagcgcggccgacagagccgcgttgacccggatcatggccaccggccgtgccaacgccgccgccgaacgcgccgccgtgcaaaaggccgtgatctggttcgatcgccggatggggccgatcctcggcaccaacaagcgtgtcgcgaaagcggacttccgcgccaacgatgatcagcacaattacgactgctgggacaccacccgcaacacgaccagcctgatgctggtgatgcagacctggaacctgttcaagttccacgatgtgggggatcctcattatcgcggctttcagttgatgcagacgccgcacaataccgccgtgctggtggaacgcgccaccaaggtggaatgggccgtcgatctctggccccgcggttatctgcaaccgcctgatgtcatgaccgtcgccaagtgggtgacggaagactgaacggctgaatggaggccgggtggcggcagcagcgtgatgaactggtcgcgatgatatcgccaatagctgtcatgccccggacgccgcgcccattcgatccatcggccggattcggcgtcccagctgtcggcgagattcatgcgcggcccctcgtccctgacgccgttgcgatgttgagctgcgcaatcgggtggtcgcgcgatagcggattggcgcgtcggcaatagggcgatgcccgatgtaacgggcaaatggccaatagcggcacgtggtcgatgacggctgggaaaaattcgatgccgtggcgcgcgggcaccgtgcccgctccgccgaacgtcacgcgtgtgatgttggattcggccctcactcccggatggcgtccgagagtgcgccgctcgatcttgcgcggtgcgctagaccttgaggttctcggctgacgtcttgccgcgatttgcgatctcttcgtattcaaccgattggccttcgttcagggactgcagaccagccttctgaaccgccgaaatatgcacgaaaatgtccttaccgcccgttgcgggctggatgaatccataacccttggtcgggttgaaccacttcactgtacctttgggcattccagtcgtctccgcggaatcaatcgaaaacagaccagctggtccccgcacaaaccggcttgtccgcaccgcacaggatagcagtttggaaaaagctgggtagatcaaaccacggtgtgtttttgcccggaaacaacccgctttgtggggttttggtgccggattgcctgtttcgtggtcaattgatgcgctgcaaaaacagatcagttcctctgagccgaattggataggtcaacccacgcgcggcctgtcggccagcgcgcggggatggatcgaccgcgtctcaataggtcgcggaaagatactcgacgatcttgccgacgtcggcctgatcgatcggcgcaccgtagaccttgatcatcttggtcacctcggcctgccagaagtctttcttgaacttctcgccctgcggctgggtcttgatgtagtccgccgagtggcagccggtgcagttgctctggaccacgtcgaggttcggacccggcttgaacgaagcggtctcctcgggaagcgtgtagttgacgggcgtggcgatcgcagccccgatcgagagggccgcgcccgcggcgagggaagcaagcagcttgctggtcatgatgcttctcctcacgccgcggtgacgcgcacggtttcgacgacgttgcgcagatagccggcgggattccacaacggatccatcggctgggtgtcgccggcattgttggtggcgcgcaccttcagctccgacgggccggggggaagcgtgactttcagcttccattcgcggaaggcgtatttgccgaggtccttgccgagcttggccggtgtccagatcttgccgccgtcggtcgagaccacgacctccttgatgcccttgccgccgtcgaaggcgatgccgcgcagcgtggtgaggccggccttcagcctggcgccgtcggcaatgctggtcatgaacgagcgtaccgtgaagcggttgatcgggatcgtcgccttcggcgcggtgccgggctcgaccgcgttgttcggcgtatccggaatccggtaggcggacttcatccagaagccgtcgaacacgttgtcgatcaccgtgatctcgttgaggtgcttcacccaataggtgccgtaatagccgggcaccacgaggcggagcggaaatccgttgaggaacggcaggtcctcgccgttcatgccccaggccagcatcacctcgccatcgcgcgcatggtcgatgtcgagcgctttcacgaaatcgggcgtcgtctccatgacagggccgtccatgccattgaaggtgacctgcttggcgccggcctgcacgccggccatgtcgagcacggtcttcagcggcacgccgtgccagcgcgcacagcccatcgcgccgttgccgagctggccgccggcgacgcgcggattgaagaagccgcggctgttgccggagcactggttgacggcgaccagctcgatcggcttcagcttgcggatatccttcagcgacagcctcagcggcttgtcgaccttgcccttgatctcgagcgtgaacttgtccggatcgaggtcgtaggggatgccggcgaggtgatagcggacgaagaacgcgttgttcggcgtcagcggaccgtcgttgaagattgcaaacggggtttcgagctgcggcggccggctggtcaggccgatcatcgggcgcttctgggggtagcgcaccagcggccgttcgccgttgtcgaagggcagtgtcacggtgtcgagggcgagcgcgccccttgatcccagccccgtcaccaaagccgccaacccggcgcgcctcatcaagtctcgtcgatcgagcattccgcttcctccgaagctgttctgtcgtgagctggtcatcaccaggctcaccttggcctgcgcgccttcgcatcatggactgcgcgcggcgacaaatgtcgcatcggggaaccgcgagtcaattgagctttcgcagcgttgcgtcgcaacaacgagaagccccggtcgcgcgggcgaccggggcatttccagcgacgtcgaaggttcgatcagtagcagacgttgacggtgcgatagcgatagccgtagggcgtcattaccaggcgggtgacgtagcagccggagtcgacgaagccgacggagatgcccgggccaccccagaagtgatggtggtacggatgccagaagaacggcttggcggacgccgaggtcggcgccagcgcggcggcgccgagggttgcggcagtagcgagagcaagcgtgactttgcgaagcatggtcgtctccttcagatgcgcgttgagctctgtcgcggcgcggttgcagtgttacccatcgccagtcagtcgcatccggcacgggacgcgttcgagcatcgcggctgaacgctccgctggatgtgcggcaggtcacactcggtgaagggggatgaagcggtcaggccgcgacggcgcgccggtcgtcgaccagcgcggacaggatgcgcgtcgcctcgacggtgcgcaccgtcatcggctcgttgcggccgcggatcgcgacctcctgcgccggcagggcatcgtcggcgaggcccgcggtgacgcgcacctcgtcggaaatgacggcctcgcaggccagcgccttggtcatgtcctggagccgtgcggcgacgttgacggcatcaccgagcgcggtgaacaccatatggtcgcgatagccgatatcgccgacgatcacctcgccgccatggatgccgatgccgaagcggatcggctcgcgcagatcgtggctgagaaattggttcagttcgtcgatattggttgcgatcaatgccgccgcgcgcagcgcctggcggcaggcctcgtgccggtcggaggagagcccgaacagcgccagcatgccgtcgccgatgaactggttgggccgcccgccggcttccagcaccgcttgcgatacagcgccgaggaagcggttgacgatgaacacggtgtcgaacggcagccgcttctcggccagctgagtcgagccgcgcatgtcgacgaacatgctgacgagataacgctcctggccgacccgcgtcggattgccggcatgcgcgttggccgacatcgtgctcggcaggaacagctggaagaaggtcaggtcgccggtcggccgcaactggcaggccagccggatcgacggatcgtcggtgccgacccggtgcagcacgaaggcttcgcgcggcgaaggctcgggcagggcggcgtgatcgccgatgacgcggatgcggcaggtcgagcagcgtgcgcggccgccgcagacgctcgcatgaggcacgttgtagcgcaggctcgcttccagcacgctcaagcccttcggcacccgcagcgtgcggccgttgccgtaggacaatgcgatcatgccgccgcggcgttcgagcagggtccgcgcgccgcgcgcgagcagcacgaggccgagcaggccgagatagccgatcgtcaggtcatcggtgatcttctcgagcatggccccctgcgccgccgtgccgagcttctgcaccgacagctcctcgcgccgccagtcgggatcctggtagtcggcgatcgtggcgcggccggcctgatagatgccgagcatcgccagcgtcgggatcaacacggctccggcgagcaggaacggcgccgcacgcttgaagaacgggcgcatccgcagccagaaatacaggccgatgcagccatgcacccaggcgaccaccagcaccgccagcatctgccacagccggttcggcgacgcgatgaagaacgtatacagctcctgcggatagagcttctcgtgcccatacagggcttgcccgagccggacgccgacgacatgcacgatgaccagcatcggaacgctgaggccgagcgcaagctgcagcggctcgatcgccttccagtggaactcgcgccgctcgaacaacgcccagatgcctagcgcggtgtgcaccaggcaggccgagtagaacacgatggcgaccggcaggaaccgccagaattcggtgtggtagtacaccccgatcgcgagcgcctcggtcgagatattgcccagcgcatggttgaggaaatggctgatcaggtaggcgaacatgatcgtcccggtcaccaggcggacctgccgctggccgatgccgcgggccatgtcctgcaggtgctcgcgcgagggggaggtcatgtgattcatgatctgcaagtctaatgtttaattcccgcgctgaacaccaccaccgcgggccggttgggccgcggcagccggaggtgcgttgacactccgttaagagtcgaacaaaaagccgccgtgacgatagcccaagccgaacctaaacccggagccggtagcatcagcgttaagccggcccgttcgcgggcgccggattggcggggcgtcatcgccgcgatcgttgccatgaccgcgatgcggctggtctatgcccatgcgctcgatttgcgcaccgacgaggcctattactggacctggtcgaaggaaaacgtgctgtcgttcctcgaccatccgccgatggtcgcctggttcatccgcttcggcaccgctgttctcggcgacaccaatctcggcgtccgcctcggtggcattgtggcgatgctggtgacccagctgctgctcgccgacatcgtccgtcgcgtcacgtcaaacaatgtccgcgcggttatgctggcgttgctgctgccggaagccgcactctactacgggttgttgatggccaaggtggcgcccgacacggcgctgatcccgttctcggtggcgatgctgtggtcgctggtgcggctcgcgcagagccatgatgggcgctggtggctcgccgccgggctgttcgcagggcttgcgctgctgtcgaaattcaccgcgatcatgttcgcgccggcggtgctcgcctttgcgctggtgccggactggcgctggcgctggctgcgcagcccgtatccctacctcgccgcgctgatcgcgatcgtcgtgttctcgccggtgctgatctggaatgcggagcatgactgggcctcgtttcgcttccaggcggtgcgcgccaccgtcgaacgcgatctgacgctgcgcaccctcggcgaattcatcggcatgcagttcggcctggtcggtttcgtgctgctgccggtgacgctgttcgcaacagggctgacggcctggcgcggctatcgcaagcgcgagccggtggcgatcctgctggcgacggcggtgctggtgccgctcgtctatttcctctggaagtcgctgaccttgcgggtcggcgacacctggccgatgttcttgtggccggccggctttgctgcggtcgccatcaatctgacgcggatgccgttcgagggctggtcgaccggtctcgccaaatcgacgatctattgggctcggaccgcgatctcgacaggcatcgccttcgtcgtctgcgtgttcctgtattacatgttcgcgccgtggaatctgatcggccctaccgatccgatcggcaccgaggcaggctacgacgcggtggccgcgcataccctggcgcaggttgaggcgaccggcgcgacctgggtcgcgaccacggactaccgcacctatgcgatgctgaggtggatgctgcgcggtcgggtgccggtggtcgagatcaacgagcgcggccgcttccagggctttgccgatcccggcatggacaagatccgcgatcacacaggcatctacgtcgggcgcgaacccgagaacaatctgccgctgtggaatgaaaccactgcggtgcgtcagccgctggagcgcgtgacgcgaagctggcgcggcatggtgatggacacctacgcgctggagaagatctcaggctggacgcccgatctgtcgccgccgccggacaccacattcttccgctggcgcgtgctggcgatgctctcagagccttgcgagatcaccttctccccttgtgggagaaggtggcagccaaaggctgccggatgaggggcccctctccgcaggcgcggtgtgtaaggatggatacccctcacccaagcgagcctttgacggctgcctgagctgccctctcccacaagggagagggcgcagcgatgggcgccgttccgcgtcgaaacgacgaagcgctattcctcttcgtcgcgcttgcggatcaaatccttcgccagatcggtcagcgcggggcggggcaaagcgttgaagggaagcgggcgggtgacgtcgatcgcggcgaggccgaggcgggcggtcaacaggccgttgagcatgccttcgccgagccgctgcgagagttttgccgcgatgccgtggccgagcatctgctggatcaggctgtcgctcgcggccatgccgccggtgatcgcgagatgcgcgatcacgtggcgcagcaggcggatcatgccgagcgcgccgggccggccgccatagagccgcgccagctgccggatcatccgcaagctcgccacgaacacgaacagcacgtcgaacagcgcgcgcgggctgaccgcggtgacgacagagacgcgctgcgccgccgacgacaccagccgccgcgcctcctcgtcgagcggcgtcatcaattcgcgctcggcgaggcggatcatgtcggcaccgtcgatgatatcatcggtgtggctctgcagcgcgctgcgcgcgcgggcgagttgcggggtgtggtgcgcgagtttgagcaggtcggcgacgacggcccggctcgcggcgcggtcgtcgctgatcagcacctcggcggcgcgcagatgcagcttctcgatggtcgcaagccgcgccaggccgaccagctcgcgcatggtgacgaccgccagcgccaccgcagcgaccacggcgagcgccagcccgaggaagccgaggccttcgttgcgcgcgaacagatcctcgatcaggttgaggacgccaagcccgctgccgagcacgacgaggcccgcgaccgcgctccagaacagcgtgccccagcggaagccgcggcgcgcgggcagcagcggcgtatctgccggcaccggcagctgtgccggctcagcctcgggcacgatctggatcgtgccgcgcgtgagacggccgctatcctccggatccatcacgaccacgccgggatcgtcgagcttgaacgtcgccggccgccgcgggggcgtcttctcgttcattgcagtttgtctccgatcaggaactggagggcgcggtcaaggcggatgtgaggcagcgccggctccgcatcgccgtttcgttccagcttcggcggccggaagcgcaggaaacgataatcggccgcctcggcgcccgagctggagaggccgcggaatcctccattgaacagctcctccggattgtcgggcaggtcgcccggaaaggtcgcgacctcggtctcgccatccagcgtctcgccgttggcgacctcgcccggtgccggcgtgccgaggatcgacggcagtctgtcccggccgcgctggacctgcgcctcgcgggtggcgcgcaccgcggcgagcgcgacgacgtcgatttcggcgccggcatattcggcgcgcgcggcggccctggccacgatccgccgcagcacggcttcgagccggtcgtggctctggtggtgcaggtggtcggccttggtcgccgcgaacaggatgcggtcgatgcgcggccggaacagcgcgctcaggatcgtgctgcggccgatccggaagcagtcgaggatgccggcgagcgcagcctcgaggtcgtgcaaggcctcggggccggcattgaacgcggcgagcgcatcggcgagcacgatctggcgatcgagccgcgcgaaatggtcgcggaagaacggccgcaccacgacgtccttgtaggcctcgtatcgtcgccgcatcatcgcccatagcgagtgatcgggcgcgctgccgtccatgggcacgtcgagcggcgcgaaggtcagcgccggcgtgtcggcgagattgcccggcatcaggaagcggcccggcggcagcaggctcatcgcgaaacgctcgtcgcggcaggcgcgaagataatcggtgaacaggcgcgcctcggtgagcgcggcctgctcgtcctctctcgcttcgggcttcagcgtggccagatgggcgtgccagggcgccgcgagtttcgcgcgcagcggctcgcgcgacaacgcaaggctttccgccgaccattgctcgtagctcttgctcagcagcggcaggtcgagcagccattcgccgggataatcgacgatatcgagggtgagcgtgcggtccgcgccattttgccgctgatactcgatcacgagccggagttcggagatgtcggtggtcgagctcggccaaagccgttcctcgaccaatgtccggacatggttctcataggcgaagcgcggcaccgcatcgtcgggctgcggagcgaggtaggcgcgcgcgatccgtcccgaggcataggcctcgaataccgggaagcggccgccgcgggtcaggccgtgcaccagcgcagtgatgaacacggtcttgccggcgcgcgacaggccggtgacgccgagccgcaccgtcgggttgaacaagccctcgccatagtcgagcagcgcccgcgccgagagacgggcttcctcgacgatatcagagaaactcgggggcatggagggttaacgacaaacccggcaggagggaccaaaagggcgggcgatcacccgcaaggtggcgattatcgggccaaaatcaagcttcacatttccggcgcctttacaggcgaggggaattgaacgcatcacgccacccgcgttacccatatccatcggcccacaggaaagcctgcatgacggtcttccgcctgaagcaactcgcctcgacctcgatccacgcggctggtaccgcgctgtgggactacgaccgggccgagctgatcgccgacggcgtcgttcatctggtcggcgtcgctttcgggctggttgcagccaccgcgctgatcgtgctgaccgcggtctatgccggcccgttcgatgtcgccgtggtgtcggtctatgtcgcgggcctgctcgcgatgctgacgctgtcggcgacctataatctctggccggtgtcgcgcgccaaatgggtgctgcggcgcttcgatcactccgcgatctatctgttgatcgccgcgacctacacgccgttcatcgtggaattgaaggacagctattttgcgatcgcgctcctggtcggcgtgtggtgcgtggcgatcgtcggcatctggctcaagctgcgttatcccggccgcttcgaccggctctcggtcgggctctatctcgcgatgggctggagcggcatcatgctctacgaccgcgtcgtcaaggcgctgccggcgatggcgctcggcttcgtgctggcgggcggcattctttacagcctcggcgtgatcttccactcctggcggcggctgcgcttccagaatgcgatctggcacggcttcgtgctgctcggagccgcctgccactatacggcggtgttcgacgtggtgctggcgagctagcgcggacttcagaaggccgggccggcctctcgaaaagatcatgcatcggcaaaagatgcgctatcatggtcgctcttcgttgagcatgagaccggcttccggatcatgccctgaaatcaagatatcgggaggatggccatgcaggtggcaggtaaggtcgtggtggtcaccggcggtggcaatggcatcggtaaggcgctgtgcgaggcgttccacgccgccggtgcctccaaggtcgtggtggtcgatctcgatcatgcggccgccgagaaggtcgccgcctcggtcggcggcgccgccttcaaatgcgacgtcggtcaggagaagaacgtcctgcatgtgatcgaggagaccgagcgcatgttcggcccgatcgcgctgttctgctccaatgccggcatcggcggcggcttcgatccgctgtcgaagaatgccggcggcacctcggacgagccgtggtcgcggagctgggcgatccacgtgatggcgcatgtctatgccgcgcggcatctggtgccgcgcatgaaggcgcgcggcgagggctactttctcaacacgatctcggccgcgggcctcttgtcccaggtcggcagtcccgcttactcgaccaccaagcacgccgcggtcggcttcgccgaaaacctcgcgatctcgcaccgcgccgacaacatcaaggtctcgatcctctgcccgcagggcgtcgacaccaacatgctgcgctcgatcccgaagggcccgcaatccggcgacggcgatctcacggcggagcaggtcgcgcaggacgcgctgaggggtatcgagcaggagaccttcctgatcctgccgcacccgcaggtgcttggctacatgcgcaagaagaccgagaactacgaccgctggatcggcggcatggccaagatccaggccaagatgcgcgagagctacgggacgtgactcgcggcgcgtgtgcccaagtccgtcgccgtgaggtgagcaccctggtcaggctccctctcctgcaagggggagggaactcttccgccggtgccttcctgacgagagcgtagaaattgcgtctgccgctcagcccttctgcgtgtagagcagcggcaccgcggaatcgaccatcacctcgatcaggctggcgccggttgccgacaagccacgcttgtaggcgtccgcgagttcggccgacttcgtcacccgcaccgcgtcgcagcccatgccctcggcgagcttgacgaaatcgatgccgggcaggtcgaggcccggcacattgcgcacctgcatcacctggctgaacgagcgcattgcgccgtagccggaattgttcatcaccacgaccgtcagcggcagcttgcgctgcgccgcagtccacagcgcctggatcgaatacatcgccgagccgtcgccgatcaggcaaaccgtgcgccccgtgctgcggccgagtgccatgccgaccgcggctggcaggctgtagccaaggccgccgctcgccatggtgtagaaactgtcctggccgcgcatcggcatcgccttctgcatcagcgggcgatgcgacggcacctcctcgaccagcgcatcgtgcggccccatcgccgccgagagcgcgtgtagcgcatattcggcggggatcgggtcgccggctgcgggcgctggtggcaggatgcggccggccggtgccgcacgcttcgtttcgggcagcaactcgagcagcgccgacagcgccggcttcatggtggcgacgatgctgtggccggtcggggtcatcgcggcggcatcgggatcgtcggtgatctggaagatcgtggtcgcgccgtcgaagatcgcggcatggccctcgacgtggaaggtgaagacgggcgcgccgaccacgacgacaagatcgtgctcgcgcagcgcgtcggagagctggcccggcgctgcgtgaaggaagccggcaaattgcggatgccgttcggggaacgagcagcgcgccgagaacgggctcgcccagaccgtagccttggtcttctcggcgaccttcaccatgaggtcgaccgcctcggcgcgatcgacggcggggccgacgacgagggcagggcgcttggcctcgccgagcgcggccgccagcgcctgcatcgcggccgcatccgggccgatctcgcggctgacctggcgcgcatcgagcggctgcgtcgcatgcgcccaatcgtcgatcgggaccgagacgaaggtcggcccgcagggcggctgcatcgcgacataataggcgcgcgcgatcgcggcgggtacgtcctcggcgcgcgccggttcgaccgcgaatttcacgtaaggccgcgggaattcggaggcgcgctcggcgtagaggaacgcctgcaacggcatgatcgagcgcgcctgctggccggcggtgatcaccatcggggtctggttacgataggcgttgtagatgttgccgagcgcgttgccgacgccggccgccgaatgcagattgacgaagccggcattgcgggtcgccagcgcatagccgtcggccatgccgaccactgaagcctcctgcaggccgagcacgtagtcgatgtcgtcgggccagtcgctcaggaaaggcagctcggtcgaaccgggattgccgaaaaccttcttgatgccccacgcgcgcagcaggccgaaggtggcgtccttgacggtgacggtcttgcctttgctggcggcgggtttgcgcgacgacatcgggcggctcccatttcgtgtcttgttacgttcccgtcattgcgcgcggcaaaagcggaaaggcaatccacctgtcgatggattgcccgacgatgtcaagccgcggcacccatggttgccgcggcaacggctgaaaattgagcgctagttgtccttctgcagcgcagcggtctgcttggcgagctgcttgtcgaaatcctgctccagccccgccacataggtggcgttttcgcccggcttgacgaacgggttcggcgcgccatccttcatctcggcgcgcttggcctgcatgtcgtagacctccggatgcggcccgagcagcacgtcgaccttcatcgccttgaccttggcgaaggtcgaacggtagtcgtcgacgatgccgggataggtcggacggccgaccagccggttcagggcaacggttccgctgcagaagaacagcacgtcgcgcttctcggtgccgtccttcacggtcatctcccagctggtgcagcccggcgaatggccgggcgtggcgtgcgcggtcagcgtggtgtcgccgagcgtgaccttgtcgccttccttcacggcgcggtcgaccttgacgggcgtgaaggccagatcggcgttgctctcgtcgcccggatagtagccgccctcgagcaggggcttgtcgcgctcgccggcgatcatttgcgcgccggtctcctgcttgatctcggcaaagccgccggtgtgatcgagatgggcgtggctgttgaggatgatcttgatgtcggcgaccttgaagccgagcttcgtgatgttgtccttgatcatgccggtcgattgctgcatcgccgtgtcgatcaggatcaggccttgcgaggtcttgatgacgtagaccgcgatcccgtcggtgccgacatagtagatgttgtcgatcagctggtacggctcgaacggtgcggtccatttcttcatgaccgtggccatgaaatccttcagcgtctgtgcctgcgcaccggttgcgatcagcgcaagcgcgcacagcgcggctgcgatcgtcctcatggttgcctccctgcttgttgttcgtgcacggggcacactatgcgtgctggcaacggccgccgcaagcggcggacggcaggccgccggtcagggcgccccgccgtcccgcgcatgactgttccgctgatcagctcgcgtactgcgcaatgccgtggccgaacgaccagttctccttgacgacctcgaccaggttgatgacgacatcgtcgggccgtccctgcaactggctctgatagtcgtccacgatgcgcttgtagaacgccttcttcatctcgaccgtacgcccggcattcatggtgatctggatgaagatcagatcgtcgctgtagctgttgccgagatagctgtcggcgtagttcaggtcgccgcgctcatgctcggtgatgacctgaaacttgtcgttctcgggcacgttgatggtctcgcgcatcgccttgtagacgatctcgcccagcgtcttgcgatactcggcggacttgccgcgcttcaggtcgatacgaacgaatggcatggtggtctcctgtgttgcgcggggcccggccataagagacccgcgtggtcgaaatgattcactggtctgacggcgattgcgttgtccgcatcgtcgttggtcccaaaggggtcaacgactggccttgaaggcttcccatcgcgcgttgcgctctttttgatatttgggcgtccgctctccaaccatgtcgtcgcgacggaccggctcgccgcaggattcgcagaccgggccgagccccgccggcttgccgcaggtgacgtgcgtgtaattcatggcgcgggcttccctgggtgacttgcaccaggtctcgccccaggcgcgcagcgccatcagcactggaaagaacgcctcgcccttctcggtgagatgatactcgtgccggagcggacgcttgttgtagacctgccgcgtcaccagaccgtccgcttccagcttcttcagccgtgcggtgatcatctgcggcgtgccaccggtctgcgcctggatttcctcgaagcgataactgcccgcgaacagttcgcgcaaaaccagtacagtccagcggtcgcctacgacggtttcggcgcgggcgacagggcacagcgtttggtcagtcgtattgtccttgattttcgtcatcacgatttcttcatcgggcttgttactatgattttcatagcaatatggcccggcatcgtcgcaaatgcaatgggccgctttgggcccaggtcttcatcgccagggagccagccatgaccaccgaacaggcgccggcagcggccaaagtcgatctgaagctcgaggtcgtcgtcattcccgtcgccgacgtcgatcgcgccaagcgcttctaccaggacctcggctggcggctcgatgccgacttcgtcaggcccgacggttcgcgcgccgtgcaactcacgccgccgggttcaccgacctcgatccatctcggctcgggagccgggctgccgcgctacctgatcgtcaacgatatcgaagcagcacgcgccgagctgatcgcgcgcggcgccgacgtcagcgaggtgtttcatcgcggcgcggaaggccgcatcaagggaccggatccggagcgcccgagctacggttcgctcgcaacattcaatgatcccgacggcaatgtctggctgctgcagcaggtcacgcagcggctgccgggtcgcgtcgacggcaacagcacgaacttctcctcgtcggctgatctcgccgccgcgctccgccgagcggcgatggctcatggcgagcatgagaagaggaccggtgggcatgatgcgaactggccggactggtatgccgaacacatcgcccgcgagcaggcgggcaagccgctgcccgaatagtcgaaaccgcaacccgtgcaacaggccgcttggcagtcaaggagacagtcgatgcccgagaccatttatccacgcggaagaaccgcgctgctgctcgttgatccctacaacgattttctctccgagcgtggcaaggtgtttccgcgcatcaagccgatcgtcgacgaggtcggcctgctcgacaatctgcgccggctcgatggcgcggtgcgcgccgcgggcatccaggtggtgatcgtcccgcaccgtcgctgggagccgggcgactatgaggattgggatcaccccaacccgagccagcgactgatcatgcagcgtcacagcttcgcgcgcggcgaatggggcggcgaatggcatccggacttcgcgccgaaaccgggcgatctgatcgccggagagcattgggggcagagcggctttgccggcactaatctcgatttcctgctcaagcaaaaagggatcacgcatgtgatcgtggtcggtctgctggccaacacctgcatcgaatccaccgcccgcttcgccatggagctcggttaccacgtgacgctggtgcgtgatgccacggccgcgttctcgcacgagatgatgcatgccgcccacgagctgaacggcccgacttacgcgcattccatccagacaaccgccgaggtgatcgcggcattgccggcggcacctcgttcaaaggagccagtgcaatgaccaggacatcgaagacactagttgcaattgccgcaagccaatccaacccggaagccatcgaccaggacagacgcaggctgctcaccggcgcggcgctgggcctcgctgccgcgggcgccgccagcctgtttccggcgcgcccggttgcggcagccgctgatgatgcgatccgcccgttccacatcgatattcccgaggcagacctcgttgaccttcgccgccgcctggccgcaacccgatggtccgacaaggagaccgtcaacgacgactcgcagggcgttccgcaggcgatgctgcgcgatctcgtccgctactggcagacggactacgactggcgcaaggtcgaggcgcggctcaacgcgctgccacagttcatcaccgagatcgacgggctggacattcacttcatccacgttcgctcgaagcacggagatgcactgccgatgatcgtcacacatggctggccggggtcggtgatcgagcagatgaagatcatcgagcctctgaccaatcccacctcccatggcggcagtgcatcggatgcgtttcatctcgtgatcccgtcgatgccgggctacggcttctccggcaagccgaccacggtcggctgggattcgcagcgcatcgcgcgggcctgggtccaactgatgaagcgcctcggctacagcaagttcgtagcgcagggcggcgactggggttcgccggtctccaatgaaatggctaagctgggtgcgccggagctgctcggcatccacgtcaacctgcccggcgtcgttccgcccgaggtgttcaaggccgtctcctccggaggtcccgcgccggacgatctgtcggcggaggagcagcacgccttcgagcagatcaagcttcaattcgcgaagcggcgtgcctatgcgcagatcatgggcacacgcccgcagtcccttgcggcgttcgcggattcgccggcgggccttgccgcctggctgctcgatcacggcgacggctacgcccagccggcctccgcgatgcaatcagccgtgctcggacgtgccgtcaacggccattcggccggcgcgctcacccgcgatgacgtgctcgacaacatcacgctgtactggctcaccaacagcgcgatctcctcaggccgcctgtactgggaaaacaagaccaatctctatctgcccgccaatgtcacgatccccgccgccgtcaccgcgttccccggcgagagtttcgtggcaccgcggagctgggtggaaaaagcctatcacaagctgatctacttccatcaggccgaggccggcggccatttcgcggcatgggagcagcccgacatcttcagcagggaagttcgggacgcgtttcggccgctccgcaagctgatctgagaattgaaaggcacatccgtcatgaccaaacttgccctcatcgccaccgtcgaggtcgcgcccgagaagcgggaccaagtgttgtcgcagctcgcggcgcatggcgcccgctcgctcagggatgagccgggcacgttgcatttcgacatcctggtgccgcgcgaggacgcctcgaagctgttgatctacgaagtctaccaggatgacgccgcgttcgaggcgcatcgcaatgcgcgctcgatcgcacagtttcgcgaggagagcgcagggctcggcatcaagatttcggcaacgcggtgcacgcccgccgcatagagctccggcggcgagcgaaagatcagacggtctgacgcagcaggccgatcaggcggccgcattcatcgtccgtaccgaccgtgatgcgcaggaaatcctcgatccgcggtttctggaagtgccgcaccaggacgccgcgctcgcgcagcttcgctgcgagatcggcgccgcgatggccggcatggcgcgcgaacacgaagttcgccagcgacggcagcacgtcgaagccgagctcggtgaggccgcggaccagcgcctcgcggctcctcatgatgcgctgccgggtctcctcgaaccagatgtcgtccccgatcgcggcgaccgcgcccgcgatcgcgaagcagtcgagcggataggagttgaagctgtccttgacgcgctccagcgcctcgatcagcggacgctggccgatggcgaagccgacccgcaatcccgccagcgcgcgcgacttggacagggtctggatcaccagcagattgtcatggcgcgcgaccagcggcaccgcgctctcggcgccgaagtcgacataggcctcgtcgaccacaacgagacggtccgggtgcccggtgaccagcgcctcgatcgctgcacgcggcagcgcgacgccggtcggcgcgtttggattgcacaagaggatggcgctgcccggtcgccggtagtcggcaacattgatccgcatcgcggcgtcgagcggcaccacctcatagcggacgccgtagaggcgacagtagaccgggtagaagctgtaggtgatgtcggggaacagcagcggcgcatcgtgcttgagcagcgccgggaaggcgtgggccagcacctcgtccgaaccgttgccgacgaacacctcatctgatgagacgccatagcgcgttgcgatcgcctcgcgcaaggcggttgcgcgcggatccggatagagccgcagccgatccgcggtcgccgcgattgcggccagcgcgcgcggcgacggcgggtagggattctcgttggtgttgagcttgatgaggccatcgatcttcggctgctcgccgggcacatatggcgacagattgtggacgaccgaactccagaagcgactcatgatccgtgatccagggattgatctcatcacagtaggggatgccgcgcttcggtggaagccggctcttcacctcgccaggatatcgagaggaggccggcagcggccgccggcgcagcaccgccgcgatctgctgacagtgcaggtcacgcggctcagatttccgtctggctgcccaactcgaccacgcgatttggcgggatccggaagaagtcggtcgccggcagcgcattgcggtgcatgatctcgaaaattctggagcgaaagcggccgaacttcgagtgttccgccggcacgatcttgacgcgaccgacgaagaacgaagtgtccatcaagttgaattcaagccccatcgtaccgcaccggtcgagcagccgcggcacgttcggatgctgcatgaagccgtattgggccaccaaggtatggaaattgccgtcgaggtccgtgcggatgagacggtgatcagatgcgacgcggggaatattgagcgtagccacgcgcagcaggacgatgcgttcatgcagcaccttgttgtgcttcagattgtgaagcagcggcaccggcaccatgtcgagccggctcgtcacatagacggcggttcccggaacacgcggcttgttccggacctgctggatgaactcgctgagtggcagcgtatcgcgctcgagctgggcttcgagcgccctgcggccgcggcgccaggtcgacatcaggaaaaacaggatagctccgaccgcaagcgggacccagccaccctccatcaccttcatcatgttcgcggccacgaacgacaggtcgaccaggatgaacgcgccggcaaccagcgcactcgaccagaagggccagccccagacttcgcgcatggcaagaaacatcagcatcgacgtcaggagcatcgtcaatgcgacggcgatgccgaaggcggaagcaagattgtcggacgagcggaagctcagggtcagcgccagtgtcagcaccatcagcgtccaattgacgaagccgacatagatttgcccgtaaccctccgaggaggtctgggtgatgttgaggcgcgggcatagtccaagctgaatggcttgccgggtcatcgagaacgtgccggagatgatcgcctggcttgcaatgatggtggcaacggtcgcgagcgcgaccagcggcagttgcaggctggacgggcatagcgcgaagaacggatttgatccggccgccagatcgccttgcaccagcatcgcggtctggccggcatagttcagcagcagggtcggcagcaccagcccgtaccaggtcaggcggatcggcccggcgccgaaatgccccatgtcggcgtacagcgcctcggcgccggtggcgcacaggaacacgccgccgagcaccaggaagccggtgaagccatgcccgaagaggtagctgaggccgacgcggggatcgagcgcagcaagcacggcgggatttcgcaagataccgaggataccgagcacgccaatcgtcacgaaccagaccgtcatgatcgggccgaacagagcgccgatgcgggccgtgccttgcggttgaatcgcgaacacggcgatcagcacgagcacggaaaggggcagcacgtacgggctgaaggacggcagcggatccttcaatccctccagcgcgctcaacacggagatcgcgggggtgatggcgccatcgccatagagcattgccgccccgatgatgccgagcgcgatcacgaatgggcgatcgccatgcttgattccgatcagcgacatcagtgcaaggattccgccctcgccgtcgttgtccgcgcgcatgacgattgcgacatatttgatcgacgtggtgatcagcagggtccacaccacgagcgacaggatgcccagtgccacctccggcgtcgcctttcctcccgcccactcgatcgcggtcttgaaggtgtagagcggactggtgccgatatcgccgtaaacgacgccgagggcgccgatcgccatcgcgccgatcgcgccgtgcgctggaggtgtctcggccggaatcgcttcggcgctcgaggtcaaggtctcgggttcggcggcagtcatcgtccgctcctgtctgcaggcgaattggccgctcgggcggcgggctatgctctagcttgcgatggactttgactttgtcgaagccgccggaacctttgcctcaagactatgacagattttttgaggcaccgctgcgatgagctgtcattcgccagggcaaacgtcaggctcatgtaaggaattcgccaatcggcacatgcaggtccaggtaggaactgcggagcgccgcctaccaggtcgccgtgcccttcatggtcggctggccttcggcgttcgctgtccacagctccatgccgccgtccttgtcgttggcattgatcgagaactcgctgccttcgaacagcggctgcacgccgcgataggacagcttcttcggcggcttgccgccgcgcagcctcgcggcgagttcgacgatgaacgaggcctgcagcgggccgtggaagatcaggccgggatagccctcgaccttggtgacatagtcgcgatcgtaatggatgcgatggccgttgaaggtcagcgccgagtaacggaacagcagcacgggatcggagacatggctctcgcggtgctgcgcgaccggaggcggcggcgccttggccggcgctgcggccagggtggtcgtcatctcgcgatagacgatgtcctgccgctcgcgaaccgcaagaccgcgcgaggtcgtcacctcgtgattgaccgagacgaagcacagcgtgccggtcgagccagatttcacggtgacgtccgcaatcctggaagcgcgcttggcctcgtcgccgatccgcagtgcatcgaaaaattcgagctcgccgccggcccacatccggcgcggcagcggcaccggcggcaggaagccgccgcgggtcggatgaccgtccgggccgagctgcgacatcggaaacaccggctgcgccaggcaccaatgcgtggtccacggcgcggcatcgcccgtcttcggctcgccgatctcctggaacagcgtcgcgcgcagccccatgaccaggtatttggtgacgacgtcggaagcctcggcggtcttgccgatccactggcggagatgatcgaggtcgagtttgtcggtcatgactgtcttgcccgggcaggagggatttcaggaacctttggtgcgctcgccgatcgccggcaccttgccgtagtgcctgtcctcgccgaccacgatcgcggccggcgccggatagctgaccttgccgttcggcgtgtcgacctcgatgcggcgcagatgcggatgcttcgcaaggtcatccatgctgttgacctcggcgaaagcgatgtcggcctcggcgagcttggccagcaattcctcgcgcgtgagcttgccaaaactgtcgctgacgatctggtcggtcaccgtgcggttacggacgcgttcgaccatgttggcaaagcgcggatcgtcgggcaggccgggctggcccagcaccttggcgcacagcgtcttccactcgcgctcgctctggatcgagatcaggatctccttgccgtccttcgagcggaacacgccgtagggcgcgatcgagggatgggcgaggccgatgcgtttgggcgacttgccgtcctcggcattgagcagcggcacggtgagccagtcggccatcacgtcgaacatcgaaatccggatgtcggcgccttggccggtgcggctgcggccgatcagcgcttcgagaatggacgcgtgcgcggtggcgccggtcgcgacgtcgacgatcgacatgccgacgcgcgaggcgccctcgggtccgccggtgatcgaggcgaggccgctctcggcctggatcagcaggtcataggccttgcggtcggcataggggccggtgtcgccatatccggtgatcgtgcacatgatcaacttcggatagtccttgcgcagccgctcgcgcgagaagccgagtttgtccatcgagccgggcttcaaattctgcaacagaacgtcggcgcccgcgatcagccgttccagctctgcgcggccgtccttggtggcgaggtcgaccacggcggaatccttgccgcggttgagccagacgaaatagctgctctggccctttgccgcggcgtcgtagccacgggcgaaatcgccctcgggccgctcgatcttgatgacatgggcgcccgcatcggccaggcgtgacgagcagaacggcgcggcaaccgcctgttcgacggcgatgacggtcaatccctcaagcggcaacatggtcaagcaactcagtaggagcggggcatgccgagcacgtgctcggcgacgaaggacaggatcaggttggtagagatcggcgccacctggtagagccgggtctcgcggaacttacgctcgacatcgtattcctcggcgaagccgaagccgccatgggtctgcacgcaggcattggccgcctcccaggacgcatcggccgccagcatcttggccatgttggcctcggcaccgcagtcgagcccggcctcgtatttgcgggtagcttccttcaccatcaattccgccgcgcgcatcgaggcgtaggcctttgcaatcggaaactggatgccctggttctggccgatcggccgaccgaacacgctgcgctccttggcgtagttggtggccttggcgatgaaccatttggcgtcaccgatgcattcagcggcgatcaggatgcgctcggcattcatgccggagagaatgtagcggaagcccttgccttcctcgccgatcaggttttccgccggcactttcatgtcagtgaagaacacttcggtggtggcgtgattcatcatggttctgatcgggcggatctccagccccttgcccttcacctcacgcatgtcgacgatgaacaccgaaaggccgtcggtgcgcttcttggactgctccttcggcgtggtgcgtgccagcaggaccatcaggtcggaatattcggcgcgactggtccagatcttctggccgttgacgacgtagtgatcgccctcgcggcgcgcgaaggtcttcagcgacgaggtatcggtgccgctggtcggctcggtgacgccgaacgcctgcaaccgcaattcgccggtcgcgaccttcggcagatacttcgccttctgcgcgtcgttgccgtgccgcagcacggtgcccatcgtgtacatctgggcgtggcaaccgccgccgttgcagccggcgcgctggatctcttccaggatcgccgccgcggccgacagcttcagccccgcgccgccatattcctcggggatcagcaccgagagatagccggcctccgtcaacgcatcgacgaactccttcgggtaggccatctggcggtcgagcttgcgccagtattcgccgggaaactgtgcgcagagctttgcgacggcgtcgcggatgtctgagtggtcgtcggtgtgttgttcgtgtgcggtcattgtttcgtcttgccgagaggttgcacgtgatacgggcaatgcgcccgctgttgtggggtcccggtaaactccctatgctgttttgttatagcgtatgaacctgccttccaggattggcaagtatggatttccggcagcttaggacctttgcgtgcgtcgcggaactcgggagtctgagcaaggcatccgataccttgcgggtcgcgcagccggcgctgagccggcagatcaagctcctggagcacgagctgcgcaccgagttgttcacgcgcaatggccgcggcatggtgctgaccgatgccggccggctgctgctggcgcgcaccagcggtatcgtgcggcagatcgaccagatccgcgacgacatccagtccgccggcggcgcaccgtccggccgcgtcgtgctcggcctcgtgccgacggtgagctgcgtgctgtcggcgcggctggcgcggcgcacggtggagcgctatcccggcatctcgctctgcatcgtcgagagctatagcggccatttgatcgagtggctgcatcgcggcgagatggaccttgcggtgatctacggcccgtcggtcgacctgcatctggcggtgcagagcctcggccgcgacagcatcgtcgccgtcggcccgcgcggcagcgggctgaagcagaagaagcaggtggatttcggctggctgatgcgccagcgcctggtgctgcccagtcattcgcacggcctccgtgcgctgctcgaacatgccgcggccagaaagaagatcgatctcgacgtcaagctcgaggcggattcgttccgggtgctgacgagcctggtcgaggaggggctcggatacaccatgctgccgccgtcctcggtgcgcagcgaggtcgcggagggccggcttgagaccgcgccgatcgcgcggccggcgccgcggcgcgagctgaccttggcctcgccggtcgagcatcccggctccaatgcgatgacactgatcgcaaagctgttgcgcgatgaggtcgctgcgctgcgcgccgaggggctctgggatatccagctcgcctgagcgcggcttcgcatcacttcaccacgaagccgagatggccgcggaagcgggtcttgaggtaggtgccgtcgcgcggcggcagcgcgcgctcgacttcgccggacgcgatacggattcgtgccagccgcgggccgccgccgagatcgcgcaggctgttgcggaaattctcgatgccggccatgtccgcgatgtcggaaacattgccgatgccggcgccgctcgcgatcacctcgagcttcgcacccaggccggagtggctgggctgcatgccggtctcgccgaaatggccgttgtcgagcaccgcaatcgagagattaccgggctgcttggtggcgatggtcagcaggctgccgatccccatcagctgctcgccatcgccggtgacgaccagcaccgggcgcttcggctgcgccagcgccagcccgagcccgaccatcgcggcgccgcccatggcaccccaaagatagaaattgcccgcatggtcgccggcatcgaacacatcgtaggacgaggagccgagcccggagatcaccagaaggccgccgcggtcggcaagcagcgccttcaccgcggcgcggcggtcgagtgtgcctgttgctgccgacatcagtgcgtctccttggtccacttcttgcggccgatcatccgctgcgagatcagcacggcgacctgttggtctccgtcataggcgagcgaggcggcggccgagatgacttcctcggcgtcgtcggggttctcgagccgcagcactgtcgtgcccatgatctcgaaggcctgcggcgtcgcgcggcccatcgggatctgccacggattgaactcggcccattcgccgcgcatcgtcaccagggtcagcagcgggaagcggcagcttgccatcagcgacagcatgttgacgcaattgccgacgccgctcgattgcatcaacaggaccgcgcgctcgccgccgagccaggcgccggcggacagcgccacgccttcctcctcggtggtcagaaccgtagtcttgatgccggtatcggcgtgcgacagcttgatcagcttggaatgtcccgcatcgggaacataggacacctgcgccacgccaaagctcttcagcgtgcggtagatcgcaactggccagtcctggctggtcgcgctgtcctggtgaacggcaatctggtccatcatggcctcggctagggcgcgcgttggagcgccgtcatgccgggaggcttagggcaggcgagagccttattctcttcgcatctggctcgcccagctatgccggaattttatagggggcagcgcgaccctttccggccgggccgaaaggaggcctcagcgcgcgtccttcctcaccatgaacacgtacatgtcccagaacgtctcggggtgatcgacctcgaagcggtgccactgatcgaggttgatctcgtcggctgcggccgcaaactgcttgcggaatttttccagcaccgccggatcgtcgaacggctcgaagccctgaaacgacaggtcatgttcgttcaggaacgccgcgatctcgggaatggtgaggcggtgctccatgacgttgaacagcaggtcgcggcagccgctcatgctgtagaaatccttggcgccgatcagcgtccgccattggtcggcctcgcggaaaatctcctgccggcaccgccggatgtcgtcggcggtggcgcgatagttgcgcgcggcgatgcgatcgcgggcctcgacgatgacgcggcgcgccagctcgctgtacaggccgatgcgcatcgtgccgcccggccgcagcagcgagaccagcacgcgccagccggtcatcggctcggcgagatggtgcaggaccccgaccgactcgatgctgtcgaagctgcgatcgatcgagcccagctccaggatatccgcctgcgcatactcgacattgcgcaagccgagctcgcgcgtcttgcggcgcgcataggcgaggctggtcatgctgatgtcgaccgcgagcaggcgggcgttcggacagacctgcgcgatctggatcgcgtgcgaaccggtgccgcaaccggcgatcaggatatcccgttcggcctgctgctccgcggtcgcggccgtctttcctcgcgcccgatcggcgacgaatgccgtcagcgggttcacggtccagcgcggatagggattttcctcgtactgacgcatcacctcgaccgatacgtcgttcctgatcggcgtgagcgtcacaatggcgcggcgctcttccatctcttcgcgcggctcgcgaagctgcactcgcaacaggccggcgacggttggaggccattcccggcgcagcagcgcgtccgccgccggcagagtatgaagcgggaaatacgccgcgacgacggccagcgtcagcggcgtgaacgcggcgttggatgccaggtcgtgcagcaatcgatcgcgcagtgcagccgcccgttcggcttccgcctcggtctgtccatagacatattcgttgatgaagcattgccgggcgagcgcgcaggcaaaggcaatgagatcgtcgtcatcgccatccctgcgttgctcgccggcgagccgcagcaattcggctcgcacgtgcccgagcagcacttcgagctgcatgcccgccagcgtcgtcgcttccatcgcgcagcgcaggaacagatcgctggccagcgcggcaacgccttcgccgccgaacaagtccgcgctcgtcaccggcagcggccacttgccggcaatccgcccgacatagcgggtgacggtcgggctctggaggatgaagcccacggccttcgcgtccatgccgagcgcgagcgccttgctgaaatgcgcggcggccttggcgcgattgcccaacgcctggtacgaattgccggcattgtagtgacacgcggcgttcacgtcatcggcagcaatcgctttcgcgaacgccttcaccgcggagcggtgatcgccggccgcctgcgccatcaggccgagaaggttcaggctctgcgcatggctgggctcgcgcgcgagaatgtgccggcagacctcctgcgcctcgttgaagcggcgcattccgtagaaccggctggcctccgcggcgaggtcggcaatgctgatgcccgcggagccgaaggcaggtacgttcttgccggccgcgtcccgtcgcttaccggccgcgcgccgttcttttcggttcatgatccgtcaactggcccaagctgcaagacgcggcgagacatagggccgaacgcaattgcagccaaggattattcagcccgggatccgcaccggcaggttctcgatgccgcggacgaagctggaatagacccgcttcggctcgccgaccacctcgatgcggtcgaaacgcttcagcatctcctgccacacgatcttgagctgcagttcggcgagccgcatgccgacgcagcggtggatgccgaagccgaacgacagatggatccgcggccgggcgcggtcgatgatgaactcgtcgggccggtcgatcacctcgtcgtcgcgattgccggagacgtaccacatcacgacgcggtcgcccttccggatggtcttgccgccgatctcggtgtcctgcagcgcggtgcgccgcatgtgagccagcggcgtctgccagcgaatcacctccggcaccatggtgtcgatcagggccgggttctccttcagtttctggaactggtcgggatgctcgtgcagcgccagcaccgagccgctcatggtgttgcgggtggtgtcgttgccgccgacgatcagcaggatgatgttgcccatcagattgtcggggtccatgtgccgcgtggcgtcgctatgcgccatcatcgacagcagatcgttgcgcggggccaagttgacccgctcgttccagagtttcgagaaatagccatagcactcgtccatctcccgccgccgctcttccggcgagttgacgatgccactcttcggcagcgcggtggagacgtcggaccagcgcgtcagcttgcgccgttcctcccaggggaagtcgaacagcgtcgccagcatctgggtggtcaattcgatcgagacgcgctcgacgaaattgaacgtctcgttgcgcggcaggttgtcgagcacgctggccgagcgctggcggatcagcttggccagctcgtcgagatgatcaggcgtgaacatcggcgacacggtcttgcgctgatgggcgtgcttcggctgatccatcgcgatgaagctcggatagtcgtagccgggcggcacgtcgcggatcgagatgccgccgagcgtggaatccgaggagaagatgccgtggctggtgtcgacatgcatgatgtcgttgtacttgaccacggaccaatagggctcgatcggcgcgttggtgcagtaatgcaccggctcttccttgcgcagccgctcgaaccatggccacagcgtgtcgttctggaacagttttggcgcgccgggatgaaaatccctgagcggagtcgcataggcttcctcacgcgcctggcgctgtagctcggcccggtcggcacggatggcggtctggacgttcatgatctctctctgcacaattttcgaaggccgcacgggaggtggttgggctctctcccccccttgcgggggagagttggagagaggggtgagccgcgaccaccgcccgtacggcttacccctctccctaaccctcccccgcaaggggggagggaacccatccgctgtgcccgcctaactcaggtcaagcgacgcaaatgtttcaacacgactgcggatgcagcttcacgcggcgatacgcacgggcagcgtctcgtagcccttgatgaagctggaatacacccgctgcggctcctccaccacctcgatcgtgtcgaagcgcttgaggatctcctcccagatgatcttgagttgcagctcggcaagccgcaggcccacgcagcggtggatgccgaagccgaacgagatgtgggtgcgcggccgggcacgttggatgtcgaacacgtaaggccgctcgatggcctcttcgtcgcggttgcccgagacgtaccacatcacgaccttgtcgcccttcttgatctggcggccgcggaattcgaagtcggtgagtgcggtccgccgcatgtgggcgagcggcgtctgccaacggatcacctcgggcacgaaactgtcgatcagcgccgggttctcgcgcagcttgcggtattgctcgggatgcttgctcagcgcatagatgctgccggacagcgtgttgcgcgtggtgtcgttgccgccgacgatcaacaggatcagattgccgaggaagttcttcggatccatgttccgcgtggcgtcgctgtgcgccatcatcgagagcagatcgctcttcggcggctggctcgagcgctccttccagagccgggcgaaataaccggcgcattccatcagctcggcctgccgctcgtcctcggtggcgacgaggccgccggcgccgggcagggtggttgcgacgtcggaccagcgcgtcagcttgcggcggtcctcccaggggaagtcgaacagcacggctagcatctgcgtggtcagctcgatcgaaaccttgtcgacccagtcgaacacctcgccgcgcggcagattgtcgaggcactcggtcgagcgcttgcggatgttgatcgcgagctcgtcgagatgggtcggcgtgaacatcggcgccacggtcttgcgttgcgccgagtggcgcggctggtccatcgcgatgaagctctcgcggcgcagatccggcggcacgtcgcggatcgtgatgccgccgagcgatgcggccgaggagaacaccgaatggttggtctcgatgtccatgatgtcgttgtagcgggtgaccgaccagtacggcccgaacatcgagtccttgcagtaatgcaccggatcctcgcggcgcagccggtcgaaatacggccagaaggtatcggtcttgaacagctcgggatggccgggatcgtagtccgacagcgccagtgtgttggcgcgttcgcgtgcggcgtccagatgggcggtgtcgacgagatcgatggtcccgtgcatgagcggctcctcaaccgttgcagcagccggggcatcgccggcgcgccatgttttaccgaattacattctcattccgcggtttgcgcaagagctgacagcgcgcttttggccgcattggtagccggccaaaacggccgaatccgggcctttccaacgacggaccggcgtcggcggcgaccacgcccgtttcaaacggcgtttgatttgctcaggcggcgcatgcgggcggtgcagggactgtctatcggctggccggcttttcgcaggggtacgtgtcctgcatgccccagagcagcaggagggcgaccatcatctcgcctttcgcggaccgcttgtcggccgacttgagcatgatctcttcggtttgctcggtggacaatacgagggtgtcgggcatgcagaacagcaattggccgccgtgccgtttcaaccaggcattggaagccatcaggccgcccctgacgccgtccagatacatatgattgaagatgcggaagttctcgttggccggattgcgataggattccaggcgcacatcggcggccccagcgggagctgcggcaagcgccagcacgcacgccggcaatatccacttgttcattgctcggttccttgcggccgcgcccattcggtaagtccgtcgttccttccgccgggttcgaagcacgcggggcggtggacggcggccggtttccggggggccattaaggcatagccaaccgcacccgccgaatcccgcggcggcactctcgaccgtgtatgaaacctggatcacactcgcagcgacaaacctgtgcttttgatgcgcagagattgtcctgtcctggagtttttccgtgaacgacatgagctgggccccgccggggccgccgccgcaaccggttccgccgccgatgccggtggcgttttcggggagccggacgcagttcttccgtctggtcgcgcgcggcgccgggctcgagctcttcacggtcggcttctaccggttctggctcaccaccgacatccgccgtcacctctggtcgaacaccctgatcgacggcgatggggcggaatataccggccgcggcaaggagctcctgatcggctttctggtcgcactcgcgatcctggttccggtctatctcggctacgccctgctcgtgatcgaggccgagcacggccagacattctcctcgttgccgatggtcgccttcttttatgtgttcggccagttcgcgatctatcgcgcgcggcgttaccggctcacccgcacggtgtggcgcggcgtccgcttctggatgagcggctcgggctggatctatgcgctgaaggcctcgctatggggcctcctggtcgtgatcacgcttggctttgcgctgtcatggcgcgaggcggcgctcgaacgctacaagatgcggcattcgtattacggcgatctgcagggctccttcgaaggccgcggctgggatttcttcaaacgcggctggtggctctggctactgatgccgttcgcgctggtgacgatcttcggcccgttcgcctatgccgcgttcaaggcgatcgagtggcgctggtggctgtcgggcatccggttcggcgaggtcagactggaatcgaccatgagtcgcggcgccctgatcggcctgtactggaaggtgatcggctgggccatgctgctcggcacggtgttcctggcctatctcgtgctctgcatcttcctggcggccagcatcgacggctcctcgatcgagaccttcttcaagactgaggcgttcgccaagagcattccgctgatggtcctgctcggcatcggctatctcgcccttgcgctggcgatgaacgtcgtgatgcgggtctatctgatgcgcgatctctgggtccgggtgctgtcgtcgaccatcgtgcacaacattggggcggccgccaacgtcaccgcgcgcggcgagctcgccaatgcgctcggtgaaggttttgccgacggcctcgacgtcgcggggttctaaagcatgatccggaaaagtgcgaagcggttttccgaaaagatcatgcgcaaacaaggagctaaagcccgatgacgattcaacccaatctcatcgcgctttagcgtcatggaagccgatctcaaccaggccaatgccgcggcggcgccggtcccgggtgcggtgttcttcgacggcgcatcgagccgccggcgcgtcgtcgcgctcaagctgtccgacgcgctggagatcagggaagatggcgaacggctggcgcgctgggcgtttgctgacatccgccgtgccgacagtccgtccggcctgctgcggctgagctgcctgactgcgccggcactggcgcggctcgaggtccgcgacgccgggctgatcgccgagctggtcgcgcgctgcgacaggctcgagcaggacctgccgaaccgcaagggcgtcgccggcattgtcggctggtcgctcgcggccgcggtatcgatcgtgctggtggtgctgttcggcgtgccgctcgccgccgagcggttgacgccgctggtgccggattccttcgagcggcgcctcggcgacgtcgcggaagcgcaggtcagggtggtgttcgacggcaagccgtgcagcagtgcggccggacaagcggcattcgagaagctggtcggcaagctgcgggacaccgcaggcctcgacaattcggtgcagtcgggcgtgctggcgacgccggtgccgaacgccttcgcgctgccgggcggcaaggtctatctgttcgacggactgctggagaaagcggaaagccccgacgagatcgcaggcgtcctggcccatgagctcggccatctccggcaccgcgacagcatgcgcgagctgatccacaatggcggcacctcgttcctgatcgggctgttgttcggcgacatcaccggctccggcgcgctgatcttcgcctcgcgctcgctggtgacgtcgtcctattcgcgcgacgccgagaccaatgccgacacctttgcgatcgagaccatgcacaagcttggccgtccggcgaagccgatgggcgaactgatgttccgcgtcaccggcaaggaaggcggcaacgggctctcgctcgtcgccagccatccactgaccgaggatcgcctcgaacggatggccaaggccgacgccagcaacaagctcgcgggcaagccgctgctgtcgccggccgaatggcatgcgctgaagggcatctgcggcaagacgtgaggcaagcggatttcggcactggagcaatcccatgcagcgtaatgacaaatactggtttcccgccaagcgctacggctggggctggggaccgccgaacaactggcagggctgggtggtgctcgcgggcttagtggcgctgattgccgtcggcgcagcgatcaacctcccgcactccccggcgcgcttcatcggctacgtggccgtgctgagcgttctgctcaccgccgtctgctggtggaagggcgagccgccgcgctggcgctggggcggcgactagaccattgctgggcgcctacttcaccagcctgaacttgccgccctcgaccttgatcaggaacgccgagcgctcgtcatagccgttatggtcggtcgggctcatggtcgagaggccgttgttcaggtagacgtccttgccgcgctccagttcgtcgcgcagcgcggcgcggaattccggcgtgccgggcttggcggtcttcagcgcaatcgccgccgcccgcttgaacagcgtcacggcgtcccacagatgcgcgccgaagatgttcggcttttgcccgttggccttctcgtaggacgacacgaactcgtcgcgcgcctggcggaacggatcgtcggccggcagatcgtcggcgatggtgaaagcctcgccggtgaagattgcgccctcgacattggcgccgccgagcttgatgaactcctccgaggcgacgccgtgggtctggaagatcttgccggcgtaaccgcggctgcgcagcgcctcctgcggcagcacggccggcgtgccggccgaggcgatgaacaccgcatcggggttggtcgcgatcaccttcagcgcctggccggtggcgctggtgtcggagcgcgcgtagacctcatgcgtcgtcacggtgaggccgagcccgggggcgagccgcgacacctccttgtaatagccctcgccatagccgtccgacacgccgatatagccgagcgtcttgatgccggatttcgcgatgtatttcaggatcgccgtcgccatcaggtcgtcattgggcaccaccttgaacgcccagcggcggtgctcgtccatcggctgcacgatcgcggtcgccgcggcgagcgagatgatcggggtcttggcttcgaaggcgacgtcgagcatcggcatggtcaccggggtgagcgaggagccgatcaggatgtcgacgccgtcctggatgacgaggcggcgggcgttctgcgtgcccttggtcggatcggactcgtcgtcgagcgcgatatagaccaccttctcgccgccgatctccttcggcagcgccgcgatggtgcgcatctgcggctggccgagcgctgagcccggcccggatcccgacaccacgacgccgaccttgatgtccgcccgcacgtgcggcgcaaccagcgtcacgcctgcgagtacccagagtccggccacggccagcttcatcgcaaatcctcccagcaggttctttttatgcgcggccgatgatagccggccggtgtccggtttcgcatgatatcgatttcgccgcggcggtctgtccccctgattggggacagccggacggacagcaccggcgtttccccaggctgccgtgaacctcgcgtttaccactcccctaaaggccgcgggaaccagtttccctaatcgggcggcaatctccgcctgttatccagggatcggaaaagggagtacgaaccatgttcagcattgttcggatcctcgtcttgatcgcatctgcgtatgcgggatccgtggtagcggaagtgcagtttggcggcgcgccgccgtcgcaagcggtcgacgtccatgagtgagcctcatccgatcgcgcccgagcacgtgcgcgccatctgcgacgagatcggcgagagactgcgttatgccctgcgcggcgattacgccgatctgccgccaaggctgcgcgagctcatggacgagctcgtcttgcaggattgcgaggcgccgtcgctggtgcctgcgatggcggacatgacgcagccgctgatcgttgctgcctagatcttggtgcaaagcttacgggcggtcagccaacgaccgctccgcgataatcggccgctcgtcgccgtgattgctgtcgcccgctgcctcagatccgagctatgcgagactggggcgggagaacgccgtcgggcatcagcgcgcagcgtcacacgttcttcgcgaccttgcgcgtccgcgtcggtccggcgccggcgatcgccggcttgatattccacaccgcgcgtacggccgcgaaggcgtgggcgatcaccggctcgtggcggcgggcggtgaggctgacgaaggagagatcgcaggtcagcttcaccttgtcggccaccacgaactgatgcgggcgcgccatccgcggcgccagcacattgtcgcgcgcgaggctgagacagaggccggattcgacgaagtcgatcatcgcctcttcctggtcggtgtagccgacgcgcttcggcagggcgccgagcgggcggaagatgtcgtcgagcatccggcggtggcccgaatgcggcggcgttgcgagccagggcagctcggcaagctccgcccagcctttgccgatcacccggtcccgccagccgatcggcgcgatcacgcggtagtcgtagctgagcagtggcgccagctggtagcggccgtcggcgatggtccgttcggtgaagctgtgatggaccaggtgctcctgcggcgtggcgtcgacgtaatagccgacgtcgagctcgccccggccgatctgcgccagcacgtcgtcgctgacgccgtggcgcaggaagacttcggtgcgttgcgacgacatcgcaaggctgcgcacgaacggtccgagccgggtgaattcggggtcgaggatggtgccgacgcgcagcgtgccgcgctgcgcctcgttgagcgaatccgccatcgccttgaagtcggatgccgccgccaccgcccggtgcgccagcggcagcagcgaggcgccggcctcggtcagcgtgaagccgctgggtgtgcggttgaacagctgcaacccggtgctttcctccagcgccttgagttgcaagctgaccgccggctgggtcagtttcagcatcgctgcggcgcgcgatacagtgccctcacgggcaaccgtgatgaagcaacgcaaggcctgggtacggggaagctcggtcatcgcgtgtgcttatagcacactttttcgaagtgcatccgacctgcgtcgtgcattgtcatataatgataatacaaccaatacgagaaatcaggatggcagccaggccaccatgccttcagtgcgcgtgcgcacctccggagaggcgaggcaggtcgcaaccgcttcatagcccactgcgccgggaatcggcctgacgcagatcggcaggctgtgattggcaggacacaggatgatcgcttcatcgtcgccgacggcatcgaggtcgaggatcgcgttggagcgcgtgaggaagaacagcggccgcgcctccggtccgcgacggcgcagatgcgcgatcacggcctcctggctggccgcatcgagcccttgttcgagcatgtcgatcaccgggatcgcgccgtcatcggcctcgagaactgcgagcagggtgatgagcgcgggtgagtctacggcgccatcggccagcaggacggcaaggctcgcctcgaccctcgccttgtgggcggggtcggcgtcgagccgcgcgcgaacggccgcgccgccgtcggctgcacggtccagtccgacaaagctggcaccgggcagcgcttcggcaagccgctgcgcgaggcgcgtcttgccgctgccgagcgggccgacgatgtagttcagcgatttgatatcgcgcagttcgaagcgctcgccgccccacggccacggcagatcgaatgcgacgccgatcgccggccgcgccctgaccgcaccgatcaggtcgtgcgtcgcgggcattttgccgcagccgaggtcgttgcgcagccgacgcaccctggcgatgctgtcggtgcattggcggatgcgtgcttcgagcgtggcctcgtgcgcagccagcacgcggccgaggatggcggtgtcgccgttcaggatccgcgccacttcaccgacgctgaggccgagggcgcgcagcgcgacgatctcggcgcagcgcgccatctcgaccgggccataggcgcgccatcccgccggcgtgcgggcgggcgcgaccaggccgcgctcctcgtagaggcgcagcgctttcgccgagatgccgagctgccttgcagcttcggacgggctgaggaaacgggcagcaggagcattcatcgaatcacctcgtgtcgtctgaccgcatttctatggaggcggccgctggggccaggtcaagcgggaggtgcggcaccagcgtctccggaatactggatcacccgtttgcgggtgatgacatcctgctgtttgacatcttgaatcgagtcatctccagcgacgtcctggcttgcgccaggacgtcggcggtgtttctggcgagcgccgtgcaccggttgcacccaccctcactccagatggttcaccttcgccacccaggcgcggacgtctctgagcacgtcgggcagcgcggccttgacctcctgcacggtcatgccgggcttgatgcgcgggtcgtagagcagattgagcagatactggtcgtagacgtcgaagaaacccatcgagacgctgtcgttgaacatcgtccatggcacggtcgcggtgtcgttgatggggccgagcgattgcagcagttcctcataggcgcagtcgaggaagacgaaatcgccattgtcgacggtgaggatgacgtcggaatgctcgatctcgtagttttcgttcttgcggaagccggacaggcattgcgggtcgagcgaggagcggatttccttggcgcgctcctggccgtagaaggtcgcgatcgtgcggtagagctcgcggtcgcgcaccagcttgaccacgacattggccgcgtcgtgggtgtcgctcatcgcgatgtcgagatgctgcaccttgccccggatgtcggcgacgaccttggccagctgcgccttgcggtcggcgcggttgccgtcggcgaacacgcgcaccgcccggtcgtatttgcggatgcggtcgacccttccggcgagatgaaattcggcgccgaacgcggtcttcagaaaaccttcgacgatctcggcgtcggtgaagaccttcttctcgtgacgctggcgcgcgatgatggccggcacctcggcggcggcaggcgcggtggcatcagtgaggcaagcggcgagcgttgcggcgagaaggagcaggatcgaaggacggtgctgggacatcatgacaacgctgccgcaagctttgcggcagcgcaagacgggatcggcgagcttgccggatggcgacgcccggttccgttgaaatcgtcgcgatcagttcttcaccacgacggtggcaccaaccgagacgcgatcatagaggtccttgacgtcctcattggtcatgcggaaacaaccggacgagaccgcctggccgatcgtctccggctcgttggagccgtggatccggtacagcgtcgagccgagatacatcgcgcgagcgccgagcgggttctcgatgccgccggccatgtgacgcggcagatcggggcggcggcgcagcatgtccgagggcggcgtccaggacggccattccttcttcgcgctgatgcggtggacgccgctccagcggaagccgtcgcggccgacgccgataccgtagcgcaacgcctggccgttgccctgcaccagatagagccggcgctcggctgtgttcaccacgatggtgccgggggcatagttggtcgggtagtcgacggtggtgcgcgggatcgggcttgcgccgccaccgccaaagaaactcggggcttcggattggtagccccgggagtcgaagaactgggcttgggcctggccggcacctgccaggatcgtgagcgcggcaaacatcaaggcaaacgggcgcatggtcgtcgtcctcgcgaacaatcaaatatatgcccagagagtccacaattgccggcgttgcgcaagcgacgaagcggtgactttaggcactttccggcaacacggtttaaaaaagcaacagaccgcaggcaatagctgcattgtccggccaagcctttgacgaagcggatgaagaatggttgatctggagcgacctcaagaacatctcgaaacgggagcgagagcatgaacggtgcggaaagtctggtgcggacattggtcgcgggcggcgtggatgtctgttttaccaacccgggcacctcggagatgcatttcgtggcggcgctggacaaggtcccgggcatgcgctgcgtgctcggcctgttcgaaggcgtggtgacgggtgctgccgacggctatttccgcatgaagggaacaccggcctcgaccttgctgcatctcgggcccggcctcgccaacggccttgccaatctgcacaacgccaagaaggcgcattccggcatcgtcaacatcgtcggccagcacgccacctaccacatcggctacaacgcgccgctgacctccgatatcgagggcctggcgcggccgatgtcgtcctgggtgcgcacctcgccggatgccaagtcggtcgccgccgacggtgcggctgcgatcgccgcggcaaagagcgcgccgccccagatcgcaaccctgatcctgccggccgacaccgcctggaacgaggccgacggcatcgccgaggtgccggtcgacacccagcgcccgagctattcgcctcaggcggtcgacaccgcggcgaaaatcctgcacggcgatgccgcgcacacgctgctgctggtcaccggcagcgcgctgaccgagcacgggctggcgctcgccgagcgcatcgccggcaagaccggctgcacggtgatgggccagacctatcatccgcggatggcgcgcggccgcggccgcttctcgatcaatcgcattccctatgtgatcgagcaggcgctgccgatcctgaagaattttcgtcacattgtcctggtcgaggccaacgatcccgtcgcgttcttcgcctatccgaacaagccgagtatgctgaaggcggaaggctgcgaggtgcatcgcatgaccgcctggggcgagaattcggtcgcagccctcgaggcgctggccaatgcgctgcatgcgacggcgcaggacgtcaagccgcagcagcatccggaactgatcaagccgaccggcgccctcaatcacgcatcgatcgcgcaggcgattgcgtgcgcgatccccgacaacgccatcatggtcgatgaatccgtcaccactggccgcggcttctttccgccgacggcgggcgcggcgccgcatgactggttgcagaacatgggcggctcgatcggcttctcgacgccggtggcaaccggtgccgcggtcgcctgtccggaccgcaaggtgatctgcatggtcggcgacggcagcgcgatgtacacgatccagtcgctgtggacgcaggcgcgcgaggggctcaacgtcgtgaccatcgtgttcgccaaccggatctaccagatcctgcgcggcgagttcgacggcgtcggcgcgggcgagccgggcaagcgggcgcaggacatgctgaagattgaccggccgacgctcgatttcgtcgcgctggcaaagggaatgggcgtgccggccgtggcggtcgcatccgcggatgagttcaacaaggcgctggcgaatgccgttgccgaaccgggcccgcggctgatcgaagtgcagatgtagcgagcatgatttgaaatggccgcggcggcggccccgagcatgatcccgaccggaacggccgcgttagcgcaaagtgcgacgcggttttccctcgcgacaaacgcgaagcgtttgcgcggagatcatgctcaaacaagaagccaacgcgcgatgaagctcatcgcgcttttgtccagtcggaggcgcccatgcagaccgagctgaacaaggtgatcgccgccgtgcaggagttttacgcgcaggagacgttcctgctggagcgcgatctcggcgagcgaacgcttactcaccgaatcgcggtctatgtcgagcggcagttcgccggctggcaggtcgattgcaactacgatcggctcggcgagcgcacgctgcggctgccacgcggctcgggtagctcgaccgatgaccatctcggcaagtcgatctatcccgatatcgtcgtgcatcagcgcgatatcccgaacaatctcctggccatcgagctgcgcaaggacagcaatcaccagccgctcgatcacgatcagcgcaagctggccgcgctgaccgatccgaatgtctggtttgcctatgcgatgggcgtgctcgtgatcgtcggaccgaacggcgtgagcttttccgaagtctatgccggcggcgcgatcgaccacgccacgtcgcgctggtttgcggagcgcgtgcaagagagcgggctcgcggggcgccacgacgatggccctcagcacccagctgatcaatgaatcttgtcaccgcatcgaggtgatagcccgtttggatcatgcgtcgtcgctgcacgcgcggcacaacaaaaggtgcgggaggtggagcaattcctggagccggtggtcaattttcagaacgatccgatggcggtgcggattatcggctctgcgcctctttcgctccctctcccgcacctgaatttcgttggtccggcgatcaccggtccagccgttgctgacataggattcgaggcctcgcacgatcggcgcagttgatcacgacgtgacgagccgaggcagcatccgcaccgagacagcaaaaaggccgccttcgggcggccttttccgtttcgtctcttccgtgatcgcggtgcgcgattgtttctgattattgcttggtcgcatcgtcgccggtggtggcggcgccgccggacttggccttcgatttctttgccttcttggctttcttcttcggcgccatcttggtcgcctcgcccttggccgctgtgtcgccgctttgtgctgcgggggccgtggtaccgcctgccttgtcctgcgcgagtgcggtggacgagacgaaggcgagggcggtggcggcgaggatcagtgttcgcatcggatggttctcccaagttggtttccggcgcccctcaacgggacagaatgtcgcaggttccgcgttgccgatcagcagtccgtgagctcagcgtgaacggcgcggccgctgcgatcgaggcggaaccgggaaccgcgagccgcgttatgtcgccgggcaggagttccgaggagagacgccatgcgttggcgatcagtgacggaaaccaccaatacggtgctcgacaccgcccccgacgacaccttctacgcggtgggctggaccaccagcggactggcaacgctggccaccatcgtcgcggtctggatgttcgggatctgaggcggtcgatcggtgcaggcggccggcttgccgccacagtcgagcaggagcggtccgcgccgggcgcgttacttgcgcaggatgaccagcgcttcccgatagagctgcgaaaagctgaccaggagcccgctcgacagcaggaacatcgcgatgctgtcgtagtcgtcggccgtcggccaggcgaattcgaaatagggcggcatgaacgcccaccagacgatcggaacggtgatgatcgtggcgaaagcgccggccggcgcgccgcccatcaggccggcgaccaggatcgccggcacgaagccagcgaaatagagttgcatgccgaagcttgcgaacatctcctgggtcgcggtcgccagcaccacgaccagcagggcgacgacgaaggtcgacagggaccaaggccgcagcttcagaatgtagtcgttgcccttgcgcatcgagacttccctggcccccgcgagttccgggaaggtagccgaggaggcctgtaaacaaaaccccgtaggactccgtgggaggggtggtcggccgatcttccccggcgcgcttgttgcgctgcggtggaccgggtacggggacggcataacgcccggccaaagtctgcggttgggtgacaggcgggaaaggaatggtggacgcacaagggatcgaaccttggacctctcccgtgtgaagggaacgctctcccgctgagctatgcgtccgggatgtgacgtgccaaaggccgctggtcggcggccggtcgatgaaggcgcttcgtcagagcgtgcgatttacgaagtgccgggtaggggtgtcaagccaaaccctgcgtaaatcaggctccctgctggcgggcgcgggaggcgtgtgactgcagcgcccggatgcgttcggcgagcgtgccgccgccttcgggcatcccgctgcccggcgagacgccgtttgctgcaccgttggcgggcttggcggcggccttggccggcacggtcggctccgccgccagcatggcctcgatcgccgaattggggccctcgagctggattgccagcttggccacctcggccgcgatgtcgttgatgcgctcgcgcagcagcgcgttctccatccgctcggttgcccaggagctttcggcctgctgctggatcgcgttgatgtcgcgctgcagcttgccgcgctcgtcgcgggctgtgcgtagctgctcctcgagcgcggccttctcctggcgcagcttctcgagcgcggacgatttgccgccgccggttgcggcgatctcctcgcgcaattcctgcagggtccgctcggcggcagcattggcctgcttgagctggccgttctcgaattcgcgctcggcgagcagcttgccctgggtcgcaagccgtgtctcgaggtcgctgacgcgattgccgagcatctcggcttccttgacctggacgatcagctggcggtcgagatcggtgacccgctggctcagattctcgacccggccgcgcgcatcggtgagatcgcgcgttgcggtttccgactggctgcgctcttgggcgaggcgggcttcggtcgccgcgaattccctggcggcgtcgccgacgcgggtcttcagttcctcgacctgggtccgcaccgcgaccagttcgacctggcggctgtcggcggtcatcgagcggtcgttgagctcggcgttgatcctgccgagctcgccctgcttgtcggtcagcgcctgctcggcggtgcgcagcagctcggtcttggcggcgaactcttcctcggtggcgcgaagctgctccttcattgccttctcgcgcgcttccagcgcgaagatcgcggcgttcttctcgccgagctcgatcttcatgcggttgatcgcatcggtcttcttgccgagctcggcgagctggctcgtggtcttgctcttgagctggtcgacgctcatctcgagccggcgggccgacatggcgaattcggcgcggagctggtccttgtcggcctggatctcggccatcgacagcggggtggccgcctccatccggcgcgtggtcagccgcaccgcccggttatgcaccagcggcacgatcatcaggccacacagcatcgagatcaggaaaccgatcgccgcgtacatgatcggctcgatcatgaaagatcactccaggagaggaagaaagaatttgttaatcacaatgccacggcgggccagccgaaggccagcccgttgccgcgttaaggtgaatcgctaacggcgccgacgcgccccggcggattcaaccgaccggggcttgcggcctagaacgggttccaggtcgcgcgcggggtgtatttgagatagccgacgctggcgccgagcctgaggccgatgcccgagcgaatcgggaccagcacgatgttgttggcggtgagtgccgtcatgccgaagccgccgacgatataggcggagccgtcgatgccgacgaagcgctgatagatcgcctgcgtcgagggcagattgtagaccagcgtcatggtccgggcgccgtcgccgccccagtcgaagccgaccgagggaccctgccagtagaccctgaggtcgccggcgttcttggtgtagagcgtgccttcgccatagcgcagtccggccacgaacgcgccggagccttcctcgccgagcacataaccgttgggcagaccccattggctgaccgcgcgctcgatcaccgaggcgagtccgcgcgaaacgttgccgaagaacttgtgtccggcgccgaccagttcgtcgggcccgtaagtatacggggtcggttgacgctgcggcggcggatattgcggtggtgggggctgctgcgcggacgcccctgcgctccagcacatcagcgcggcaaacgcgaccgcggcaaggcgtgatgcgaaagtcattaagaacccctgctatcgaaatccgggcgttgccctttaacctgatgccaacaggcacggctctaggttgcgcccggtgtcccctcgactcggatgttatcggtatcaactatgacggcacaacggcaggaaagatatggatcgtgccggggcatggcgtttttcggcctgttggcgggcattttggcggccatctggcccgctttgccggttcgggccaccacgagcgagcgcgtggtgacgaaccgctactccggccttgcgatcgagggattcgatccggtcgcctatttcaccgacgccgccgccacccaggggcggccggaattcgaggccgccggaagcggcgtggtctggcgtttccgtaacgaaggcaaccgtgcctcattcgtggcacatccggaaatctatggcccacagttcggcggctacgacccgaccgatctggtgcggggcgtcacctgcgcgggcaatccgcgattctgggtcgtgatcgggaacaggctctatctgttcaatcgggaacacagccgcgatgcctttgccgccgatcccgcgcgcttcctgacggaagccgcggcgcgctggccggagctggaagaaggtctcgcacagtaatcggctcttttgtttgagcatgatcttttcggaaaaccgcttcgcacttttccggatcatgctttaggccgcggctgggtcgccccatgcgatgaattccggcaccagaaagttttcgcggccgagcccgaaatgcaagggatgcccgtgcgaatcggtcaccttgccgccggccgcaacgatcaccgcatgaccggccgccacatcccattcggacgtcggcgagaggcggggatagatatccacctcgccttcggcgacgcggccgaacttgacggctgatcccagcacggcgcggaccgcaccgccacgttcgtcgatgaaggattcggtccgtgcatcgccgtgcgagcggctgaccgcgacggtccagggcgcgccacgcggcgggcagggacgggtcttgatcggcaccgcctgcgacaccgcgtggccttgcaaagtcaatcgctccgcgcccttgccgacgatgccgcgccagatcagcccgagcgccggcgcaccgacgatgccgagcagcggcacgccatgcgtgaccagcgccacattgacggtgaactcgttgcggccggcgacgaactccttggtgccgtcgagcgggtcgatcaggaagaaactgtccttgtagggcggcgtcgccagatggacgcgctcctccgacagcagcgacacatgcggcgccagccgcgtcagcccctcgacgatgatgtgatcggcggcaagatcggcctcggtgaccggcgagccgtcactcttgccggtcacatgcatggcggaacggttgaccgcgagaatcgcctcgccggcccggatcaccagctcggtcagtgattcgagtagcgttgcggccttgtcgcagtcgacggtggccgattgtgccttattcatgggcgggtctcatatcctgttcgccttcccctgagatcatgatgtcagtcccgccgcaagctggcagcatccgtctgcccggtgtatcaagccgacaggcatgcgtgattcgcactcctcggtcggcgtgcggctttccaggaaacaattgatgtctggcacttcgtctcccggtcccgctcccgatgcactcgagctcgcagcactgctgtgctcgaaagtctgtcacgatctcatcagtccggtcggcgcgatcgtcaatgggcttgaggtcctcgacgacaatccgaagcccgaagatcgcgacttcgcgctcgatctgatccgcaagagcgcgaagaccgcatcggcccggctgcaattctgccggcttgcattcggcgccgccggttcctccggcgcgcagatcgatctcggcgacgcccagaacatggcgaaggggcacatcgaggacggcaaggtgacgctgacctggaatttgccgcggctgctgctgcccaagaaccgcgtcaagctgctgctgaacatgctggtggtcgcgcagcagacgatcccgcgcggcggcacgctcaccgtcgatccggtcggcgagggtgacgcgacgctcttccggatcacatccgcagggctcaatgcccgcgtgccgcagaacatcgtcgatatcctcaacgggacgtcggcgaacacggtcgatgcgcatgcggttcagccatattacacgcgcctgctggcggaagcctgcgggctgaaggtgacgctcacgctcgacggcgacaaggtcattgtcgccgcagcctgaaggcagccgcgcgaagatcattaatcaaaggttacgatgggccgcgcgattcaatcgcgcggccttatctctttgttgatcccgttcttttccatttgctcaaccaaacttaaacgctttgcggagaagctgacccaagttccgtcaggcgcgtcgatctcgcgcgccgctgcgttttcggcgtttttcgaaggttggtttcatggacgatctgttgcgcgagttcctgacggagagcagcgagagcctggatacggtcgacaaccagctggtgcagttcgagcaggatccgaacaacgcgaagatcctggacaacattttccgccttg

SEQ ID NO: 34 - DNA, 98615 bp, Bradyrhizobium enterica
tcggcatcgacaagttcatgagcgagtgccgcgcactgaccaacctgatcggcaacggcgtcgcctgtatcgtgatcagcctttccgaaggcgagctcgacaaggacgcgctgcacgagaccatggcgcatccgctcgagctcggcgaggcgctggaaccgggcgggaccgggtagggcaggatgacgtcgtcgggctgtcgcaggggggcgttgccaaaatatgaaaaacaaccccatgcaaaggcgccggcggcggcgatgttcgatcaggcgactgttcgaccaggcgacttgacacgtcgggcaactcagggctattttctaatattccgaaatagcgcgggtgtccgttcgccccgcggcgcccacatcgctggcgagcccgtcgaccagtttggtgaagaagatgctcctggatacaggtcttcgcggcggggccctcgctttgctggtgcttcttgcgctcgacgcgctgctgcagttgcgcaacagccggctcggccgcatcacccttgttttcgacctgtgcggaattgcgtttctcattgagacggctccgcaatttcgcgacagccaggcagtgtgggtcctcttgctgcggctggcgagcaatatggcggctgctgtcttcgtgctctggagcgaggaggtgttcgacgacacggcgaggccgccatggatcggctggacagcggtgagtgcgatggcgttgcttgccacctggtccgtggtcaccgactcttcatgggcctggctcgcgacccatgtctgcgctctcgtgcttgtggtgatcgcgatcggccgcgtgctgctgggccgggccgacgacctgatcgagatgcgccgccgcgatcgggtggtgttcgcatggggtctgggcctcgcgatcgcgggctgcacgctgatcgggtcgagcaatctcgggatgacacctgcgcttcccggtgtggtggccatcgcgcttgccgctgccttgctgcgcatgcagagggcaggcccgatctccgcggtcgctgccgcgtcaccggcatcgagcccgaccgcatcgacgtctgaaatgaccgaggcggaagcggccctctatcggcgtttgctgacggtcatggaggtggagcgggcctaccgcgacggcagcatgacgatggccagcctggccaagcggctcgacacgccggaataccgcgtccgccagctcatcaatcagcggctcggctacggcaacttcgcccgcttcgtcaattcctaccggctggcggaagcgcgctcggccctggccgatgccggccaggcgcgtgtcccgatcctgacgattgcactggatgcgggcttcgagtcgatcggcccgttcaatcgcgcgttcaaggcggtgactggggaaacgccgagcacattccgcaaaaggaccctggccgggccggtctgagccaccgattgtcgcaaacggccagactttgcgggtttcggcgaccctgactgcgactttcggcgcgaccggtccggccttggccaccatgttggtcgtcccgcaaaggagacgcacatggaacagcccgttcgcccaacgccccacaggctcctgtatatcgacaatctgcgctggtcggcgatcagcatggtcgtggtcatgcatgccgccgtcacctattcgccgttcggaagctggtactatcgcgaacatccaccattgggcctgggcacccgggtggccttcgcggcctatcaggcgtttcagcacgccgtctcgatggggctgctgttcggcatcgccggatactttgccgccggcatggtcgcccgccgcggcgtcgtcggcttcttgaaggaacggctgtatcggctcggcatacctctgctgctttatatcgggcttatcggaccgctgaccgagtactacgtggcgggatcatggtggtcgcagccgcgccggggtttcattgaggactggttgcgccacgtctccgacgggcagcttctggacggctcaggcccgctctggttctgcctcgtgctgttgctgttttccggctgctttgccttgcagtgcagattccgtccgatcggccggccttccccgggaccggtaccggtaccgggcctcgccgttgtgctcggctttgtcctgacgatgagcgccgtgacgttcgcggtggggctgctggcgccggacggccgcaccatcctcaacatcgccattcacgacgcgccgcaatatcccttcatgttcgccgccggagtcgcggcatggcggggcgattggctgcgacagatttcgagcagtgcagggcggcgctggcttttctgcgggctggcggggagcatcgcgctgtgggccgccatcgtcgtgttcgggggagccctcgaaggtcggctggccgactacggcggcggttggcattggcaggcggctggcatggacttttggcggtcggcgacgtgcgcctcgctcagcctggggttggtggtgctgtatcgcgacctgttcgactggcagggtccggtgacgggattcctcagccgcaatgccttcggcgtttacgtcctgcacgcccctgtgctgatcgcggtgacgcgcgtcatgcacgattggtccgttgccccgcaatggaaattcctgctggcaagcctcataggcgtcgtcgccagctttctggttgtcggattgctggcccggcgcgttccggggctgcgcgcggtgctgtgagcattgcagcgcgcatgcgcggtgacgaatgatgtctaaagattaagcgggtagggattttgctcaatgattggttgaggtaggtgctcttgtgcacctaggaatcatgcattttgccgacttcttttcctccagcagtattcatgagagccctgcgtagcgatgtcgaaccattctcggctttcccttaccgaacgagaagcgttgttcggcacgcgcagcaggtttcgtattttagccgtcgagaaagcgggcgactcagctgtcatcgacatggagcaagtctagctatgaagcaagcatgggttgataacagctccaccaaaaccaacggcgatgagacaagttttccgaagctgccgagcaagaaaaaaacgcgttcttcaagcaccgcgaaaaccgtcacggtgatcgagacgggcctccgacgaatttaaagaagaagatgcaatcaagcggcggctagtccgatttacttttcgacgtgccgctgctttgccgcgcttcaaagccagcgccgcaatccgattcacctaatccccattcgagacccggcgattgtcctcacgccatgaggtcacgacaggtccgcgccagcaatatgctggtggatgccgatctctgcgcggcgcaggtggctgaaatactcctcagcctgattggtgcaagcgccgtcgaggctgtatgcctcctcctgatggttgatccatctcgaaaacgctcatgcagaccataccaagaggtggcttcgtcggcgttgacgaccgtcccccttggcgatgcgcgccttgatgaatgcgacggcttggctctcggagccaaacacggccaggaccgacttgcgaccaacacgacctcgcgcttgcagtgctggttacgtgcaaagcgccggtcagtccgggacgccggccgccttcagcgtctcgcgataggtcgcggacatcgattgcaccgggaacggaatccgtgacaggaatccggagatcgaaaactccggatcgaccttgagcagctcgcgtgcgatctgggtcgcgcgcgcggtttcgccggtcttgaccagcgccacgatcaggacgcgcagcgccactgcgaagcggcggttctgcgccagcgccttgtcggcccacatcaccgcctcagtaaaatctccgtcgagcattgcgcagatggcgagcgcggcggaagcgaaccagccgcgcgggtcacgcgggttgagccgctgcgcgcgctcaatcatggcgcggccggccttctggttgccgcgcatcgcctcgacccagccgccgagcaccagcgccatcgccgagttcggattgatcgcaagcgagcgctcgaacaattcgcgcgcgggctcgatctcatcggccatgttccagatcgcgaacgccgccatccacagcacctgcggatcaccgggcgtaagctcgaccgcgcgccaggcctgcgcgaccgcgcgctcccggtaggcgtcgtcaggcttcagccagccctggacatggcgcatcgcatggcaataggccgacgctgcaagcgccggcgcgtaattcggatcgagcgtcagcgcctggtcgaggcagtcgagcgcagcttccatgctctcgggcgtgaactcatacctcagactgtaggcgcgcagcagcagatcgtaggcatctagtctgtcgggcggcgctgcgcgcacccgctcggcctcggcgaccagcatggtcggttcgatcgcgccgaccacgttctcggtgatgcggtcttgcaggtcgaacacgtcggtcgccgcgccgtcgaaccggtcggcccacagatgcgcgccggagctggcgtcgatcaactgtccggtgatgcgcaggcgatcgccgccgcggcgaacactgccctcgagcacatagccgacgccgagctcgcgtccgacctggcggatatcgaccgccttgcccttgtaggtgaaggccgagttgcgcgcgatcacggtgaggcggctgcaacgcgccagcgcggtggtgatgtcctcggcgatcccgtcggcgaaataatcctgctcgggatcgccgctcatattggtgaagggcagcaccgcgatcgacggaccctcgctcggccgtgccggcgtggcgctgtccgcgaccggacgaacgggtgcggcgtcctccctgacttcgccgacgaagcggagacccttgcggggcagggtgcggatcagccgctgctgctcgccattgtcgccgatcgcggttcgcgcggcgttgacccggctgctcagggtcgcctccgagacgatccgcccgtgccagaccgccgccagcacctcgtcgcggctgaccacgcggtcgcgggcccggatcaggaattcgaggaggtcgaagacttgcggctcgacggccaccagggcatcgccgcggcgcagctcccggcgctcggaatcgagggtcaagtcgttgaaatggtaggtcaaatcgaagagtccggcggccggcggctgaatccgcggcggaacctagcacaggccgggcggagccaaaatcacgacggtctgaaggacaaatccacgtcctctcaaagcggacgggttcggtctctgcaatattcaatcccgacaccagacttaaggagatcgccatgtcccaatccatcaatccgcaccgccgccgcttcctcggcatcgccggcgggatcctcgccgtttctcggttcggcttgatcggatcggccagtgcgcaatccaagccggcgccagcagcggtcaaggcgggcggccacacgacgatcggtccggtcaagcagatcaatgccggcgtgcttgacatcggttatgtcgagatggggccggcctcaggtcccgccgtcatcctgctgcacggctggccctacgacatccacagctatgccgacgtcgcgccggcgctggccgaggctggctatcgcgtgatcgtgccgcatctgcgcggctatggcaccacgcgcttcctctccagcgacacgatgcgcagcggccagccggtcgcggtcgccgccgacatcattgcgctgatggacgccctgaagatcgagaaggccgtgctcggcggctacgactggggtgcgcgcaccgccaacatcatggcagtgctctggcccgagcgctgcaaggccatggtctcggtcagcggctatctgatcggcagccaggcggccggcaaggtgccgctgccgccgaaggccgagctgcaatggtggtaccagttctatttcgcgaccgagcgcggccgcgagggctatgccaagaaccggcacgacttcaacaagctgatctggcagctcgcctcgccgcagtggaagttcgacgacgcgacctacgaccgcagcgcggccgccttcgaaaaccccgaccatgtcgatatcgtgatccacaattaccgctggcggcttggtgtcgccgagggcgaggcgaagtacgacgcgttcgagaagacgctggcccaggcacccgtgatcacgatcccgaccatcaccatggagggcgacgccaacggcgcgccgcatccggagcccgccgcctatgccaagaagttctccgggcattacgagcatcggcagctcgccggcggcatcggccacaacctgccgcaggaagcgccgcaggcgttcgtccaggccatcatcgacgtcagcaaggtctgacacggacgatgccgagatcggtgtggagacctgatcgctccgatctggcgctgcgatggctgcgaggctagtttgcccgctgcaatcgcatgcggggaacggctttgaccatcaccatctatggcatcaagaactgcgacaccatgaagaaggcgcgcgcctggctcgacgatcacggcgtcgcttacgacttccacgattacaagaccgcagggatcgccaaggacaagctcaagcagtggagcgaggaggtcggctgggagacgctgctcaaccgcgccggcaccaccttcaagaagctgcccgattccgacaaggaaggcttgaacgagcgcaaggcgctggcgctgatggccgagcagccctcgatgatcaagcgcccggtgctggatctcggaccgaagcgcgtcgtcggcttcaagccggacatctacgccaaggaagtgccggcgaaggcgcgccagaagggctgatgctcgctgcaaaactgatgagacactgaccatggacttcgataaggcggcagcactcgcaaccgcttgggtggatatccttttcgagggagaggcgcgcatcgtgcgtgaggccacgatcgcgaagccatatggctggatattcttctaccaatccgcagaatttctcgatgatggcaatccctcagcccaactcgtcggcaacgctccgatcatcgtgaacagagacacgtgtgaattgcgcgtaacgggagtggcaaagccgcttgaacactatttggctgagtatgagaaaacgttcccgccaatttcacttcaacgaacgccgcagcttccaacttggtaggcacatctgaattcagacgaacggcattgcggcacagcgccgttggtcgatcgcgacatttgctgcggttgcgcaaaggcggtcggtgtcgggacgaaccagccagcaaacggctatgagtatgcgtcccggagctagatcagctcaaccgaatcccggctcgccggacgatccgccggcacgaacctgcggtcgatcacggcccgcacggtgacgaccggaaccgatttcgccttcacgcccatcaggttgtgcagccggaagccgccctcgatgctgatcgccttgtaggagccgatgatgtgctcgacgcgctcgccgcgtccgaacggcagcagcagccgttcataggatacgtccttgccgtcggcgtcggtgacttcagcgacggtataggtcggacgcttgcgcgccaggcaggcgcgataggacaggatgacgccggcgtagcgctccgggccgatcgcatcatcgagatagcggttggtgcgcagctgaggctcgacatgctcgttgccataggcggtggtcagccgcgcgccttcctgcgtgatgatgaagcgggcgtcctcgccgctgccctcgacgtcgaagcccatcatgtcggcgcgctcctcggtgctgccgtcagtgtggaagtcgcacagcaaaggaagggtgtccggcatgcgcagcgcgcgcaaccaggcgttcagcagcacccgctgcgtgatcgatttgatcactgatggatcggcactcgcgaatggcattggctaaccgaactgacgcacatcccggggcgggatgcgaggggtggcctggctgcggacataaagccgcagccgcgtgctcagaaggtcacgttgttggaccgacttgatggccggggaattggtgctttcgaaatgcaaggctctagccgttcatcatgcaatggccgggagtttcggcgagaggcggaaatattctatgaaagggaaagtccggagcaaaacaggcttaatggtgactttccgaggcgcaaagcgcgctcgaatgccattcgactaaggatcaacaggaaccgcttgtgccgatactgcaccgcacagctttccaccttgcgtaaccgccgcagatgacggcatattccggcccggaggcgacaggccccggacggtttccaagacgtgcggacaacctgtcggacatgaaaaaagctggccacgcgggcgaggggcttcgcggcgatggcgtatgggggaatctatttggccgatgagttcatcctcgaaaccagcggattgaccaaggaattcgccggtttctttgccgttcgcgacgtcgcgctcaaggtgcgtcgcggcagtatccacgcgttgatcgggccgaacggcgccggcaagaccacctgtttcaatctgctgaccaaattcctgaagccgtcgggcgggcagattcgctacaagggccaggacatcaccgcgatgccgccggccgacgtggcgcggctcgggctggtccgctcgtttcagatttcggcggtatttccgcatctgaccgcgctcgaaaacgtgcgcgtcgcgctgcagcgccagcatggctcgtcattcgatttctggcgttcgaaaagcgtgctcgaccgcttcaatccgcgcgcccatgagctcttgaacgacgtcggcttgagcgaattcgccaacacgccggcggtcgagatgccgtacggccgcaagcgcgcacttgaaattgcaacgacgctggcgctcgaccccgagatgatgctgctcgacgaaccgatggccggcatggggcacgaggacatcgacaagatcgcggcgctgatcaagcggatctcggccaaatacaccatcctgatggtcgaacataacctctcggtggtggccaatctctccgacatcatcaccgtgctgacgcgcgggcaggtgctggcggagggcaattacgccgacctctccaaggacgagcgcgtgaaggaagcctatctgggagcgggtcatggctgaggcaaaactggcggaaaggcccgtggctgcgaccggcgccgaggtgctgacgatccaggacctgcaggcctggtacggcgaatcgcacatccttcacggcatcaatttcaacgtgaaggccggcgaggtggtgaccctgcttggccgcaacggcgccggcaagaccaccacgctgaagtcgatcatgggcgtcatcaacaagcgctccggctcgatccgcttcgacaacaaggagatcatccgcgccacctcggacaagatcgcgcggatgggaattgcattctgtcccgaggagcgcggcatcttctcgagcctcgacgtgcgcgagaatctgatgctgccgccggtggtgcgtccgggcggcctgccgctcgaccagatcttcacgctgtttccgaacctgaaggagcgtctcaacagccaaggcaccaagctgtccggcggcgagcagcagatgctggcgattgcgcgcatcctgcgcaccggcgcgcgctttttgatgctggacgagccgaccgaaggcctggccccggtcatcatccagcagatcgggcacaccattgcgcgcctgaagtcgcagggcttcacgatcctgctggtcgagcagaatttccgtttcgcctcgacggtggccgaccgctactacatcgtcgagcacggcaaggtgatcgatggcttcgccaattcggagctgtcggccaatatggacaagctgcatacctatctcggcgtctgaactcgctcgagccagaaaatttagaactgaggaaatacccatgaagaacacgatttctgcgcttctgctcggcaccgcgatcgcgctcagcgtcggcggcgtggcctctgccgacgacaaggtcgtcaagatcggcgtgttgtcggatcagtccggcctctatgcggaccttgccggccccggctcgacgctggcggcccagatggcgatcgaggattccggcctcaaggccaagggctggaccatcgacctggtctccggcgatcaccagaacaagcccgacatcggcaccaccatcgcgcgccagtggttcgacgtcgacaaggtggataccatcgtcgacgtgccgaattccggcgtcgcgctcgcggtcaacaacgtcgtcaaggaaaagaacggcgtctacatcaattcgggtgccgcgacctcggatctgaccaacgcgcagtgcacgccgaacacggtgcactggacctacgacacctacatgctggcgcatgccaccggccaggcgctggtgaaggcgggcggcgacacctggttcttcctgaccgcggactatgcgttcggcgccgcgctggagcgcgacaccaccgcggtcatcaccgccaatggcggcaaggtggtcggcggcgtcaagcatccgctcaacaccgcggatttctcctcgttcctgctgcaggcgcaggcctccaaggccaagatcatcggtctcgccaatgccggcggcgacaccaccaactcgatcaagcaggccgccgagttcggcatcgtcaagggcggccagaagctcgccgcgctcttgctgttcctcaccgacgtcaaggcgatcgggctcgagaccgcgcagggcgtctatgcgggcctgctgcattatttcaaggcgctggaagcgctcggcggcaatccgcatgacggcgccaaggtggtcgcgaagatgaagacgatcccgaccgacgatccgctgttcggcaagggcgaggtcgaggccaacggtcgcgtcacccacgacgcctatctgttcgaagtcaagaagccctcggagtccaagggaccgtgggacttctacaagctggtcggcaccgtgccgggcaaccaggccttcacgccgctcgacaagagcacctgtgcgcttctgaagaagtgacgatcacgcccgccgggccatgcgcgtggccggcgggcttcatctatttaagcgaaagctcattcgatgcaggctctctacgcacagcttctggtgggactgatcaacggctcgttctacgcgctgctcagtctggggctcgccgtcatcttcggcatgctcaacatcatcaatttcgcgcacggcgcgctctacatgatgggcgccttcgtggcgtacttcctgctcaatctgggcggcatcaactactggtgggcgctgatcatcgcgcccgtcatcgtcggcatcttcggcatgatcctcgaacgcaccatgctgcaatggctcgccgggctcgaccatctctacggactgctgctgacgttcggcatcgcactgatcgtgcagggcgtgttccagaactatttcggctcctcgggcctgccttactcgatacccgaccagctcaagggcggcgtcaacctcggctttatgttcctgccgatctatcgcggctgggtcgtcatcttctcgctggtggtgtgccttgccacctggttcctgatcgagaagacgcagctcggcgcctacctgcgcgccgccaccgagaatccgacgctggtgcgcgccttcggcatcaacgtgccgcgcatgatcacgctgacctacgggctcggcgtcggccttgccgcgctcgccggcgtcttgtcggcgccgatcaaccaggtccgtccgctgatgggcgccgacctcatcatcgtggtgttcgcggtggtcgtgatcggcggcatgggctcgatcatgggctcgatcatcaccggcttcgcgctcggcgtgatcgagggactgaccaagtttttttatcccgaagcctccaacaccgtggtgtttgtcctgatggtggtggtgttgctggtgaagccaacgggactgacgggacgggcggcctgatatgtcagcattgaccgacgatacacttccgatgacgccgcgcgcgatgcgcgacgagatgatcgtattcgccgtgatggcggtgctgctggcaatcgtgccgttcaccgggatctatcctttcttcgtgatgcaggcgctgtgctttgcgctgctcgcctgcgccttcaacctcctgatcggctatggcggcctgctgtcgttcggccacgccatgttcctcggcaccgccggctacgtctcggcgcatgcgctgaaggtgtggggcctgccgccggaactcggcatcgtggtcggcaccgccgccgccgccttgctcggcctcgtcaccggctacatctcgatcaagcggcagggcatctacttctcgatgatcacgctggcgctgtcgcagctgctttacttcctctatctgcaggcgccgttcacccatggcgaggacggcatccagggcatcccgcagggccacctgctcggcatcttcgacctctcgaagccgatggtgctctattatgtcgtgctggccggattcctggccggtttcctgctgatctaccggaccatcaactcgccgttcggcgaagtgctgaagtcgatccgcgagaacgagccgcgcgcgatctcgctcggctacaagaccgaccagtacaagctgctcgccttcatcctgtcgggcacgctggcgggctttgccggctcgctgaaagtgttcgtggcgcagaatgcctcgctcaccgacgtgcactggtcgatgtccggcgagatcgtgctgatgacgctggtcggcggcctcggcaccatcttcggtcccgtggtcggcgcattcgtgatcatcgccatgcagcaatatctcgccggtttcggccagtgggtgacggtgatccagggcgtgatcttcgtggcctgcgtgctgctgttccggcgtggcctggtcggcgagctggcccatctgctgcggcggtcgctgtaggacgggcgggcgaatttcggccgatatagcggtggacgaccgcccgttcgggcggtcgtgtcaggtgttttcccagccagatgctctatgacagttctgtgacagtcgctaaaagggctgtcccggaatgatggaacttgagtcatgctgcgctggtttcgcgcctttctgcccaaggaagagcgatttttcgacctgttcgcccgccacgcccagacttccgtgcagtgcgcgaaggcgctgcaggacatgctgcggggcggcgaggagacgccggtcttctgccagcgcgtcaaccagttcgagaacgacgccgacagcgtgacccgcgaggtgctgaccgcggtccgccgcaccttcatcaccccgttcgaccgcggcgatatcaagaacctgatcacctcaatggatgacgcggtcgaccagatgcaggcgaccgcgaaggcggtcatgctgttcgaggtgcgcgagttcgagccgccgatgcgagagatcggcacccttatcgtggaatgcgccaatctggtcgtccgcgcgctgccgctgctgcagtcgatcggccacaacgtctcgatgctgacccagatcaccgaggagctgaccaagctcgagggccgggtcgacgatcttcatgacatcgggctcaaggaactgtttctgaagcaccgcgacgccaacacgatggacttcatcgtcggcgcggagatctacgatcacctcgagaaggtggccgaccggttcgacgacgtcgccaacgagatcaactccatcgtcattgagcaagtgtaaggcgggccatcacgtggacgccacgctgggtcttccggtcctgaccatcctgatcgcggtcgcgctgctgttcgacttcctgaacggcctgcacgatgctgcgaactcgatcgcgaccatcgtctcgaccagggtgctgcggccgcaatatgcggtgttctgggcggcttttttcaatttcgtcgccttcgcggtgttcggcctgcacgtcgccaatacgatcggcaccgggatcatcgacccgtcggtggtggacgcgaccgtgatcttcgcggcgctggtcggcgccatcgtctggaacgtgatcacctggggcttggggattccgtcatcgagctcgcacgccctgatcggcggcctggtcggcgccggcatggccaaggcgggcatttcggctgcggtgtggagcgggctctccaaaaccttgctcgcgatcgtgctgtcgccgctggtcggcttcctgctggcgctggtgctggtcgcgatcgtgtcctggctctcggtgcgctcgacgccgttcgcggtcgatcgcgcctttcgcatcctgcaattcgcctcggcctcgctctattcgctcggccatggcggcaacgacgcgcagaagaccatgggcatcatcgccgtgttgctctattcgcagggccatctcggcgacagcttcgaaatcccgttctgggtggtgctggcctgccagagcgcgatggcgctgggcaccctgatgggcggctggcggatcgtccgtaccatggggctgcggatcaccaagctgacgccgatgcaggggttttgcgccgagaccggcggcgccgcgacgctgttcatcgcgacctatctcggggttcccgtgtcgaccacccacaccatcaccggcgccatcgtcggcgtcggcgccgcacggcgtctctccgccgtgcgctggaacgtggcgagctcgatcgtctatgcctgggtgatcacgatcccggcgtccgccgcggtcgcggctgcgagctattgggccgtgcaggtattgaagtgatcagctgaccagcttcagcccgacgatgccggacacgatcagcccgatgcttgcgagccgcatcgcggtcgcgggttcgccgagaaggatgatgccgagcgccgcggtgccgaccgcgccgatgccggtccagaccgcataggcggttccgatcggcagcgtcttcaacgcgatgccgagcaggaggatgctgccggccatcgccgccagcgtcagcaccgacggcaccagccgagagaacccctcggtgtatttcagcccgatcgcccagccgatctcgagcaggcctgcggtgaacagaatggcccaagccataacaaaccctccggattaggcagggtcgtccccgcagatggtatggtgaggagaaggtcgtccctctcatgcctatatggggtggtgtggccacggcgcattgcgacaaaacgcccttgattgcgcccgttttccctgtcaaacgctgccccgccatgtccgataccgctgcaaccaccgaatcgccgtcccgctcgccgctgtcagaagaagtagcgcgacggcgcacctttgcgatcatctcgcacccggacgccggcaagaccacgctgacggaaaagctgctgctgttcggcggcgccatcaacctcgcgggccaggtcaaggccaagggcgagcggcgcaacacgcgttcggactggatgaagatcgagcgcgagcgcggcatctcagtcgtcacctcggtgatgaccttcgaattcaacgagctggtgttcaacctgctggacacgccgggccacgaggacttttcggaagacacctaccgcacgctgaccgcggtcgactccgcggtcatggtgatcgacgccgccaagggcatcgaggcgcgcacccgaaagctgttcgaggtgtgccggctgcgcgacatcccgatcatcaccttcatcaacaagatggaccgcgagagccgcgacacgttcgagcttttggacgagatcgagaagacgctggcgctcgacaccacgccgatgacctggccggtcggccgcggccgcgacttcctcggcacctacgacgtcgtcaacggcggcgtccggctgctcgagggcggcggcgccaagaccggcgccaccgagcagatcgacatcgccgatctcggcaagcgcaaccccaatctcgacgttgccgaagtcaaggacgagctcgcgctggcgtcggaggcctgcaagccgttcgagctcgcggcgttccgcgaaggccatctgacgccggtctatttcggcagcgcgctgcgcaatttcggcgtcggcgacctgcttgaggggctcggtaagttcgcgcccgcgccgcgcgcgcaggattccgatctgcgcaaggtcgaggcggccgagccgcgcatgagcgcgttcgtgttcaagatccaggccaacatggatccgaaccaccgcgaccgcatcgcgttcgcccggctgtgctcgggtaagctcagtcgcggcatgaaggccaagctggtgcgcaccggcaagaacatgagcctgtcgagcccgcaattcttcttcgcgcaggaccgctcggtggcggacgaggcgttcgccggcgacgtcgtcggcattcccaatcacggcaccttgcggatcggcgacaccctgaccgaaggcgaggatctgaccttcgtcggcgtgccgagctttgcgccggaaatcgtccgccgtgttcgcctcactgatgcgatgaaggcgaagaagctcaaggaagccttgcagcagatgtcggaggagggcgtcgtgcaggtgttccgcccgcgcgacggcgcgccggcgctggtcggcgtggtcggtccgctgcagctcgacgtgctgaaggcgcggctcgatgcggaatattcgctgccggtcgagttcgaggtctctgaattctcgctggcgcgctggatctcatctgacgaccgcaaggcgctcgacgctttcatctccgccaacaattccggcatcgccgacgacgtcgacggcgatccggtgttcatggccaagaacgagttctatctcggctacacccgcgagcgcgccgagggcatcaccttctccaacgtcaaggacgtgaagaagaaggcgtgagtccacattcaccgccgtcgtcccggcgaaagccggggacccatagccaccgatggtcattgttgcgcgatggtgggacgacgagtcccttcaacagcatcggccgcggcgtatgggtcccggctttcgcgggacgacgcgtggaacaagccgtgcacttgcgcacaatccactcgtcggccccggctcgaccgggggacccagtacgcctcggcttctcccttcaatcaccgccgtctctggaatactggatcgcccggtcgagccgggcgaagacagttgaggatggggctgacgcgcgcagggaattgaacacggccccgcttgctccggttcggctgcggtaccattttccccggaacgcatcccgggttttggccgcatgttccgacgcgtcgtcatctgcctcgcttttgccgtgttggtcttcggcctcgcgggcaccgccggcgcccagcaacggcagcagaccaacccggcgccgttcgcgcacacgccttgcagcgtgctcgacgaagggccctgcacgccgtccacttgcagcgtgctcaatcacgggccctgctttcccgagatggattatccgtacggcgaaaatcttcagctcacgatcctgactgtgccgcccgaggggcaggccgagaagtaccgcaagccggatcatgatctcgataccatcggcgatctgtttgccgcgctgcgcgcctgctgggcgccgccgccgtcggacgacgcgcgcgagggcatgcagatgtcggtgcgcttcagcttcaagcgatcgggcgagatgatcggcgcgccgcggctgaccttctcaacgcggggcatctcggcaggcacccgaacgacgtacctcaacgccatcaacgcctcgcttgacgcctgcctgccgctcaaattcaccggcgggctcggcggcgcgctggccggccggccgatcatgatccgctatgtcgacaatcgggagcttgccaagccggccgccgatccctccaagcctgccggcaacccgtgaaccgcgacccggcgtgacgcattgcgtaccgcccggcgaagatgttacgcgaaggcattaatcaatcagggaggaacatcgtgggactgctcgtcatgatcctgggtctcgtgctgttcctcggcatccacgtgctgagcagcctgcgcgacctgcgcggcagcatcgtcaatgcgatgggcgagggggcctacaagggcgtctattcgctggtatcgttcgccggcctcgccctgatcatctggggcttcggccactaccgcgcgaccggctggatcgacgtctggacgccgccaaccgcgttcaagcacatcacggtggcgctgatgctgcccgccgtcattctcctcgtcgccgcctatatccgcggccgcatctacaccatcgtgaagcatccgatgctgacggccgtgaagctgtgggcgttcgcgcatctgctcgccaacggcgacctcggctcgatcatcctgttcggctcattcctcgcctgggcggtctatgaccgcatctcgctgaagcgccgcacggatgccggcggcccgccgatcccggtgggcggcccgaccaacgacctgatcgcgattgcggtcggtatcatcgcatatctggcgctggcgtttgcgttccacccggtcgtgatcggcgtgcctgtcatgggagcctgacgatgtctgttcaatccgccatcaagcgcaagaccgcgccggatctgcgcgcccgcaaaaatggcgagccgatcgtgatgctgacctcataccacgcgcacaccgcggcgttggtcgaccgtcactgcgacgcgatcctggtcggcgattccctcggcaacgtcatgcacggtttcgagaccaccgtgccggtcacgctcgacatgatgatcctgcagggccgcgccgtgatgcgcggctcgcaggccgcgctcgtggtcgtggatatgccgttcggctcctatgagggctcgaaggagcaggcgttccagtccgcggtgcggatcatgaaggaaacgctgtgcggcgcggtcaagctcgagggcggcgcgcggatggcggagaccgtggcgttcctgtccgagcgcggcattccggtgatggggcatatcgggctgacgccgcagtcgatcaacacgctcggctcgttccgcgcgcagggccgcgaggaggagacctgggcgccgatcgagaacgacgctagggcgatcgcggaagccggcgccttctcgatcgtggtcgaggcggtcgccgagccgctcgcgcgcaagatcacgcaatcgatcgccgtccccaccatcggcatcggcgcaagtgctgcctgcgacggccaggtgctggtgctggaagacatgctcggcctgtcgccgcgcgcgccgaaattcgtccgccgctacggcaatctcggcccggcgatcgaggaagccatcgcgggctatgcgcgcgacgtcaagagccgcgccttcccggggccggagcacgtctacggaatgaagaagagctgacgaggggcgcatggactggtcgcaacacgcactgccgccgatgcggcccgagccgcgcttcggcgatcgcgtcgtgccggcattcgccgagcggcccggcagcctgtgggcgatgatcgcggacgcggtcgcagagaacggtgacggcgaggcgctggtctgcggcacgacgcggctatcctggcgcgaggtcgccgagcagtcagcgaaggtcgcggcgggtttttcaaaactcggccttgcgcccggcgaccgcgtcgcgatcctgctcggcaaccgcatcgaattcgtgctgacgatgttcgccgccgcccatgccgggctggtgacggtgctgctctcgacgcgtcaacagaagcccgagatcgcctatgtgctgaacgattgcggcgcaaggtgtctggtccatgaggccacgcttgccgatcgcatccccgatgccgccggcgttcccggccttgcgcatcgcatcgcggtcagcgacgacggcgcgtcgcaattcgctcgtctgcgcgacagtgcaaaggcgcaggcgccggcggaggtgagggaagaggacaccgcgatgatcctctacacctcgggcaccacgggccggccgaagggcgcgatgctcgctcactgcaacatcatccactcctcgatggtgttcgtttcctgcctgaagctgaccaaggccgatcgctcgatcgccgcggtgccgcttgcgcatgtcaccggcgcggtcgccaacgtcaccacgatggcgcgctgcgccggcgcgctgatcatcatgccggagttcaaggcggcggaatacctgaaggtcgcggcacgcgagcgcgtcagctacacggtgatggtgccggcgatgtacaatctctgcctgatgcagccggatttcgacagctacgatctgtcgagctggcgcatcggcggcttcggcggcgcgccgatgccgattgcaaccatcgaaaagctcgacgccaagatccccgggctgaagctcgccaattgctacggcgcgaccgagaccacttcgccctcgacgttgatgccgggcgaactcaccgccgcccatatcgacagcgtcggcctgccgtgtcccggcgccgagatcgttgtcatgggacccgacggccgcgaggtgccgcgcggcgagatcggcgagctctggatccgcagcgcctccgtgatcaagggctattggaataatccgaaggcgaccgcggagagcttcaccgccggcttctggcattccggcgatctcggctcggtcgatgccgacaatttcgtccgcgtgttcgatcgccagaaggacatgatcaaccgcggcgggctgaagatctattccgccgaggtcgagtcggtgctggcgggccatccggccgtggtcgagagcgcgatcatcgcaaaaccctgcccggtgctcggcgagcgcgtgcacgccgtgatcgtgacgcgcgctgaggtgaatgccgagagcctgcgcgcctggtgcgccgaacgcctgtcggactacaaggtgccggagaccgtggcgctgacggcggagccgctgccgcgcaacgccaacggcaaggtgatcaagcggcagctgcgggagggcttgtctgtgtcctagtctttcacctctcccgcttgcgggggaggtcggatcgcatcgccagatgcgatccgggtgggggctctctcaacatcgtggctctctcagcaatcccatgtgcggagctacccccaccccaaccctcccccgcaagcgggagagggagcccacgcagtcccgtcgcagctacgtcaaacgtccccggttaacgctttgatccgccttgctttgccttgcctctgccacaccgttagggtaacgccgccgcgacgtggggatcgggtaggggccaggctccaccgagattcgcggtcccgaggggatgggatagctttaagtgtctgaattatttgacgaagtagacgaggaagtccgtcgcgatcagctcaagaagctgtgggacaagtactcgatctttatcatcgcgctggcgctcctggtggtcgccggcgtcggtggctggcgcggctaccaatatctcgaggccaagaaggccgccgaggccggtgcggcgttcgaccgcgccgtcgaactgtcggaccagaacaagcataccgaggccgaggccgcctttgccgatctgatcaccaaggcgccgtccggctaccgcaatttggcacggctgcgcatggccgccgaggtcgcgacccgcgatcagccggccgctgcgaagctctatgacgagatcgcagccgaccgcagcgtcggcggtcccgggcaggacctggcgcggatccgcgccgcgcagattctgatggacaccacgacctatccgaacatgcagcaacggctcgagggaatggcgacgtcgaaggactcgacgttccgccattccgcgcgcgagttgctggcgctgtcggcgtggcacgccaacgatgccaccgccgcgcggcagtggctggaccagattgccaatgacggcgagacgccgccgagcctgcgttctcgcgccgaagcgctgcaggccttgttgccgccagttgcgaaaagctgagctggcgcgaaacccgagtttgagtgagagatcgaccatgcgccgctcgcaacgcctgatcgcagccgcagttctcaccgcgctttgcagcgcgttggccggctgcggcggtggcggtatggccaatttcgatccgagcgacatgctcgacttcctcgacaccaagaagaagctggctggcgaccgcaagccggtattccccgaaggcgtgcccggcctcgagcagggtgtgccgaaggaattgtacaagggctcgcagcaggagcagctcgaccagcagaacgccgcggcagccgccgcccagccggctccgccgccggagccgccgaagggcgccaagaagcacaccaagcgggccgcgccggcagcggatcaggcggccgctcccgacgccgcgaccgaagagggcgcgcccgccgcggtgccgccggacccgaagccgaagaagatcgtccgccgccgcaccaccgcgccgcccgccgacgaccagcaggcgcagcctgcggcaccggcccagcagcagacccagaccacgcaacaatccggcggcgcgttccccgcgccgctaccgagcggcggatttagccgctagtctcttgcctcattttcattgacgtgcgccgcgccgcggcgcctggatcatccatgtcttttaccatcgccatcatcggccggcccaatgtcggaaagtcgacgctgttcaaccggctggtcggccagaagctagcgctggtcgacgacgagcccggcgtgacgcgcgaccgacgcgagggccaggccaaactctacgacctcgacttcaccatcatcgacaccgcaggcctcgacgagggcgccaagggctcgctgacggcgcggatgcaggagcagactgaaaccgcgatcgagctcgccgacgcgctgatgttcgtgatcgacgcccgcgtcggcctgaccccgaccgaccgcgccttcgccgacttcgcccgcaaggccaacaagccggtggtgctggtcgccaacaaggccgaaggcaagcatggcgagatcggcgcgatggagtcctacgcgctcgggctcggcgatcccgtgcagatctcggccgagcacggcgagggcatgggcgatttgcacgaggcgctgagtgcgctggtgcccgagacaccaggggaagacgacgaggtcgaggacgacgaggacatctccgaggaggaggccgcgcagcgcccgatccgcgttgccatcgtcggccggcccaatgccggcaagtcgacgctgatcaaccatctgctcggcgaggagcggttgttgaccagccccgaggccggcaccacgcgcgattccatcgcggtcgagatcacctggcagggccggcagttccgggtgttcgacaccgccggcctgcgccgccgctcgcggatcgaggagaagctggagaagctctcggtcgccgacgcgctgcgcgcggtgcgcttcgccgaagtcgtcgtcatgatgatggatgcgcagaacaagttcgaggagcaggacctgcgcatcgccgacctgatcgagcgagaaggccgcgccatcgtgctcgcggtcaacaaatgggacctcgtcgagcgcaagcccaaccagatttcgcagctgcgcaccgatgccgaccactggctgccgcaggtcaagggcgcgccgatcgttgccgtctccggcctgatgggcgagggcatcgaccgcctgatgattgcgatccaggaggcctatgcggtctggaaccggcgcctgccgacctcggcgctcaatcgctggttcgagcaggcgatccaggccaacccgccgccggcggtctcggggcgccggctgaagctgaactacatcacgcaggtgaaggcgcgcccgccgagcttcgtgctgttctgctcgcgtgcggatgcgatcccgcgatcctatctgcgctatctcatcaattcgctgcgcgagaccttcgacctgccaggcacgccgatccggatcacgctgcgtgagaaggccaacccgttcgcccacaagcgcaagcgtccgtcgtgaacggagacgtgggggctgaaacggccaccgccgccggtccgcaaccgcgccgcggcgcggtggtcttcatcttcatcactctgctgctcgacatgctggcgctcgggatcatcgtgccgatcctgcccaagctgatcgaaggcttcgtcagcaacgacaccgccaacgcggcgcgcatcttcggcctgttcggctcgatctgggcgctgatgcagttcgtctgctcgccgatcctgggcgcgctgtcggatcgcttcggccgccggccggtggtgctgctgtcgaatttcggcctcgccgccgactatgtgctgatggcgctggcgccgaacctgatctggctgttcatcgggcgggcgatctcgggcatcacctcgtcgagcatctcgaccgtattcgcctacatcgccgacgtcaccgcgccggagcagcgcgccgcgatgttcggcaagatcggcgtcgcgttcggcgccggcttcatcatggggccggcgctgggcggcctgctcggcgagatcgatccgcggctgccgttctgggcggcggcgggcctgagcttcgtcaacggactctatggcctgttcatcctgccggaatcgttgccggtggagcggcgcgcgccgttcaaatggaagagcgccaatccgatcggtgcgctgcgtttcctgcgttcgaaccggacgctcgccgggctgtcgctggcgacgttcttcggccagctcgcccatgtcgtgctgccgtcggtgttcgtgctctacgccacctatcgctacggctgggacaccggcacggtcggcgcgacgctggcgctggtcggcctctgcggcatgatcgtgcagggcgcggcgatcggcccgatcgtgcggcggctcggcgagcgcaacgcgctgttcctcgggctcgtttgcggcgccctgggcttcgtgatcttcggcgcggcgccgtcgggccagctgttctggatcggcattcccgtgatggcgctgtgggggatttccggcgccgcgacccaggcgctgacgacgcagctcgtcgccgccgaccagcaaggccagttgcagggcgcgacctcgagcgtgcagagcatgtcggagttgctcggcccgtttttattcacgctgacgtttgcctatttcatcggcgacgacgcgccgctcaagctgcccggcgcgccgttctatctggccggcgcgctgctgctgctggcgctcgccattgctgcgcgggcgacgaggacgaccacttagctaggtggtgcacccccgctacaatcccggcgatcgcgccgcccaagccttggtggcctggcagctttccatcgccctgacataggcagggcgcgccgtcgtgcgggcgagatagtcccgttcggcaggaccagggacgtaatggccagtgcgcaggccgagcagcaaggcgtagctcaccgagatatcggcggccgtgaagcgattgccagcgagataagggcaatcggcgaggcggcgggtcaccagacccagccggctctcgaaggtctcgagggcccagcgggtcacccggacgtctcgctcggcctcgggcgccaggttgcgaccgacaatgacgccgttcatcggcccagcgagcccggcctcgcccaaatggagaaattgcagataggaagcgaaggcgggctcgtccggtgcgaccgcaagcgaagctgagtcgtggcgggcgagcaggtactgaagaatcgcgaccgactcgaccatgatcgtctcgccgtcctgcaggacgggaatgaagccggcggggttgattgcgaggaaatcgcgatcatgctcgaccgcaaacagatcgactgggcgcagccggtaaaccaatcccaattcctcgagcagccagacaacacggaagccgcgaccttcgccatagacggtgagcatcgttgagtattcctggattgggttagatataccaactcgtaggggtcagcccgtcgaagcgggtgcttcccgtttgatgggttcgcgatctaatccgtcgccggcaccgaatggtgctcatgcgtgatgcgccattcgccgccgaccttgcgcaatccgatcgtcagcctgaactggaacgtggcgtcgggcgggccgcaccgcatcaccatcaccgcgaacgccacgtcatcgccggccgtgatcgcgatctcctcgatattgaaggcgtgggacgggcggtaacagctgtagaacaggtcccacgtcttcctgtacgcgtccaatccgcgcgactgcaacggcggcggaacgtcgaacatcacgatatcctgatcgtgatgggcgagaatgcccggatagtcctgtcggcggaccgcggccgcccaggcgtcgatgagtgacctgatttcggtttccgccgtcggtttctgctgtgtcatcgcttgcgggttccaagttgatgtggatcgatgcttcgaggacgaatgcgactgcgccggtccgacacaagcggacaggccgcctcgatgacgattgcgttatcttggctatttacaaaccatccgataatccttcccgcttggaacgctcccgcaaggccgcgctcgatgctgccatcaccatcgtgacgcgcgacgggtcgggatgcctgacgccggatgcgatcgcgcgcgaaagcgggctcagcaagggcggcgtgatgcatcagctccgcatcaaggaagcggtgcggcgcgcctcttctcgaacagcggatgacgcatttcgaggcgttctcgaaccgctacctcgagaaggtgcgcgcacgcgccgcaaagtcggcctcggcgcgcatgcggagccgaacttctcgacctggaaaacgcaacgccgtccaagcggaatatgatcgcttggcggcgttggatcggcaccgggcccctgaaatcccccggcaatcggtccggtatcacaagagatatctcgggtttgtgacagcgcggggccgtcattcgcgaggccgccccgacaggcttcccccggcgcgcctttccccggcgtttcggcccccgaattttctgacgagtttcccagcgatggcccaactttacaaaccgcctggcgacaaggaatgggcggcgttgcccgcgcaggcgaaagcgaagtcggcggcgaagtgagagagtcgggtgggcaaagagcaagcgtgcccaccatcgcgagcacgccgcaaatggtgggcacggggctggcgcgcctttgcccaccctacgatagttacgatagctcgcttacttcttcaccagcggacagtcgctggcctcgagcggcttggcggcgtcttccggcgagatggtggcgatcaatttgtaatagtcccacggatatttcgactcttccggcttcttcacctcgaacaggtaggccgggatgatgcggcggccgtcgatccgcaagggacccttgccgaacagcgggtcgtcggtcgggatctccttcatcttggcgacgaccttggcgccgtcatggggattgacgcccatcgcgtcgagcgccttcaaataatgcagcacgccggcatagacgccggccaccgtcatcgacggcatcgagcccttcggcgagaccttctggaagcgcttcgaccaggcgcgggtctggtcgttcgcgtcccagtagaacgactcggtgaaggtcaggccctgggcgatcttgaggcccagcgcgtgcacgtcgttgacgaacagcagcagcgccgcgagcttctgtccgccggtggtgatgccgaattcggacgcctgcttgatcgcattggtggtgtcgccgccggcattggcgaggccgatgaccttggccttggaggcctgcgcctgcagcaggaacgaggagaagtcggcggtgttgagcgggtgcttgacgccgccgagcgacttgccgccgttggcagtgacgaccgccgtggtgtcgcgctccagcgcatggccgaaggcgtagtcggcggtgaggaagaaccaggtatcgccgccggccttggtcagggcctggccggtgccgtgggccagcatataggtgtcgaacgtgtaggagatcgtgttggcgttgcaggccttgccggtgagatcggcagtggcggcgcccgagttgagcacgatcgagttcttctccttggcgaggttgctcaccgccagcgcaacgccggagttcggcgtatcagtgatgatgtcgaccttctcgttgtcgatccagttgcgcgcgatgttgacgccgacgtcgggcttgttctggtgatcgccgctgaccacctcgatcttccagcccttggcgcggaggccggaatcctccaccgccatgttggccgcagccaccgagttcgggccgccgatgtcggcatagaggcccgacatgtcgttcagcacgccgatcttgacgttcttgtcctgggcgaaggcaggggttgtaaggccgagtgcagcgcaagcaaaaagcacggcgtggcgccgcgcgagcgtcgtcgtcatcagacattccctccactgtgatttttccggacggccctcttgcggggcctcgcgccggtcgttcgagttcccgcttaccctgtccgggcggacgcggcaatccgcataaagccggatgaactgcgtccaagcgtcatcctttggtcatctctacttcagcgcgtccgaggtcagcttgaacttctggatccgcttgccctcgacctcgccggtgtagacattgcccttctggtcgaccgccatgacatggagcagggcgaattgcccggcattgcggccgctatggccgaaagtgccgaccacactgccgtcgtcgcgcttgagcacgcggatctcgttgttggcgccgtcggcgttgagcagataggtctgcttcggatcgggccacagcgcgagatcgaacaccgcgccgtcgccgcgggtgttcttctcgtagaaccattccctgacaaaggtgccgttcttctggaacacctggatgcggtcctggctgcggtcacagacatagaccagcccgtcattggcgatcttgatgcaatgcacgggattgccgaactgctcctgcaccgcggcgctcggatcgtatggcggctgcttgtcgtcggtgggcagcttgccatagccgccccagtgccgcttgtaggcgagcgtggtggcgtcgaacacgatgacgcggcggttgccgtagccgtcggcgatgtagagttcgttggcatccttgtcgatcgccatctcggcggggcggccgagctgcgtggtgtcgttgctgttggtgcgggttgcgatcttgccgatctgaccgagatatttgccgtcgagcgtgaacttcaggatttcgctgtcgtcatcggcattgccgccgatccacacgaagccgcgctcgtcgacctcgatgccgtgctcgcggccgacccattgatagccgtcgccggggccgccccacgatcgcagcaggttgccgtcgacgtcgaactccagcaccggcggcgccgctacgcagcatttcgcgcgcggcggcgtgaggctcgccgccttctcgccgtcggtcagcgagcgtggccggtgcaccacccagatgtggccctgccagtcgacggtgatgccgccgacctggccgatgatccagttgttgggcagttgcttcggccatgacgggtcgaccgcgaaggtcgggacgtcgcccgcccgggcgggcgcgggcggcatgagaagcgctgatgatgcgatgccggcggagagaaacaatccagtgagaatggagcgcgcgcgattgaacgtcggcgtcatgatgcctcccgagatttttcttggcggtggtgccgctgggagggcagtcaatcgcggggcggggacggagtcaattgcatggcagaggcaagccgacgcgtcacaggtgtcatcgcccgctcgaccgggcgatccagtacgccgtggcccatcggctcaagcacggacgtctctggaatactggatcacccgctttcgcatgcgcgggtgatgacagtcgaaggcgcgctcgctgtaaccgactcacgccggcggctgaaatgtccgcagcgtgcgtgccttgtagtcgtagagcttgccggtttcggtccactccggcgagcacatcgggacgatgaattcggcggccatgtcgggcgtatcgagcgtcatcgggtcttcgccgggaaatacctgcgcgcgcatccgggtgcggatcgggccggggctgaacagattgacgcgcagcgccgtgttggcggtctcgttggcccaggagcgcaccagcgcgtccagggcggccttcgaggcggcatagggcccaagataggcgctggccttgtgcgccacgcccgaggtcacgaacaccgcgcggccggcgtcggactggcgcagcagcgggtccatgcagcggatcagctggaagttggcggtgacgttgatcgccatcacgtcgttccacggcttcagctcgatatggccgagcggcgacgacggtccggccgtgccggcattgccgaccaggatgtcgagcttgccgtggcgctcatgcagcgcgagcccgagccgcgcgatgccctcgtaatcggtcagcgacagcggcaccagcgtggcgctgccgccgtccttgcggatctcgtcgtcgagctcttccagcccgccctgcgtgcgcgccaccgccaccacatgcgcgccggcttttgcaagggcgactgatgtcgcatagccgatgccgcgcgatgcgccggtcacgagggcaatccgggaggcgaggggttttgtcatgtctgtctgtccgcgtctttgccgggggtattacagacagaaatggccgggacaagcccggccatgatgaattccaacaccaccgaagctcacaaaccgccgccttgatccatattggcgctgttggtcccgttgcccgagctgtcgggtgtcaccttcatgccctggcggaaggcaaatacgatgaagccaaccagcagcaccccacagagaatgccgatgatcggttgcatggccttgttccgtcagctggcctccgccagcagcgagagctggcgcggcgagggctcggtctcgctctggtcggtgagatgggtcggataggcgccggtgaagcaatggtcggcgaacttcgggctggcgggatcgcgtccctcatagcccatcgcgcggtacatgccgtcgatcgacaggaaggcgagcgagtcggcgccgatgatgtcgcgcatttcctcgagcgaatgggtcgcagccagcaggccaccgcgatcggggaggtcgatgccgtaatagtcgggatagaggatcggcggcgaggcgaggcggaaatgcacctcgcgggcaccggcgtcgcgcatcatgcgcacgatcttcttcgaggtggtgccgcgcaccaggctgtcgtcgatcaggatgatgcgcttgccctcgatcgcggcgcggttggccgaatgcttcatgcgcacgccgagctcgcgcacggtctgggtcggctggatgaaggtgcggccgacatagtggttgcggatgatgccgagctcgaacggcacgccggaatactggctgtagccgaccgcggcgggcacgccggaatccggcaccggcaccacgacgtcgacctcgggatggctctcgcgcgcaagctgggcgccgaacgccttgcgcacgtcgtagaccgagcggccgccgacgatcgaatccggccgcgcgaaatagatgtattcgaagatgcagggccgcgccggcttcggcgggaacggcttgtggctgtgcgcgcctttctcgtcgaacacgatgatctcgccgggctcgatgtcgcggacgtatttggcgccgatcatgtcgagcgcgcaggtctccgaggtcaggatcggatggccgtcgagatcgccgagcacgagcggtcggatgccgagcgggtcgcgcgcgccgaccagcttcttgttggtcagcgccaccagcgcataggcgccctcgatggcgcgcagcgcctcaatgaaacgatcgatgaagcgggtgcgcttggactgcgcgaccagatgcaggatcacttcggtgtcggtggtcgactgcatcaacgcgccgcccttcaccagctcgctgcgcaaggtcaggccgttggtcaggttgccgttgtggccgaccgcgaacccgccggcattgagctcggcgaacaacggctgcacgttgcgcaggcccgtgccgccggtcgtgggatagcggacgtggccgaccgcggcgctgccgggcagacgatcgatcacctcacggcgggagaaggcgtcgccgaccaggccgaggcggcgttcactgtggaagcggctgccgtcgaacgagacgatgccggcggcttcctggccgcggtgttgcagagcgtgcaggccgagcgcggtgatcgcggcggcctcggagtggccgaagatgccgaacacgccgcattcctcgcggagcgtgtcgccatcgagatcggggtggtaacggaaatcgttgtcccggagatgttcctgcaattccgtcgggccgaggtcgagatccatctggtcggcatgatcggaaggggtttgcatctcgttcatcgcctctcgtaagggcccaaataagttatcggcccgcgggtttctcgatcagctttttcaagctgtcacgcgcaggtttgctatagccatcacccgacgccggcgtcgcctgatcgttggtatcggccgcagaatcgtcgtctggcttattcttcttgaacttctttaagatggtgttctcggggtcgtcaggcaagagcgacatcagccaatccccggttccctgcagcaccacccgggacttcgcccccgtgacccagtcgggccgctgcttgtcgggaaccagccaggtgaagaacatgaacgccacgaccacgatcagcaggccgcgggcgaggccgaacaggaagccgagggtgcggtcgagcgcgccgatccgggaatccaggatcatgtccgagatccgcaccgtgatgatcgagaccacgatcagcgtgccgatgaacacgccggcgaccacgaccacggcggcgaccgtgtcgttattgaagtaagtcttggcggtgggcagcagcttcgagaaagcatacagcgtgaccagcgcggcggcgccccaggccgcgatcgacaggatctcgcgcatgaagccacgcaccatggcaagcaggcccgaaatcagcatcacgccgagcaggacgagatcgagtatcgttatgggcatcggctggtcaggtccgctggtgcgtttcggtacgctgttaagggcttacgctgttaagggctctcgcgaatcggcgtctcggtgccgtcctaactgaggcgcatcgggggcatccggcaaggccggagcgccgcctgtcccgcgcggcggatgtatagcggcggggcgctgttacgtcacgcccgctttagctggtctcgcgacggaatcgggccggtgtggcatttttctcaacggcatcagtgccccccgaggcaccttggtcgcctctcggcgtagcccggccgccgcgaggcgtcccgcgcgcggcaatttcggccaccagcgtggtcagattgccgacggtgttgagcgtgagggcggcgtcgccgccgccatcgccgcgggccgattcgggcagaatggcgcggccgaagccgagcttgagcgcctccttgagccgggccggggtctgcgccaccgggcggatcgcgccggacagcgaaatctcgccgaaatagaccgcgtcggtcggcagcggcgcattcaccaacgaggacaccagcgcggcggcagcggcgaggtccgcagccggctcctggatgcgcaggccgccggcgacgttgagatagacgtcatgtccggacaatttgacgccgcaatgcgcttccagcaccgccagcaccatcgatagccggctcgggtcccagccgaccacggcgcggcgcggcgtgccgagcgaggtcggcgccaccagcgcctgcagctcgaccagcaccgggcgggtgccctcgatgccggcgaaaaccgccgtgccgggactgccgagctcgcgttcactgaggaacagttcggaggggttggtgacctcgcgcaggccgagcccggtcatctcgaacaccccgatctcatcggtcgcgccaaagcggttcttcgccgagcgcaggatgcggaactgctgcgagccttcaccctcgaacgacagcaccgcgtcaaccatgtgctcgaccacgcgggggccggcgatctggccgtccttggtgacatggccgaccaggatgatcgttgcccccgtcttcttggcgaaacgaatgagcgcctgcgccgaggcgcggacctgggtcacggtgcccggcgctgattccaccgtgtcggtccacatggtctggatcgaatcgatcacgatcagccgcggcaccgcgccttccgacagcgtcgagacgatgtcctcgaccgaggtctcggacgccagctgcaccggcgcatcggcgagcccgagccgctcggcgcgcagccgcacctgcgcgaccgcctcctcgcccgagatgtagaccgcgcgatggccggcgcgcgccatcatggaggtcgcttgtgtaaggagcgtcgatttgccgatgccgggatcgccgccaaccagcagcaccgagccgcggacaaagccgccgccggtgacgcggtcgagctcggtcatgccggacgacagccgcggcgcgtcctgggtcttgccggacagcgattccagcgcaaacgtccgtcccttgcgcttgctgcggatcgagaccggcaccgagcccgtggtgtcctcctcggccagcgtgttccactcgccgcaggagtcgcatttgccctgccagcgattatacgccgcgccgcagttctggcagacgaaggagagggtggatttggccatgggggagagctcgattccgtgtctcctccatagcacggatcaacagggcgcaacgtgcgacggcgcagccgtgccctggcatgttcggtcaaaatcgagtcagtcggccggcgccggtcgctgcttcaagacccgcaccgcgatcgagggggcaggccagagttgcagccggtagtgatcgtctccctccagtccgtcctccgacagcgtatcgagcgcgccgtacgagacccgcagccggtaggtccccggagcgacgtcgatgcgcgcggcatcggggaagtagtcggtgcaaccggcaatcgcgatgcgccccgatgcgacgtccaggctggcttcgacgatgtgatcccagccggcggagtcatcgtccggctcgcgttcgaggatctgcacggagaccgggacatgcatgttccgcgcggtaccgatcctgacgatgcccgatcctgctgcaagcatccggtcggtcgtctccggcgtccactccgctgaaagctcgtcggctgtggattcatcctggatgtagaattgggagtagtcggcgaacagcgagagttcgagagatttcatgattcagttgcgccttggtggaacagtctatcggtagcgttgaaaagtgacaatggttcgcgtgttgccgcttccttggttcagccggacgtggcgttcgtggggcagtcctctaatgcgcggccgccgaccacagcagcgcagtgcccgccgccagcatgatgccgtccatgatcaggcggaacgcctccggcttcatctgcagcacgaaacgcttggcgatgaaggcgccggccatcaacgaggcgccggcgatcaggcctttcagcgcgatatcaggcgtcagcgcgccgaagcgttcgaacgtcaccgacttgctgacatagagcccgagcgagcttgccgcttcggtggcgaggaaggcgcccttgtcgaggccgtaaaacaagaatagcggcacgctgagcgggccggtcgaggcgacgatgccggtgagatagccgatgagcgcgccgccgatcatcagatgccagagactggccttgagtttgtgtttggccagccagtgccgcaccggcaccattgcgatcaggaacacgccgatcgcgatatcgaccgcgcgcgagggcaatgcgagcagggtgcgcgcgccgagggcggcggccggaatgccggtgatcgagtaggcgaggcaggcgcgccagtcgacctcgcgccaccacgccaggatgcgcgacagattggccatcacggcggcgaccgccatgatcggcaccgcctgcttcggcccgtactgatacaccagcaccggcatcagcatgatcgacgagccggtgccgacgatgcctgagatggtgccggcgaccaggccgacgacgaggacgaagaggaagcccacctgcgcgctccggtgaggtgcgatagacgaaatgtaaaactcgggcgcatcgcgcgcgattgcggatttttgtcccgcggttgcgcaacatactcgctgtcgtcctggcgaaaagccaggacccattaccccaaacattaggcgttgtacgacgctggagccacgatcccatttacaatcaaatgcggtggttatgggtcctggctttcgccaggacgacgatggtgtgtgcaccgtgaccccgaacgctgattgttacgaggcttggcaaccaccgatcacttcaacatcacccacgccggcgcatgatcgctggcaccttcctcgccgcggatgtcgcggtcgacgccggctttctgaagccgcgccgcgacctgtggactgagcaggagatgatcgagccgcaggccggcatcgcgcggccagcgctggcgcttgtagtcccagaaggtgaacatcggatcatccggatgcagcgtgcggatcgcatcgcaccagccctggtcgaccagcgccttgaacgcggtgcggctctgcggctggatcagcgcgtccttgtcccaggagcgggtcggatagatgtcgaacggcgtcggcgcgacattgtagtcgccggcgagcaccaccggcacgtcctgcttgagcagcttggcggcatgcgcacgcagccgcttgaaccaggcgagcttgtaatcgaatttcggtccgggctgcggattgccgttcggcagatagaggctggtcacgacgatcccgcggaccgcggcctcgatgtagcgcgcctcgtgatcggcggcgtcgccgggcagggcggtgcggatcagcacgggatccgccttgcgcgcgaggatggcgacgccgttccaggtcttctggccttgccacaccgcgccgtagccggcttgctcgatcgcggcttggggaaactcggcgtcgctggccttgagctcctgcaggctgacgacgtcgggcttggccgatttcagccagcgcagcaggttcggcagccggcggttgacgttgttgatgttgaatgtcgcgatcttcatgcgcacttgcagtcgcgaccggccatgtcgtcaggtggacggaagtggcggcggtgccgccgcgggcgcggctgtcggcaaggtcggcggtgcggcttgggccgcggccggctcgttcttctcggcgacgctgtcgctcgccgcgaccgcgtcgccgcccttgtagatgcgcacgaagcggcggccgaggctggtcagcacctcgtagccgatggtgccgaaatgatgcgcgagctcgtcgacagtgatgccttcgccgatcagcgtcaccatgtggccgcgccggaccgcattcttgtcgaggtcggtgacgtcgaccgcgatcaggtccatcgagacccggccggcgatcgggcaacgcttgccggcgaccacaacctcggcaccacgggtgccgtcattggcgctggcggcgcggaaatagccgtcggcatagccggccgcaatgatcgcaagccgggtcggccgccgcgcggtccaggtgccgccatagccgacggtctcgccgcgatcgatgttgcggatctgcacgatgcgggccttgaggtcgaccacaggctgcatcgggttgtcggcctccggcgtcggattgacgccgtagagcgcgcagcccggccgcaccatctcgaactggaactgggcgccgagaaacacgccggaggagttcgccagcgaggccggcacgccggtgaacaggctcgcgatctcgcggaagctcgccaactgctttgcattggcgggattgttgagaagctcggcggaggcgaggtggctcatgaccagggtgatgccgtggtcgccggcattgatgcgagggatgatgccctgcgcctcgctgaccgtgaggccgaggcggttcatgccggtgtcgatatggatggcggcgccgccggaccagccggagcggcggcagaacacgtcccattcggcgagctcgttgagatcgccgatcaccggcttgcagtcgatcttggcgtaggcgtcgccggtctgctggaagaagccgccgagcgcatacacggttgcctgtggaacggccgcgcgcaccacggcggcctcctcgacggtggcgacgaagaaggtcttgcagccggccttggccagcgcccgcgacacctgctcggcgccgcagccataggcgttggccttgaccacggcggcgcattccgccggtaccgcggtcttctcgagtttgcgccagttggcgatgatggcgtcgaggtcgacggtcaggatgccggtggcggtcggataggccgccagcagattggcttcaggcgtcagctgcgatttcgcgtcggtcacgatgttcatggcgcagttgtacgcgtcgcgcttgcggcgttcaaccgcgctgcggaatcaatgagagtgatccggaatttgaccgtcgggtgcgagatcgccgaacctggtgacgctggcctcgaagtgcagttcgacggtgccggtcgggccgtggcgctgcttgccgatgatgacttcggccttgccatgggccagttccagctccatctgccatttttcgtgctcgggggtgccggggcgcggctccttgttggcgaggtagtattcctcgcgatacacgaacatcacgacgtcggcgtcctgctcgatcgagccggattcacgcaggtcggaaagctgggggcgcttgtcgtcgcggttttcgacctgtcgcgagagctgcgacagcgcgatcacgggtacgttcagttccttcgccagcgccttcagatttgtggtgatctcggtgatttcctggacgcggttgtcattgcccttcttgcccgagccctgcagcagctggatgtagtcgatcacgatcaggtcgaggcccttctgccgcttgaggcggcgggcgcgggcggtgagctgcgagatcgagaggccgccggtttcgtcgacatagaacggcagcgactgcaactcgatcgaacagtcacggatcttctcgaaatcgagttcggaaatgccgccgcggcggatatggctcgacgggatgccggtgcgttcggcgagaatacgggtggcgagctgctcgccgctcatttcgcaggagaagaagccgacacagccgccgtggatcgcctttgtggtgccgtccggctggacctcgccctgataggccttggcaatgttgtaggcgatgttggtggcgagcgaggtcttgcccatgccgggacgaccggcgagcacgatgaggtcggacggttgcaggccgcccatccgggcgtcgaggtcgcgcaggccggtcgagatgccggacagcttgccgtcgcgctggaacgcctttgccgccatgtcgacggcaatcgtgagggcctgcgaaaagcgctggaagccgccgtcatagcggccggtttcggcgaggctgtagagctgccgctcggcatcctcgatctgcgcgcgcggggcaaagtcgaccggcgcatcgtaggcgacgttgacgatctcctcgccgatctggatcaggttgcgccgcaggctcaggtcgtaaacggtacggccgtagtcctgcgcgttgatgatggtggttgcttcggcagcgagacgggcgaggtattgactgatcgtcatgccgccaatgtcggtatcggccggcaggaacgtcttcagggtgacgggggtcgcgaccttgcccatccggatcagggagctcgcggtctcgtagatggtctggtgcagcggctcgaagaaatgcttcggctcgaggaaatccgagacgcgatagaacgcgtcgttgttgaccaggatcgcacccaggaggccctgttccgcttcgatgttgtgcggcgcactccggtaggccggggacgcggcatcgggcgcgagcttgtggacgttcgaatcaatcaaggccatggacgagcttattcttctgatttcgtcgttactgagattttcggctgtggggcggcgatcaagcgccagccccgcacgaagcgaaaggacggatgtttcttatgcacgattcacacaacgcgaggtgtgaatccgcgacggccgggtgcattccgcttgacgcggttttgcccgcaaccgggcgaagccgggccggtcaacgatgtgattggcaaaaatccggcgcggcctgaacctttttccgggctgccgcgcccaaccagcagcgaggtcggtgctggccttgctcagatgaggatgagaaaggccagcgcgatcaaggcggccgcgacgcccgttgcgatcaaggcgtagtcggtcacgaggtcgcgctgcggatccaacatcgtctgatgcgtttctggggtcattccggaccactacgacagcccggaacggacctctgtgaagcagatcacatctgccgcattttctttgcggcggcttcgcgggaacgacccggcggattccgggttgtcttcgcccacggaagatacggcgtcgatggctcaagagtttcggactgcgcgatcaggacttggccgggcgggcggcatcgaccgccgctggctggcggcgcttgtcgacacgatggagcaggcggcgcgtccggagatccggaacgttccctgcgatgtcggcctggtttccgccgccgcggcccatctggcgcgtccagccccaagctttgcccattgcgggtcggcttacagcctgcgcaactagcagcaccatctgtcgcgcattcactcgccggcgagttgcagccggggtttcgcggcgccggcttccttgagccgcagccggccttcctcgcgcccgatataatcgcgggtcatcggcacgatgccctggcgcttggtgagttgcagctggaagttcatcatgttctggacgcggaacgacatctcggaggccgccagatagaactcccacatccgggcgaaggcctcgtcgtagagccggacagcctcctcgcgccgcgccatgaagcggtcgcgccacgccttcagggtctcggcgtagtgcaggcgcaggatctccatgtcgcagatcagcaatccggccttctcgattgctggcatgacttcggagagcgccgggatgtacccgccggggaagatgtatttccggatccaggggctggtgacgtcgggaccggtcgagcgcccgatcgagtgcagcatcatgatgccgtcatcgctcagcaactcggcgcagcgcttgaaaaaggtttcgtaataggcgacgccgacgtgctcgaacatgccgaccgagacgatgcggtcgaacgggccggggatatcgcggtagtcctgcagcacaaagcgcgccgactgcgtcaggttccgctcggccgcccgggcgttggaaatctgcagctgctcggtcgacaacgtgacgccagtgacgtcggcgccgcccatctcggcgagatagagcccaagaccgccccagccggaaccgatgtcgaggacccggtggccaggctcgagcaggagttttgcggcaagatggcgcttcttggcgagttgggcatcgtccagggtcgcgtccggcgtctcgaaataggcgcagctgtattgcttgtccgcgtcgaggaagagggaatagaggcggccatcgagatcgtagtgccgggcgacattgcttctggaccggccgcgcacattgatctgctgggcgcgccgtccgaggaagcgcagccaggcctgcagcctggcgaagttcggcaacatcgccgcctggcccatcaggacagccagcacatcggcgatgctgccttgctccaccacgaacgtgccgtccatgaaggcttcgccgagataaagttcgggatcgaccaggacgcggacttcggccgccctggacatgaagcgcgcggcgaccggaacaccggtgccgtcaccacaagtgaattgagcgccgctcgcggtcgtgaacgtgatcgaaccgcggcggatgaagcgccccaggaaatatcgcaacaatcggtccatcgaaacaccaacggaacggcgagctgcacaccgacaccaccggagctgatcactccgatgtgtccccaaacaaaacataggcaaggaattggatcgcgctattgcgttgtgctcaaagccgatattccaaaatgtgacaattgcgtggatgcgtcacgggcgcgcttccattcgcgcgataatcgtctaaaaggtgaccgccgcggccgatccatgaggcgcaggcggcgatttttccggaatctggagacttaaggaatgttgagccgagccctcagtctggcgacggtcgcgcttctgatcggcctgtcggccggattggcgcgtgcgcaaaacctcgaggccggcaagagcccctcccagattttcgggagcacctgtacggcctgccacaagagcccgcgcggcctcttgaagacggtgccggccggttcgctgccgggcttcctgcgccagcactatacgacgtcgagcgacatggccggcgtgctggcttcctatctgatttcgaacggcgccaacgacccgcgctaccaggccaaggatcagcccaagggcgccaagcagggcgcgagggacggccgccaggaggcgaaccagtctccggagcagccggccgaacgtccgtctcgccggcagcaccagggtgcggcgccgcaggaaggcgccaaggatggggccaaggacggatcgaagcccgacgccgacggtttgaatcccgaaggacgtcccgcccaccgcggcaagcgcatggcgcgcccgagcgagacgccggaaggtgccaagccggacgatggtcagatcccgcaggccgccggtgaagccaagccgtcgcggcagaagcacggccgtcgcggcaagccggtcgagcaacaggagacgcccaagggcgaggcggcaggcgatgagcccaaggccgagacgaggcgcgacgacaggggcgaggccgtgaagccggcgaagcctgccggccagcccgacacggccaaggtcgatgcgccgaacagcagcagcgagccttccgctgtgcgttccgatccggttccgcaggtcagtccggcgccagccgcgtccgagccggccgctgcggcgtctcccgcaccagcgcccggcgcgccggtgaccgcgaccgcaccgccacccccgacgacgtcaggctccggtacgcctgacgctccaagctcgaagtaactgccgacgccgggccagtgaggtccggcgtattcatttgactgcctctagagtaaaactctagagtaatgatctagtcaacgaaatgtcaggcaggcgcagtgagcacggcgcgcgaagatctgctggcggcgggattggcggtgttcgaccgcgacggcttcgaaggcgcgacggtggccgagatccgctcccgcgcccgtgcgtccaacggcagcttcttccatttcttcgcctcgaagaaggagctcgccggaaccctgttcctggagatcctgcaggcctatcacgcggcgatcatcacttcggtcgacgagacccgcggcgcggctgagggcgtggcgcggctgatccacgcccatctcgactgggtcgtgacctccaggcgcgaggcgcgcttcctgttcgagatttcacgcagcgagtggagcgcggaggtgcgcggcgctcagcgcgccgagaatgcgcggcttgccgacggtatcgagcgctggcgcgcgccgctgctcgcgcgcggcgagttgctgccgatgagcgcggtgctgttcttcagccaggtgatcgggccggcgcagatcttctgccgcgcctatctgtcgggccgcgagcacggcgatccgcgtgaacaggtcgaaacgctgatcgcctgcgcgatccgcgcggtggtggcgccgggggcgccggagcgaacaggagggacgtcatgagcgagaccgatccggactttacgccgatcgaaacgcggatacgcgacaatgtcggccgtcagggcttcatgggccttgtcggcgctgaagtggccgaactgtcgcgcggaacatgcacgctcgcggtcgatcgccggcccgaattgttgcagcagcacggcctgtttcacggcggggtgacggcgttcctggtcgacaacgccaccacgattgcggcggcgacgtcgcgcggccagcctgcgctgacggccgagtacaaactcaacctgctgtcgccggcgtcgggtgatcggctgatctgccgggcgcgggtgatcaagccgggccgtcaggtcgccgtcgtggccgccgatgtgttttgcatcatcgacggcaaggagaagcacaccgcgaccgcgctggcgtcgatcgcgatgctcgacgatcaggccgcggcacgaatccaaagcccggcctgatggggccgggcttcgtagcgttttcgagcgaagtggataccggttcgcgtgaagaaagcgcgtcaaaaccagaatcgaaagcatcggttctgaaccgatgctctcgtcggtcggacgatcgcgagaagcttacttctcttcggcggccggagccggcgcggcttcgtcgtcgtgctgggcttccggatcgaagaactcgcctgcggcggcgagcgcctcggcggccgcgtcctggtcttcctggcgggtcgagatgtcctcgccgcgcttgatccgctcggcctcttcggcggaacgggcgaccgtcacggtgacgctggtctcgacctcggggtgaaccgcgatcgtcaccttctgctggccgatcaccttgatcggcgagtcgagccagacctgcggacgggcaacggtcacgccgtcggcggcgagcgcggtgacgatgtcgcgcaccgtgaccgagccgaacagctggccggattcggaggcctggcggatgatgacgacgtcgcggccgtcgatcttctcggcgaccacggcggcttcgcccttggccttgatgttgttggcctcgagctcggccttcatgccgtcatacttggcgcggttcgcctcggtggcgcgcagcgccttgccgcgcttgagcaggaaattgcgggcgaacccgtccttgacgcgcacgacttcgcccatctggccaagcttggcaacgcgttccagcagaatgacttccattttcgttctcctttagaggctaagtatcggtttgagtggttggatcgaatgtcaggccgcgggcagaggcggcggtcgtgtttgcagatagcgctggcgcagtccgaatacggcgtcggcaatgccaagcgcgaagatggcgacgatcggccagccgaacatgacgacgacggcgtagatgccgccgagccagaagccgcggctgttgagcgacagggtcagcgtgtggaggaccgcaaagccgaccagggcataaccgatcacgagcgctgcggtgacgatctgggcgagcagcgcaagcatgccgccgacgaagctgagcgccgccgccaccagcagcgcgaccagcgtcatggagggaagcgcggtgctgcgcaattccggccagggtcggttgagccgcccggaggtctgcgtgatcttgccggccagccataggttcagtgtcagcgtgaccatcgagaggatcgtcgcggccagcggcgcgaggatcaccagcatgtcgaccagccgttcaatctcgacgctgccttggccgtcgccggcgctgagcaccttcagcaggccgcgtcgcaaagctgcggtgatggtgtcggtgtccgcgccgagcgtgagcagcgttgccgtggtggtgatcaccgcaaaggccgcgatccagagcaggatcctgccgacgggataccattcgagcgcaggcggctgctgggtggcgccatcgccggctgcgccctcgatcggccgtccgagcagggcgaggtggccgagccaccagccgggaacggccaccatcatggcaaacgcgatgctgtagggaagcccgaagatcgccccgagcacggatgccgcaccgacgccaccaatcgcggcggcgagggggccccagccgaacgccgccaccatgatcggcagcggggagagatagaacagcaatatcgagatcagcgcgcccgaactgatcgaggcgaacatcagcgccgacgcggcgccggctgcaagtgcaacaatgaggatcgcgatcatcagctgtcccgccccctttgagcggttaggggtcctcaatcgagaaccccaaccatcggcgaccggacgacccggaagccttatgagaatgagcggccggcggggtatcccgccggccggaaacgcttagcgaatgacgtagggcagcaggccgaggaagcgcgcgcgcttgatggcgcgggcgagctcacgctgcttcttggcggacacggccgtgatgcggctcggcacgatcttgccgcgctcggagacgtaacgcatcagcagcttggaatccttgtagtcgatcttcggcgcattcgcgcccgtgaacgggcaggacttgcgacgacggaaaaacggacggcgggcaccagcatcagccatgattcattactcctcggtcgcagcttcttcgtcgcgcggacggcgcggaccacggtcgccacggaagccaccttcgcgatcgccacggaagccaccgccttcgcggtcgccacggaagccaccgccacgatcgtcgcgctcgcgatcacggtcggccttgcgcatcatcgcggacgggccttcctcgtgctcttcgacgcgcacggtgaggtagcggatgacgtcttcgttgatccgctcctggcgctcgatctcggtgacgacagccgacggagcgtcgatgttcatcagcacgaaatgcgccttgcggttcttgttcatgcggtaggtgagggagcgcacgccccagctctcggtcttggtgaccttgccgccgccctgttcgacgatacccgtcatctgggccgtcagttcatccacctgctgggtgctcgcatcctgacgcgcgagaaaaacatgctcataaagaggcatggttgtcctttcctgtgttggcgcgggtttccggcgacaagcccttcgagaccttcggaaaggactcgagctgctcagaaggcgggagcacgggacgacgggccgactggccctgccacatcaaaatcagcgggtgagtttgctgagaccgtccgttcagctcccggccggagcccacgaatggcgcgctttatacggattttggccgcgaaggcaagggtccaggcaggtctggaccccggggatttgcaaggcggcgtagcctgtcagcgctatcaacgcaagttccggccgttttcggttgttttctttgtttgtatgtcatacaaatatctcagggaggacaccagatgggttcggagaccgccggcggcatgtctgcgcccgatccgaagcacgcggtgcgcgcgacgcggtcggcggggcgcaagatgcgctcgctgctgcttgatgccgcaagccgcctgttcaaggagcgtgggctctccggcacctcgatctccgacatcgcggccgctgcggacgcctttccgagccagatcacctattacttccgcaccaaggaagcgctgttcgtcgaagccgccagccgcgacatgctttatctcgcgcgcgcgaccgagcaggctgccctgaaggcccacacgccgcgcgaatacagccatgctttggccgagaccgtgaccgcgaccgacacggtcgccttcttcgccgaggccctgaccctgacgcggcgccggcaggatctcgcgccattggtcgaacgcaccatcgagcgtctgcacagcgaaggcgcgcgcgcctatgccggccaggtcgagcggcacggctggcgctcgctgcgcgcgcccgaagagagctcgcggcggttctgggcgatcgcgatcggcgtgatcgtcgaaggttttgcgatgggccgcggcgccgaggagatgtgccgcgaattgctgcgcgcgctcggcgagcaggccaccgcgacaacggcgtcggccaatgatggatcgcgcctgcgcctggtcggcgaccgcgatatttcaccctcaacggacggggagacaagctcatgaccacgctgcgcatgcgtgcccgcgatttcctcaccgaagacgaactggtggcggtgcgcgagcgcacgacgtggaagggcgtggccctgatcgtgcacgcctgggcgctgatcctgggcgcgatcgcgctggtggcgtggtggcccaatccgctgacctacctgctggcggttgcgatcatcggctcgcgccagctcggccttgccatcctgatgcatgacggtgcgcatggctgtctgtcggccgacgagaagaccaatctggcgctgagccagtggttctgtgcctacccgatcttcgccgaaacccgcggctatcgccgctatcatctgcaacatcatgcccgcacgcagcaggaggacgatccggatctcgtgctgtcggcgccgttcccgatcacgaggctgagctaccgccggaaattcctccgcgacatcaccgggcagaccggctaccagcagcgcaaggcgcaactgctcaatgcgatcgggccgaaggagtggtcgctgtcgcggcgtgccgccaatttctggcagaagctcgggccgcaatgcgtcaccaatgcgctgctgttcgcgggcctcgccgccgccggcgtgtggtgggcctatccgctgctgtggctggtgcccttgctgacctggatgatggtgattacgcggatccgcaacattgctgagcacgccgtcgtgcccgacagcgccgatccgctgcgcaacacccgcaccacgcgggccaacgtcctcgagcggctgttcatcgcgccgtactacgtgaactatcacctcgagcatcatctgctgttctacgtgccgtgctacaacctgccgcgcgtccaccgtatcctctgcggaagccgttatgccgagcggatggaggtgcagccgggctacgccgccgtgctgcggctggcgacggccaggcccgcccacgaggaccgcccggggcaattggtcaacagcgcccgccgggcgcaggccggcgccagggttaacgccgaccagaatgccggtggattctagggccgaaccggttcggcatccccaggggttccgcccgcgcggcttgacatcgcgccccccaacggtgtcttacggcccggtctgaggccgtttgcacgacttggtgcaggcgattggcccggacccgctgtggcgcgtttggcgcaacgcggataccgttttcccctgcggcaggcgcgaagcgcttgcgcggagatcacgctcaacaaggtagggatcgccgatgacggcagcatttacgtttcccgggcagggctcgcaggcggttggcatgggcaaggcgctggccgacgcctttccggccgcgaaggcggtgttcgacgaggtcgatgccgcactgggcgagaagctgaccgcgatcatctgggatggtccggcggagacgctgcagctcaccgagaatgcccagccggccctgatggcggtctcgatcgccactttgcgcgtgctggagagcgaggccggcttctcggtcggccgcaatgcggctttcgtggccgggcactcgctcggcgaatattcggcgttggccgccgcgggcagcctgaccgtcagcgacaccgcgcggctgctgcgcacccgcgggcttgcgatgcagaaggcggtgccggtcggcgccggtgcgatggccgcgctgctcggcctcgattacgaggcggcggtggcggtcgccaatgaggcggcgcagggccaggtctgccaggcggccaatgacaatggcggcggacaggtggtggtctccggcgacaaggccgcggtcgatcgcgccgtcgagatcgccaagaccaagggcgccaagcgcgccatgctgctgccggtgtccgccccgtttcactgcaagctgatgcagccggcggccgatgcgatggcagaggcgttgtccggcgtcaccatcaaggcgccggcggcgccgctggtctccaacgtgctcgcttccgccatcaccgatcccgacgagatccgccgccgcctgatcgaacaggtcaccggcaccgttcgctggcgcgagtcggttgcctatatggccgggcagggcgtgatgcggttcttcgagatcggcgccggcaaggtgctgagcggcctcgtcaaacgcattgcggacggcgcggtcggcgtgtccgtcggcggtccgaacgatattgctgcggccaaggatgcgctggcagcgtcggcttgaagccgggaggggaattcgatgtttgatctgactggcaagaccgcgctcgtgacgggcgcaaccggcggcatcggcggcgcgatcgcgcaggcgctgcatgcgcagggcgcgacggtggcgatctcggggacccggcgcgaggtgctggacggcttcgccgccaggctcggcgagcgcgttcacgtgctgccgtgcaatctctccagcaaggaggatgtcgaggcgctggtgccggcggcggaagctgcgatgggccaggtcgacattctgatcgcgaacgccggcatcacccgcgacaatctgttcgtgcagctgcgcgacgaggattgggacgacgtgatcgcggtcaacctgaccgcgacgttccgcctggcgcgcgcggcgaccaagttgatgatgcgcaagcgcttcggccgcatcatcgcgatcacctcgatcgtcggcgtcactggcaatccggggcagggcaattacaccgcgtcgaaggccggcatcatcgggctgatcaagacgctgggcgccgaatacgccaagcgcggcgtgaccgccaactgcatcgcgccgggcttcatcaagacgccgatgaccgacgcgctgaacgacaagcagcgtgaagccatcctggcgaaggttccggcggcgcggctcggaacgcccgaggatatcgctgcggcagcggtctatctggcctcgaacgaggccgcctacgtcaccggacagacgattcacgtcaacggcgggatggcgatgatttgagctatttgccggttctcgcaatgcggcgaaaggccgttttcgggagccggttcaggcgtgtagtcaaggctttggaagtatggtagctgaaccccccgtggatgggcgaagaacgccattgcaggattttgaaaccctgtatattggcgtggcgacgcctgccgttcgccggggctttagtcggctacgaccgggccgaatcaagactatgcgcgattgagtaatcgagacgaccacgatggctcgtatcgtcttggggtcgggtccaatggaacaacgaggttgaacgatgagtgagattggcgagcgggttaagaagattgtggtcgagcaccttggtgtcgaacccgagaaggtggtcgatagcgcgagcttcatcgatgacctcggcgccgacagcctcgacacggtcgagctcgtgatggccttcgaagaagaattcggttgcgagattccggacgacgcggcggagacgattctgaccgtcggcgacgcgaccaagtttcttgagaagaacgcgaagagctgacgccgatcgcgaagttgacggggccggacggaccgcgatcgagcggtcccccggcttcttactattagccgcgcattgttggccggagacgtggaaatgagacgggttgtcgtcacggggctgggcatgcttacaccgctcggctgcggcgttgacgcaacctgggcgcgcattctcgccggcgacagcggcggcaagaagatcgacaccttcgaggtgtcggacctgccgagccaggtcgcctgctacattccgcgcggcgacggctccaatggcaccttcaatcccgatcagtggatggagccgaaggaccagcgcaaggtcgacgatttcatcctctatgcgatgtgtgcggccaagcaggcgctcgacgacgccgactggcatccgaagtcggacgaggaccagttcgccaccggcaccatgatcggttccggcatcggcggtctcaccggcatcgccgacaccgccgtgctgctgaaggagcgtggaccgcgcagggtttctccgttcttcattccgggccgcctgatcaatctggcgtccggttacgtctcgatcgagcacggcctgaagggccccaatcattcggtcgtcacggcgtgctcgaccggcgcgcatgcggtcggcgacgcggcgcggctgatcgcgctcggcgatgccgacgtgatggtcgcgggcggcgccgaatcgccgatctcccgcatcggcattgccggcttctgcgcggcgcgcgcgctgtccaccggcttcaacgacactccggaaaaggcatcgcggccctacgacaaggatcgcgacggcttcgtgatgggcgagggcgccggcgttctcgtgctcgaggagtatgagcacgccaagcggcgtggtgcgaagatctacgccgaggtcaccggctacggcctgtcgggcgacgccttccatatcacctcgccgccgccggacggcaatggcggcttccgcagcatgagcatggcgctgaagcgcgccggccttgcggcgtccgatctcgactacatcaacgcgcacggcacctcgacgctggtcggcgacgagatcgagctcggtgccgtcgagcgcctgctcggcaatgcagcctcgaaggtctcgatgtcgtcgaccaagtccgcgaccggacatctgctcggcgccgccggtgcgatcgaggcgatcttcgcgatcctggcgattcgcgataacgtcgtgccgccgaccatcaatctcgacaacccgtcggtgcaaaccgcgatcgatctcgtgccgcacacgtcgcgcaagcgtgacgtaaacgtggcgctgtccaattccttcggtttcggcggcaccaacgcctccgtgatcgtgcaacgcgtgatcaattagtaggtctttggagcgttttcgagcgaagcggggaccggttcgcgtgaagaaaacgcgtcagaataagaatccaaagtcgcgttccgatgcgatcggaacgtgactttagaactagtccaccgttttgccgtattccgcggtgactcctaatagcgggcgtatgctattggcagggcaggggtttgtccggccacgattcaaccggcaggatattggtttgcatcgatgagtgagaggccgcccatttcaccgaggagtccacgtgccgcgctggagcccgaacaggttccgccgccgcccaagcgctcggatcgcgcccgcaatccattcgtgatcgtcggcaatgccatcttcaccatcctgatcatcctgatgatcggcgccggcgcgacttactattacggcaagcagacgctggaagcgccggggccgctgcaggaagataagatcgtcaacatccccgcgcgcgccggcaagcgcgacatcgccgacgtgctgtcgcgtgagggcgtgatcaacgtcaatccgtggatcttcatcggcagcgtgtttgcgctgaaggcgagttccgacctgaaacccggcgaatactcgttccagaagaacgccagcctgcgcgacgtcatcgccaccatcgtcgacggcaaggtggtgcagcacgcgatcacgattccggaggggctgacctccgagcagatcgtgtcgcggctctccgacaatgacatcttcaccggctcggtgcgcgagattccgcgcgagggcacgctgctgccggagacctataaattcccgcgcggcactacgcgcgaccaggtgatccagcgcctccagcaggcgcagaagcgcgtgcttgccgagatctgggaacgccgcaacaccgatacgccgctgaagtcgccggaccagctggtgacgctggcctcgatcgtcgagaaggaaaccggccgcgccgacgagcgcagccgcgtcgccgccgtgttcgtcaaccgcctgcggcagcggatgaagctgcaatccgatccgaccatcatctatgggctggtgggcggcaagggaacgctggggcgtccgatcaagcgcagcgagatcacgcagccgtcgccctacaacacctatgtgatcgacggcctgccgcccggaccgatcgccaatcccggccgcgcctcgctggaggcgaccgccaatccggcgcgcacgcgcgacctgttcttcgttgccgacggaaccggcggccacgccttcaccgaaacctacgaccagcacgccaagaatgtcgccaagctgcgcgcgtcggaaaagcagatccagaacgacaccgtcgagcccgtggacgatccggcgcctgccgccgcggcacccgggacggcggacaccaatccgacggcgaccacgccgccgaagcccaccaatcagaagaagccgccgcgcagcggtcgccagggcgcagcccagcagaccatctcgccgcccgtcgtgcagcgctagcttctcgtttcccggaggtggacgtaattccactttcacggaatccgttttaagatcgcatcggcccctcacgagtcccgcaggctcggggtgagcctcaaatcattctgttggagagttcacgcgatggcgctgtcgagcatgactggctttgcccggagccatggcgcgagcggtccctatacgttcgagtgggagctgaaatcggtcaacgccaagggctttgacttgcggttgcggctgccgcccggctgggacgaactggaagccctggccaagaagcgcgccggcgagctgctgtcgcgtggcacggtctacgccaatctcaccgtcaagcgcagcgatgcggcgcagaccatccgcatcaacgaggacgtgctcgcggccgtcgtgaaggtcgcgggtgaactcgcgcagcggatcgacgcggtggccccgagcatcgacgggctgctcggcatcaagggcgtcatcgaggtggtcgagcccgagagcaacgaggacgaggacaaggcggcacgcgaggccgccgcgaaggccttcgagcaggcgctgacgagcctcgtcgagatgcgccgccgcgagggcgatgcgctcggccagatcctgatgcagcggatggacgagatcgagcggctcgccaagcgcgccgagacggcgcccggccgcaagcccgaggcgatcaaggcgcggctcgccgagcagatcgccgcgctgctggagacttccgatcgcttcgatgcagaccggctcagccaggaggcgatcctgatcgccaccaaggccgatatccgcgaggagctcgatcgcatcgcttcccacatcggccaggcgcgcgagatgatcggcaagggcggcccggtcgggcggcggctcgacttcctcgcccaggagttcaatcgcgaggtcaacacctgctgctcgaaatcgaacgatgtcgagttgaccaacaccgggctcgagatgaagaacgtggtcgagcagttccgcgaacaggtccagaatctggagtgaatgatgacggcgcagggttttgacggcgtcgagcggcgcggactgatgttcgtcctgtcgtcgccctcgggcgccggcaagacgacgctgtcgcgcatgctgctcgagcgcgagccgggcctgaaaatgtcggtgtcggcgacgacgcgtccgaagcggccgggcgaagtcgaagcccgtgactatttctttgtcgacaaaaagaagttcgagaccatggtcgagcagggtgagctgctcgaatgggcgacggtgttcgacaatctctacggcacgccgcgtgcgccggtcgaggcggcgctatcggtgggacaggacgttctgttcgacatcgattggcagggcacgcagcagttgcaccagaaggccagcgtcgacgtggtgcgggtcttcatcctgccgccgtcggccgccgatctggagaagcggctacatacgcgggcgcaggattcggaagaggtcatccgcggacggatgaaccgcgccagccacgaactcagccactgggcggaatacgactacatcgtcgtcaaccagaacgtcgacgacgcctttgccgaggtgcagtcgatcctgaaggctgagcggctgaagcgcgagcgccgcaccggcctcaccgaattcgtgcgcggcttgcagcgtcagctggagaagtagtcccggagtcatgatgcgatccgccgagcgcatcatgacttctgcgtttctgagcgccgtttaattcgccgcgctgcgcgccagccgctgcaacatcgccgcgatctgcttgttgtcctgctccgtttgatcaggctcacgcggcatctcgcggcgagcgacaggtgtctcggcgcggcgaggaaccggtgtctctgatcggcgcggcgctgcctccgacaggcgcagcgggcggtcgcggctgacgaccgccatcggcggcgccggctcggtgtgcagcgaatcccagggcgcctgccactcgtccttgatctcgtagggcggcgtccgcgtgcgcgtcaggcggaacaccagcgcgctgacgaggccagccagtgcgagcgcgccgaccatcacgatcagcagcatctgcgtcgaggacgatgtcttgtccgtgcccgcctcggccgcggcaggggcggctggtgccggtgcggcggcttgctgcggtgtcgtgtccgcctgcgcgaccgcggtcggctggtctgcggcatgccgagttccgttggttccggccatgctcgatgcgtccagccacctggcgttcacgtccgacggctgggcgttggcgccggcgggcgcggcagaccccaccggatttgtcgtggccgcgccggcctgaccggcatcggggcttgcgacgacgggcgccgcggcgggttgcggcgatggccactcggcatgggcattggcaaccgatttgcgcatcgccggctgcggcgccggcgccggctggctctgcggcagcgctgcgtcggctgtcgcggtgtcgggcgcggctgcgggctgctgctgcgccgcggtggtcttggcgacgaccttgttcctggcgtcaccgaggtaccagcacttcttctgggtgctgcggtcgaggtggtagaaccagtggcttcccgctggcgcgattcccttcggcgcggactgacaggcgtcggccgtcttggtattcgccgtatcggttgccgccggagcggcggcgttctgggctacggcgccgaagttggcaccagccagcaggctgacggcaagcgccgcagcgaatttcgctgaacgatttgacatacgcgtccccggtattcttttttacgcaaacgctggtgacgccaatctcggtaaagagttgggtggcaatgcgccgcaaatccggaacgggtagggcttaattgaggctcgcggcgtgccgcaattgcggcgagccggtggcaggagcgcgcgcttgatgattgcgccgtccacggtcgggttccgcgggacgatcattgcgttggggcttttaaaacgttacgtcccggcggcgatggcaacgccggcgggacgtcttgtctgtacatgatcttcgtggaagcgctgcgtgtcggtcgtgggcaaaccgcggcccacgttccccgatcatgcctagttcttcagtacgatgcgtcccacgacttttccggcgcgcaactcgtcgatccatttctggacgtcggccatcggctcttccttcatcggcgtcggcttgatcttgccggcgcgggcgagtgccatcagctcctggccttcggccagcgtcccgaccatgaagccctcgatggtcatgcgcttgtagacccactgcaccatcggcagcgagaagttgccgcccatcagtccggacaccacgatcttgccgccgcgtgccaccgtcgacaccgcaaacgccatcgacttctcgttgccggcaaagtcgacgacgccgtcgaagccgccgtcgctctccttcagcatgcgcttgacgacgtcgggctctgcgggatcgtaggcggcggccgcgccgttcttcagcgcggtctcacgcgccgcggggctgagatcggcaaccgtgatcggctgcttgaacatcgcctgcgcgaacgacaggcccatcatgccgacgccgccgaggccgatcagcagcaggttgcgctggcgcggacgatccaccaggcgcttcagcgcgccataggcggtgacgccggagcacatcagcgtggcggcctggttgaccggcagcggatcgtagtcgagcaggtactttgcgtcgggcaccagcacgtgggtcgcaaagccgccgtcgatggagacgccgaggaagcgctgcttgacgcagagattctcgtcgccggcgagacagtcgcggcactggccgcagccgatccaggggaagaccgccttattggtcccgaccagatccttcgccgcatcggggccgacctcgtcgacaacgcctgcgatctcatggccgagcgtgaagggcagcgtcatgccgcgggtggtgtcgagcttcttgcccccgccgagatcggcgtagccgtcctggatgtggagatcggaatggcacaggccgcagcgctcgatacgcacgagcacttcgcgtccctgcggcttcggcgtgtccacgatggtttcgcacagcggtgcatcgaacttgacgagggattggcgaaccatacgcgccattacgttttctcctgttgttctattttgtggaccgtatatcggccaattcacgtgccatggcaacaaagcctgtgaccggaatggtctcggcgcgccgcgtcgcgtcgataccggctgcggccgcaagccgcgccggatcgaccgacagcgatttcaggctctggcgcagcatcttgcggcgctggccgaaggcggcggccgcaacctgttcgagcatgcggcggtcgcacggctcgggcgcagcgcgcgggatcaggcggaccaccgaggacgtgactttcggttgcggcacgaaggccgcgggcgaaatgtcgaacaggatcttggtctcggcgcgccagttggcgagcaccgcgagccggccatacgcctcctcgtcctcgtgggctgtgatgcgctcggcgacctcgcgctgaaacatcagcaccatggtgtcgtaccagggcggccatggctcgatcgacagccagtcgaccagaagctgggttgcgatgttgtagggcaggttggcgacgatcttggccttgccgccgtcaagcaggggacgaggatcgaaatgctgcgcatcgccatgcacgatctcgatgcggccggggtagcgcttgacgatatagcccagtgcgtcgatcgcacgctcgtcgcgctcgaccgcgatcacgcgcctggcgcccatcgcaagcaacgcgcgcgtcagtccgccggggccgggcccgacctcgatcacggtgcagtcttccagcgggcccgcggcgcgggcgatccgcgcggtgagattgagatcgagcaggaaattctggccgagcgatttgcgcgccgacagcgagtgctcgcggatgatgtcgcgcaacggcggcagatcgtcgatcgcgctcactcagcttgacgccgcggccatccgcgcggcgagccgcagcgcggcgatcaggctcgagggattggccttgccggtgccggcgatgtcgaatgcagtgccgtgatcgggcgacgtccggacgaacggcaggcccagcgtgacgttgacggcgtcctcgaacgcgacggtcttgatcgggatcagcgcctggtcgtgatacatgcagagcgcgcagtcataggtttttcgcgccgcggcgtggaacatggtgtcggccggcagcgggccacgggcggcgatgccttcgcggcgcaggatctcgaccgcgggcgcaacgatctcgacatcttccatgccgagcgtgccgtcttcaccggcatgcgggttgaggccggcgacggcgagccgcggcgaggcgaggccaaaccgcgccttcaggtccgcaaccacgatccgcgcggtcgacacgatcaggtcggtcgacaattgcgccagcgcctcgcggaccgacacatggatcgtcaccggcacgacggcgagcgccggcgaccacagcatcatcaccggctgcggcgcggctccgccgcgggcggcgagctcggcgaggaattcggtgtggccgggatgacggaagccggcgcggtacagcacgttcttggcgatcggattggtgacgacggcgctggccttgccggcggtgacgtcggcgacggcctgacggatcgacgccagcgcggcatctgcgctgctcccgtctggcttgcccggtcgtgccgtcgccgcgttgccggtcggaacgacgggcagggcccgttcaaatgccgcggaggcctcttcggcgctgacctcggccagctccacggcaagcccgagcgtcttggcgcgctcggccagggatgcgaggtccccaagcagatagaacggcggcagatcgagttcgcggcggcgcaaccatgcggcgagcgtgatgtcggggccgatgcctgcgggctcgccggatgtcagtgcaagaggttgagccatgcgtcaacgatagtcgatcaccgcccgcctggatattcgatcatcgcggcttttcgcacttcctgcaggtaggccttcgacttcgcctcgtacttctgcacgtacatcttgtcccgcatttcacgcttcttcggcgtgtccaccgtggttgccttccgaccacaaagggcgaccatctcgatgccctgcttggtgagttcgggcggggtaaggtggccgaccggggtcttgtccaggatgtcgcgcagcgactgcggcaggtccgccgacgtcttcacgacgatctcgcggatcgctgcgttgcgcatcgacttgaagaaggtgttggcttcctcgcaactggtcacgcgctcgcgcagggagtccgcttccttgcggcgagcctcgaactcggattgcggcgagccgcggggcacgatcagcacgaccggctgcatcctgtattcgaaagcttcggcgtcgggggcctcgccggtccccttgaccgcggtgtcgacatccttttctccgacctgaaggctctccttgaaacggccgcggaccaggctggtccagaccatgtcggcccggatgcgctgcttcagcgtatcgggcctgatgcccttgctctccagcaccttggtcagctgatcgttgttcagtcgcatccgctgcgccatgccgccataggactgttcgatgtcgttggcagtgggatcgacgccgaatttcttagcttccttgatcttcagcttctcgtcgatcagctcgtcgaggatggcctttcgatcgggggacttgccgccggtcagtgcgttcagcttcgcgcgctgctcgatgtcgaaattggtgatgggttcgccattgaccatcacggcgatggtctgggcatgcaggcgcgcgccgccccccagcaggaggaaaagagccagcaagaaactcaacaggagcgagtggcggcgcgtcggcgggctagcggtcgttggtgtggtcatgtcagccgtttaaaccaattcaagccggggccaaggcccgcgggcaatacaagcccccctgataggcccctcacgcactactgcatgccagccgaactgctggtcgtggaggtctgggcgatcgtccgcagcccgatctggaacatgaacgcgtggctgaggacgggcggctgcgaaccggcttggtaggtataggacgtgacatagttggcagccagcacgaagcagtcgtccacatagcccgcgcccaaggcatactggttgatcttgttcgcttcaaggtcccagcgcgccgcaccctgaaccacccagttcgacgccaccttgatcgaaccgctggtgaggatgccctcgcggcgcgtcagatagccgagttccggctgcgccgcataatcgccgtacgtcacggcgaccgaccagcggtcgaagttcgcgcttgccgtcgcctcgaaccggttgatgttccaggtcgcctcatccatccgcgtccggacgctgaacgtataggtgcggttgggcgaataggcgaggcttgcgacataatccgagcgcgggttctgcaagccggagtcgatgcctgtgttggtgacgtcggcgaccgcgaacgagttcaggccgaacatctggtaggactgtccgaacatccccttgatgctgccgccatggtcgaactgcgtggtggcctgcacgccgacattggcgcggctgccgccttcgacgcggtcatagccggagaacttgtcgaccgagaacaggttcgaggtatcgaacaccaggctctgcgcgtcctcgttcggaagcttgccggcattgggctcgttgggccggatgatgacctgcgcgatcggctcgaccgtggtcgtgccccacggctgcacattgatgaacgggtagcggtattcgaggccgacggtcggcatcaggcggaccgtctgggtgtcgccgaccggcagatagctggaaacgcccggctggttcgagacgtcggcgttgatcgcatcagcgcggacgctggcgaacggcgtccagatctggccgaacgggtcggtgtaggacttgcgccactgcgcctcggcggtcaggcgggtgtaggtgcccggcatgccacgcagcaggcactgcgacggcgttcgcgccatcggatcggccgacgtggtcaagcacaggctgttggtgttggcggtcgtcgtgatcggatcgaataccgcggtctcgcgggtcaggttgacgaagttcgtcttgtagctgaactcgccgcccaggatattctggttgatcacgttgttgtagtcgatgaccggcgcgaccaccggaacctggttctggttacccgagtagctgagataatagatcgcgcgcgcatcgaagaagctgcggttgccgaccccggtcagatagagctgcgagatcgcttccgtcggcagcgacaggaacgatccgaacgggtccttgtactgggcgagccggtaatcggacatgaagaagtagtcggacagcagcacgccgtcccaaccccagacccatttgtcgttcagcgcgaactggcccttggtgtcgacgccccagcggaactggcggtcacccggctggccggtaaactgcttctggtcgagctggtcgatgccgtaaagccggatctgataggcgccgtcattaaagcgttggcggaattcggtctgcagcagcacgccctgcttggacgtgatgcgcggagtgaaggtcgcatccatgtcaggcgcgatcgcccagtaatagggcatttcgacgccgtagccgaatgccgtgtagctggtgaagcccggcatcaggaagccgctcttgcgcttcacggtcgggtcgggcgtcgagaagtagggcagatacgccatcggaacgccgaagaattcgagctgggcgttctcgaaatagagcatcttctcggtctggttatggatgatgcgcgcgcccttgacctgccagagcggtggcttcttcggatcatccttacagggtgcgcaggcggtataaacgccgttgtcgaacaccgtgtaattgccgctcgaccgatcggcgcgggtcgccgccatgcgggtctggtcttcggtgtcgacgcgcagcgaatcgacgaacccgtcgcggtagtcgtcgctaaggtccatgatgttggcgtaggtgatcttgccttccgcatcggtcatgcggatgttgccttcggcatgaagacgcttggtcttctggtcgtagatgaccttgtcggcctcgacgctggtgccgttgtagaacatctggacgttgccgaccgccgagatgcgcgagttgttgtagtcgtaatcgacctcggtcgcctgaacgagcatctgcccgtcattcttggccggcggacggaccggcttcggcggacgcggattgtaggtgaacgcctgcgcagcagccggcgtcgacacgaccacgtcgagcgcgctgaccacgacgaacgcggcaagcagagcggaaatcgaaacgccaaacgcggccatgcggctccgttgacggcgcagggcactgcgccgcccgaatgcaggcgacatcaactggcgggcggcgacggtagccactacccgtcctcctggtacagcaaggctaagaagccggtgaggctacccacaacgacaggcaaccacgccgcagcgatgggatgcatcaactcagccttgctcaaatcttcagttactttcgacagcacgtagagcagaaagcctgcgcccacgccactcaaaaccatcttctgcacgccgcccatccgaaagaagcggaggctcacagaagccgccaacatcaccatcgcagccagcaaaaacggctgtgcgatcagcttgtgatactgcaagcgatagccagccgtcgcgaaccctgagctctccgacgagcggatgtagttcggcagttgccaaaaggacacagtttcgggggtggagaaactgttgcgcacctgtgccggggtgagagtggtggtcaaatagaaggtgtcctggtccaccggcgccttgtcgagggtgtatcgacgtactcccgtgaacacccagcggccttcttcgagcgtcgcttcgcgcgcttcgattcgctccttgaactgcagcgccgtatcgaatcggaacaccgtcaggccggtcagccggacgccctgctgctcgctgcgggccgcattgatgatcgcctgaccctcgtcattgatctggttgagccagaagcccgacgcgtcctgaatgccgccgcccggcgccgagccgaacagttcggcctccatccgtttcgagagttcgcgcagattggccgacaccggattgtaggcggtggtcgcaaagatgccgagtacgatcgcgctggccagcgccggcgagatgaattgccaggccgagacgccggcggcgcgcgccacgacgagctccagccgccgcgacagagcgagatagcaggtcatcgcgccgatcagcacgcagaacggcatcagcttttcaagcagttgcggcacgcgaaacagcgaagtctcggcgacggtgatggcggatgcgccgaccaggctggatgtcttgcgcaccatctcgatgtaatcgaccagcacgagcagcacgaagatgcccgcgaacacgccgaccgccgcgatcacgaatcggccggcgaaatagcgcccgagcgtatttgtgaccatgctcatgcggttgcctgcctccggaacagccgcgcaatgcgctcgttgtttctgttgatggcttccatcagccgcggcggcggctcgacgacgacgccgccgatgatcatccagaggccgacgccgatgccggcgaacagcatcagatattgcacgagggccgcgatcggcgttttcaccgccatcaccgagcaggcgaatccgaccatgcgcaggccgaacaccgcaaacaccgagccgccgatcgagaaattgcggctctggcgcgtggtgcgcggcgcgccgagaaaggcaaaggtgagggccgcgaacgcaaacggatagatcggcgccatgaagcgatcatgcagctccgcgaagaactggcctgacagctgctgataggtctgatcgttctcgtccggccacatcagctcccagagataacgctcgcgaattccgagcgtgacgtcgcgcccttgcgagaatttcgacatgtcgaaggcgtagcgctgaaacaccaccagcgtcggatcgcgcttgccggcttcgaatcgctcgagattgccgtcctccagcacgagatatgagccgctctcgttcttcagcacggtgccgtggtcggcgacgatggtaacgcgctgctgcggatcgcggcgatcgtcgacgaaaacgccgccgagcacgccgccgggcagccgttcgcggatccgaatcgtcaggttctgatcgagttgggcgaagcggccgggttgcaggatgttggtgaggacgtcggcggtgatctcggcatcccattgcttgatccggcgcatgccgtcgggggcgagataggcgccgatgaaggcgaccagcgcggcgaccacgcaggtggcatagaagaatgggtagaacagccggaacggcgagaagccggctgcgttcatcacgatgatctcggaatcggtcgcgagcttgttcagcgtgtgggagatcgcgatcatcagtgcgatcggggcgatgatcaggaccagggccgggatcacgaggccagtgatgccgaggaaggtgaggatggtctgaccctggctggtcatcaggtcgatgccgcgcaacgcctgggtaatccagatcaccccggtgaggctgaccaggacaagcgcaaacgacgacagcgtcgttttgaagatgtacttgtcgatcgaccccatcgctaccgcacgacccccacgacccccctggcgcaaccaagcgcgcggctttcgaccaatcccgtcaacccgggttcccctatggtcgagccgcggacccgtccggctcactctcgcttcacactctcactaccatccctttgatccgtcaacaaaatggccgagccaaggcacgctaaatttatggttaattaatcgcttttgtggccttccggccactccggcgcttggcagcggcgcagccggcaggtcatagtgtggtcacaagcccggtccggggtgttccggaccgccatcgcaatgctcaccccgcgtgccggaaggaccgcctcaggtccgagcaacaccctgagttctggaggattttcctatgtccgacgccgtcaaggtcggctttgtcccattctccgcgtccgctcgcggcatcctggtcgccttttgcgacgagcaattgaagctgggggctgccacaaggaaggcgctgggagctgccgcggagacggtcaagcgggctgctgccgccaaccagttcaagggcaagagtgggggagcgctggatatcctggctccggagggaatcaaggtcgagcggctgatcgtgatcggcaccggcaaggcggccgacctcaaggagaaggatctgctcaaattcggcggcgtggtggccggcaagctcaacgccggcagtgctgcgatgaccgtccttgcggaactgcccgatgcggcgatgaccgcggggcaggcagcttcaatcgccaccggcatccgcctgcgcgcctacaagttcgaccgctacaagaccaagaagaaggacggcgaggacggcgccgtgcgggccgacgtctcgatcgccgtcgacgacgtcgctgccgccagaaaggcctttgcgccggaatcgtcgatcgtcgacggcgtgaatctggcgcgtgaactcgtcaacgagccgccgaacgtgctgtaccccgaagagttcgcacgccgcgccagccagctccgtaagctcggcgtcaccgtcgaggtgctcgacgtcaaggcgatgaccaagctcggcatgggcgcgctgctcggtgtcgggcagggctcggcgcggccgagtcgcaccgtgatcatgcgctggaacggcggcaagaagagcgaggcgccggtcgcgttcgtcggcaagggcgtctgcttcgataccggcggtatctcgatcaagtcggcgggcggcatggaggacatgaagggtgatatgggcggtgcagcctgcgtcgtcggcctgatgcacgcgctcgcggcgcgcaaggcacgcgtcaacgcggtcggcgccatcggccttgtcgagaacatgcccgatggcaacgcacagcgtcccggcgacatcgtcacctcgatgtcgggccagaccatcgaaatcatcaacaccgacgccgaggggcggctcgtgctcgccgacgtgctctggtacgtcgccaagaagtgtaagccgaaattcatggtcgatctcgcgacgctgaccggcgcgatcatggtcgcgctcggcaccgatcacgccggcctgttctccaacaatgacgagcttgccgagcgcctcgccaaagtcggcgtcgagaccggcgagaaagtctggcgcatgccgctcggtcccgaatacgacaagcagatcgactcgcaattcgccgacatgaagaataccggcggacgcaacggcggttcgatcacggcagcgcagttccttcagcgtttcgtcgacggcacgccctgggcccatctcgacatcgccggcaccgcgatgggcgctccgaagaccgagatcaaccagagctggggttcgggttacggcgtccggctgctcgatcggctggtttcagagtattatgaagccaggaagtaagagagtgtcggcgcgcgcatgaccgaggttctgttctaccatttgcagaacatgacgctggagagcgtgttaccgccgctgctcgagaagtctctcgagcgcggctggcgcgtggtcgtgcaatcgacgtcgcaggagcgtgccgagacgctcgacgcgcatctgtggacctacagcgacgattcgttcctgccgcacgcgagcgcgcgcgtagccgacgcccaggaccagccgatcgtcctgtcgatcgaggagagcaatccgaaccgggccaatgtccgcttcctggtcgacaacgcggcgctcccggccgattgcgacagctacgagcgcctggtcctcgtgttcaacggtgacgaccccgatgcggtcgccgcggcccgggagaactggaccgcttgcaaagcccgcggcttcgaggtcacctattggcaggccgacgagcggggacgctggcagcggcgccaatagcgatatcgactaattaatgataattcgacctttcccggggcgggtcacggtcatgccgcaaagtgatgttcggacaaccccttaggtaaaggggttaggagccttgtcgatcgtgcgagacggaacattcagtcggaattcgctgctggccttgctggtgcttgcacctggccttgccggttgctcgggcgcatccgacattttttcgcgcgatgcagactggttctcgcgtccggggcgcgtgttcatccgcaacatctcgatcgaatcgccgccgctgacgccggacaagccggtcaccaacgacgatctcgtcagtgctgacggcagctgtccgggcatggcgccgccaccgggcgccgccgatgcgaatgcgcaggcgaccggtgcaccgccgccgcagccgaccggcggcagtgtcgcactcgggcacaccgaatgcgacgtcgtgcgcggcatcggcgcccccgacagtgtgaacctgtccagcgggccgggcggcgagcgcgttgcggtcgtgacctggtcgcgcggagcgcgcgccggcatctataccttcagttcagggcgcctgacgtcggtcgagcgcggcccggatgctgcgccggagccgaagcccgcaaagccgaagaagaagccgaagaagccggcgacaacctcgaacggttgagttgtaagtccgcagagctctagttcgcggcctcgtcaagttcggcgctggcttccagccattcttcctcggcgcgttgcagcgcggcctcggcgccggcgcgcgctttcgtcaactgcgcggcctgcttgggatcgcgcgtgaaaatatcgggcagggcgagcgcggtatcgattttggcaatgatgccgttgatgcgctcgatctcggactcggcttgggcgatccgctgccgcggtgaaacgcgcctttcgttgcggattcgctcgggctttgcggcgacctccttggcgcgctcgcgcgcggccgcgcggccgtcattcgccgacaggatcatgcggcgatattcgtcgagatcgccgtcataggccgtgacggtctggttcaccacgacccacaaccggtcggcgcaggcctcgatcagatagcgatcgtgcgagaccatgatgatggcgccggggaattcgttgatcgcctccgcgagcgccgcgcggctgtcgatgtcgagatggttggtcggctcgtccaggatgatcatgttggggccgtagaacgtcgcaagcccgagcagcagccgcgccttctcgccgcccgacaggctcttcaccagcgtgtcgcccgccttgccggagaagccgatcgcgccgacgcggccgcgcaccttgctctccggcgcctcgggcatcagcttgcggatgtgatcatagggcgaaccgtcgagattgagctcgtcgacctggtgctgggcaaaatagccgaccgacaatttgtcggctttggtgatcctgcccgcgaacggcgcgagcttgcccgccagcagcttgaccagcgtcgacttgccgttgccgttggagccgagcagcgcgatgcggtcgtcgggatcgacgcgcagcgtcacgcggttgagcacgggcttgcccggctcgtagccgaccgagacgtcgtcgaccgcgatgatcggcggcgacagcagcttctccggtgccggaaaggagatctcgtgaacgtcctgggtcaccaatgcggtgaccggcttcatccgctccagcatcttgacgcgcgactgcgcctgccgtgccttggacgccttggccttgaagcggtcgacgaagtcctgcaggcgcttgcgctcatcggcctgccgcttggcgtgcttggcgtcgagcaattcgcgcgcggcgcgctgttcctcgaaggaggagtaggtgcccttgtagagcgtcaacctgccgcgatcgaggtgcaggatctggtcgaccgacgtgtctaagagatcgcggtcgtggctgatcacgatcaccgtgcgcgggtagttggcgaggtggttctcgagccacaacgtgccttcgagatcgagatagttggtcggctcgtccagcagcagcaggtcgggagcggagaacagcgtcgcggccagggcgacgcgcatccgccagccgccggaaaattccgcacatggccgcgcctggtctgatgtcgagaagccgaggccggagaggatcgccgccgcccgggcaggagcggagtgggcgtcgatgtcgaccagtcgggtctgaatctcggcgatccggtgcggatcgtgcgcggtctcggcctcgcgcagcagcgcgtcgcgctcgaggtcggccttcaacacgacgttgatcaggctttccggcccgtcgggcgcttcctgcgcgaggctgccgatccgccagcgcggcggcagcgcgatgctgccgctttcggtcgggatgtcgccgcggatggcatgaaacagcgtcgatttgccgacgccgttgcggccgacaaatccgacgcgggctccgggcacaatctgcacagaactgtgatcaatcagcagccgtccggcgatccggaccgagatgtcagtgatggagagcatgcagcgttgtcaccggacccgctgccaaacgcaacccgtctgttggtaaaatctgtccgggcgacggccccggaaacgcgttttgggctgccggtcagcccaaaacatctagtggcgatcgccttcccgtcgatgcatctcgtcgaggagttgctgcaggcgggacgacagcgcgggctccggccgcatgtctttctgaagccgttcacccaccgcatcgcagatgtaacggcaggtcttgtggtcgatctgatcggcgtcgttgtcgatcttggtcattgtcatcgtcatggctgatctcttggcaaacctcttggatgtttcttggcgagttccacctcgcgtcttcggtcaatcgttgccatgacaagtcgcgaccccgaatttggttcggttccgccttactctcgccttcaggtggtggggcgcatcgcgccgccgggttcccgggtgggcatgaaaaaagccccggcgcgaggccggggctgagtcagtcaggggagcaggcgatagagaccagatggatcagtagcagcggttgaccaggcgccagcgcggaccccaaggggtcggcaccacgcggcgcacgtagcagccgccatagccatatccgtacccgccgtaataggccggaccaccgacgatgacgcgcgggccaccccaccagccgtggtgccatccaccgtgccagccgccgtgccaaccgccccacgcagaggcagaggtcggggcgagagcggcggcaccgagcgaaatcgcggcaacggcggcgagcgaaattttgcgtaacatgatcgtctcctcgagctatgggcgcgcgtggcgcgccgcggtgacatcgtttcccgagacgtcctgtgaagcttgcggatgggtcagcaaggcgtccgatcgatgcagagcctaggcggcgacagctgaacggcggcggcacggcgctgacagaatgggttcacctaggtgaaatcgcggtaagccagccgagccggtggcgctcgcgagaccgcccggatgacggttttcgtcgtgaaaatccatcaaaactaaaggctaacgcgtcacagggtcgcttgccgttgtcccatcgcgtcgatataagccccggcaactcccagccaccgtttacaaggacgaaatcatggcgattgaacgcaccttttcgatcatcaagcccgatgccaccgagcgcaacctgaccggcgcagttaatgcggtgatcgagaaggcgggcctgcggatcgtggcgcagaagcgcatccagatgacccgcggccaggccgagaccttctacgcggtccacaaggcgcgcccgttcttcggcgagctggtcgacttcatgacctcgggccccgtggtggtccaggtgctggaaggcgagggcgccatccccaggtatcgcgacgtgatgggcgcgaccgatccatcgaaggccgccgagggcaccatccgcaagctctatgcgaagtcgatcggcgagaactcggtgcatggttcggatgcgccggagaccgcggcgatcgagatcgcgcagttcttcgccggcaacgaaatcgtcggctaacgacgtacaactgaaagtgacacggtctccttcaggagaccgtgccggaataactggggagcaggggcggccgcaaggccgaataggacgcgctgtggactggctgtggcagatctttgatccggcgtacatcggcgcgttcttcacccaattcaagaacgagatggcgacaccgaccttctgggtcgccgtcggcaagatcatctggatcaacgtcctgctgtcgggcgacaacgcgctcgtgatcgcgctcgcctgccgcgggctggcgccgcgccagcgcctgtggggcatgattctcggcgccgccgcggcagtgctgctgcgcgtcatcttcaccggcatcgtcgccagcctgatggagctgccctacctgaagctggtcggcggactggcgctgatcgtgatcgccgccaagctgctggtgccggagcaggaggacgaggacggcgtgcagacggcctcgcatctgtgggccgcggtgcagatcgtcgtcgtcgccgacatcgtgatgagcctcgacaatgtgatcgcggtggccgcggccgccaatggcagcgtgccgctgctggtgcttgggctcgcgatcagcgttcccctgatcgttgccggtgcggcgctgatcatggcgctgctcaccaagctgccggtcctggtctgggccggcgccgcgctgctcggctggatcgcgggcgacgtcatcgcgaccgatccggccgtgcatccgaagctcgatgcgctgttcgccggatcgctcggcgccaaactcgattcctggctgacgtcgatcgggatgtcgccgcaattcgcgcatggcggcaatggcggcgagatcacgctcgcggtgctcggcatcgtcgtggtgctggtcgtcggatcgctctggcgccgtcacgcgctccgcaaggccaagcacgccgccaaggcggcgtgattcttcctaaagcgcgatgagattgggtcgaatcgtcatcgcgcttcagctctttgtttgagcatgatcttttcgaaaaaccgcttcgcacttttccggatcatgctctaacgccgcacgatcgagccgacgcggccgaccagccgggccaactgcctgaagcggctgccgacccggtcggcgaccagatccaccatccgatgttcgaacaccagcatcagcttgcggccctgggtgcggaaatgggtcagcggcagcacgccggtgcgtgccgccgtgatcagatgcgcgacgcggaacgcagcgccgagcacgcgcgcgcgctcgtccattgcgggcgtcaccagcgcgcggatctgcggcggcggttcgttctcctcgctgaggccggcgtagcgatagaacaccgacagcgcgacgaaggcgcggccctgatgcgtgatcgagccgaaattgccgttcatgatcaggctgagggtttcctcgccgcgatgatccggatgcacccgccagccgatatccgagagcaggcaggcgacgtgccgcagcctgcggtcttcctcggtctcgcgcagcctgacgacgcgcaccaggcggtcggtccaggcggtcagctcctgggcatggcgggcggagcgcgacagcaattcgttgaggttctgtgcagcgcaggcgaggccgtccttgacccgctcggccggcggcagcatctcgtagagcaggccttcgcgcacgccgaaggtcgagaacacgatggtcttcggctgggccacgcggatgatgtattcgagcacgagcgcggcgtaggccaatagcggccgccgcgcatcggcgatcgattcgatgttggcgagcatgttggtggctgccagccgccgcagccgctgcgcgaagtcgagcgcgtccgcggccgggatcgaatagccgtgcatcaccttgagcgggtagccgctctggatgatgtggatgcgcgccagcgcacgccaggtgccgccgaccgcgtagaaggtgcggccgcggccggtcttgagctgggcgacgccgagcagctcgttcttgacgatgcgttcggcacgcttgagcgacttgttcgagaggtcctgcagcgcgaggctgccgagcggcagcgtcacgccgctgcgcacgcggctgcccttgacgtcgatcagttcgagcgagccaccgccgagatcgccgacgatgccgttcggattgtgcacgcccgagacgacgccgagcgcagacagcttcgcttcacgcggtccggtgagaatctcgatcttagcgccgcaaatgcgctcggcctgggcgatgaaatccggaccgttcttggcgtcgcggcaggccgcggtcgcgatcgcgtagacgcggccgacctgctggatccggcacagcgcgcggaaccggcgcagcgcggtcagcgccttgttgaccgcatcggtcgcgagcaggccggtgctctgcacctcgcgcccgagcccgcacagcgccttctcgttgaagatggtgatgaggctgcgcgccatcgactcgtaaaccacgagacgaaccgagttcgagccgatgtcgatcacagcgacgctggaagcgcgcttccgcggccgcttcaccggtaggcccccttaagaggatggctgctgacgttcgttgcgacgcgtgagacggcgcggtgaagattccttgagagacttaccacggccggacagactcggatttgtcataaaatagtcatgcaggttgaaaggctcttcgcctttcgcggccttcatacgcgttgacgatccgtccggcaacaattgccagctttgctcggtgtccttcaggttcgcgaccatgatctgttcgagaacctgctgatgcaccgtgggattttgcagcggacagagaacctcgacgcggcggtcgaggttgcgcggcatcatgtcggcggacgagatatacacagcagcttttgtgctcggcaggccctgacccatgccgaagcagtagattcggccgtgttccaggaaccggccgatcaccgatttcacgcggatattctccgacaatccgggcaggccgggccgcaggcagcagatgccgcgcaccacgagctcgaccgagacgccggcctgcgaggcctcgtacagcgcgtcgatgatgtcgggatcgaccagcgcattcatcttcatccagaccgcgccgggacgaccgtgtttgacgtgggcgatctcgtcacggatgtgctcgatgatccgcttgcgcagcgtcagcggcgacaccgccatcttctcgatgtcgctcggctcggcatagccggtgatgtagttgaacacccgtgcgacgtcgcggccgatgatcggatccgaggtgaagtaggagacgtcggtgtagatgcgtgcggtgaccggatgatagttgccggtgccggtgtgcacataggtcgtgagattgccgccttcgcggcgcaccaccatcgacagcttggcgtgcgtcttcagttcgatgaaaccgtagaccacctgcacgccggcgcgttcgagatcgcgcgcccagcggatattggcttcctcgtcgaagcgggccttcaattcgatcagcgcggtcaccgacttgccggcctcggcggcatcggcgagcgcgcgcacgaccggcgagttgttcgaggtgcgatacagcgtctgcttgatcgcgaccacgtcgggatcgcgcgctgcctgttgcaggaactggacgacgacgtcgaaggattcgtaggggtggtggaccacgaggtccttctggcggatggcggcgaagatatcgccgccatggtcgcgcacgcgctcggggtggcgcggcacgtagggcgggaattcgaggtctgggcgattgaggcgggtgagctgcgacagctcgttcatcgcgagcacgccgtcgaccaggatcacttcatcgtccgccgccgacaatgcgtgctgcacgaagacgcgcagctcttcgggcatcgaggcctcgatctcgagccggatcaccgatccgcgccggcgccgcttgagtgcggtctcgaacaggcgaacgaggtcttcggcctcttcctcgatttcgagttcggagtccctgatgatgcggaacgcgccctggcccttgacggtgtagccggggaacaggcggccgatgaacaggccggtggcctgttcgagcgtgatcagccgcgccggcgcgccttccttgttggaggggatgcggatgaagcggtcgatcttgccgggcatgcggatcagcgcgttcatcgccttgccgtcggagatccgcgacaattgcagcgcgaccgtgaagccgagattcgggatgaacgggaacggatgcgccgggtcgatcgccagcggggtcagcagcgggaagatgttgtggaggaagtgatcctcgatccaggtgcgttcggacttggtgacgtcgcggccatcgaccagctggatgccgaccttggagaggatatcccgcaggtcgctccagatcgcctgctggtcggaggcgagctgcgacacggtcttgttgatcatcacgagctgctcggccggcagcagcccgtccgggctgcgctcggcgatgccctcgcggacctgcgccttgatgccggcgacgcggaccatgaagaactcgtcgaggttgttcgccgaaatcgacaggaagcggacccgttccagcacgggatggcccgtgttgaccgattcctcgagcacccggcggttgaagtgcagccaggagagctcccggttgatgaaacgctcggggctggtcgcgatcgcggggacgggcgggagttccgcctctttctctttgatttcaggagcttgtgccgagtccatcaagtgctggtccaattcggggcagggggccggagcggtctagccgaaggccgcagagaccatgtgatattgcgatgacgtttcgatgacattgatgttccgccagcccgcgccgtcaagccgcaggtcggctcaggcgtcccgcaatagctccgccgccagcgcccgcgtgaccggccggccgagccgcagcgcctcggtatcgagcaactcgaccgcctggcggacggcggcataggagcgctcgatccggctggtcaggtagctgaccagcggctcgtccacgctcatctggcgatcggcgcagaatttgacgatcaggccgcggaacagctggtcgtcgggcggcagcagcgtcacggtcggcaccgcgcgaagccgcgacctcagatcgcgcagctcgatctcgaatgccgacggcgggacgcgcgccgtgatcaaaacgaaagcatcgtcctggcgcgccagattcatcaggtgaaacatcgcgcgctcgtcgaaatccgatggccgcagatcctcgatcaccagcgcgccggtcgcaagggccgtgggcaccgcctcagcggtcagcgcatgcgcggcggtcgagcgggcgccggcgctctcggcccagatcgcagcgaggtggcttttgccggagccgtcgggcccgatcagcagcatgattcggttcggccagtcgggccagccgtcgatcagcgccagcgcggcttcgttggcgggcccctcgaggaaatcgtcgcgggtcagcttctcctcgtgcggcagggccaaggccaattgacgaggttgaacgctaccggccacgcaagtctccaaaccacttcattctagcatgatccctgcgcaaacgcttcgcgtttgtcgcgggaaaaccggtttccacttttccggatcgtgcctaccgagcctcgatcgtgctcatgtgccgcacccactccacgagatagagggacaccgaacccaaagtaaagatcgtcaccagacccatcaggatcaggtcgtaggggtgcggctgaaagccgaagccgagcgaggccagcaccagggccgcgaacgcgacctgtgccaccgtgttcagcttcgacaccatcagcggcttcatctcgacaggcttgtcgaacaaccatgacacaatcacggcggagacgatcatgatgtcgcgcgacaccacgagaatcacgatccagcgtggcactgcgccccagattccgagcgcgacatagatcgacaccagcagcgccttgtcggcgagcgggtcgagcagggcgccgagctcgctcgtcatgttgaagcgcttggcgaggaaaccgtcgaccgcgtccgacacgcctgcgatcacgaagagcgcaaatgcgatctccatctggctggacacgatggcccagacgatcaccggcaccaggatgatgcgggcaagggtaatgatgtttggaatgctcaacttgaatcgtttcccggctataagcctgattttactcgatatccggctcttttcagctgcggccttgtgttatctacatagtatcgcggcagcattgccgcgagccattgcgcgggggcggaattcctcgtaaccagccccttatcatctggaattgggcatgaccgagcgcaaaaacgggctcacttacgcggattcgggtgtcgatatcgacgccggcaatcgtctggtcgatctgatcaagccgatggtgcgggccaccgcacgacccggcgcggacgccgagatcggcggattcggcgggctgttcgacctcaaggccgcgggcttcaaggatcctgtcctggtggcagcgaccgatggcgtcggcaccaagctgaagatcgcgatcgagaccggcatccatagcggcatcggcatcgacctcgtcgcgatgtcggtcaacgacctcgtcgtgcagggcgcggaacccctgttcttcctcgattatttcgcctgcggcaagctgcatccggaggccaccgcgcagatcgtcgcgggcatcgccgagggctgccgcgaatccggctgcgcgctgatcggcggcgagaccgccgagatgcccggcctctacaaggatggcgattacgacctcggcggcttcgcggtcggcgcggccgaacgcggcaccttgctgccgaccgccgatatcgcggccggcgacgccgtgatcggccttgcgtcctcgggcgtgcattccaacggctactcgctggtgcgcaagatcgtcgagcaatccggcgttgcctatgacgcgccggcgccgttcgcaccggtcatgacgctcggtgcggcactgctgacgccgaccaagctttatgtgaaatcctgcctgcgcgcgatccgcgacaccggtgcggtcaagggcctcgcccacatcaccggcggcggcttcaccgacaacatcccgcgtgtgctgccgaagcatctcggggtcggcatcgacctggcgcggctgccggtgctgccggtgttcaaatggctggccgagcagggcggcatcgccgagctcgaactgctgcgcaccttcaactgcggcgtcggcatgatcgcgatcgtcaggcgtgatgcggtcgaagcggtgaccgaagccttcaccgccggcggcgagaccgtgacgctgctcggcgaggtgatcgaggccaagggtgaggatcgggtggtctataacggtcatctcgatctttcgcgatgaagcgccgggtcgccatcctgatctccggccgcggctccaacatggccgcgctgatcgaggctgcgaaggccgtggattttccagccgagatcgcggtcgtgatctccaaccgcgccgacgcgcccgggcttgaaaaggctgccgcgagcggcattccgaccatcgtcatcgcgagcaagccgttcggcaaggatcgcgccggcttcgaggcggtgctgcaaaaggcgctcgacgacaacaaggtcgagctgatctgcctcggcggcttcatgcggctgttcaccgccgacttcgcccggcactggtacggccggatgctcaacatccatccctcgctgctgccgtgttttcccggcctcgatccgcacggccaggcgctgcgtgcaggggtcaagctgtccggcgcgacggtgcatttcgtgattccggagaccgatgccggaccgatcgtgatgcagggcgcggtcatggtggctgacgacgacacgcccgagacgctcgccgcacgcgtgatcaccatcgagcatcgcatctatccggaagcgctgcggctgctggcgagcgggcggctcaagctcgacggcgatcgctgcagcacgcaaggcagcatcgcaaccgacggcgcgctgatcgcgccggcgccctagggtttgcccgtgccgctggaaaatcccccgggtgatgcggccggggaggcatcaggacgaattccgccgaaagccgcgttcagtgaaccttgaggttctctgccgacgccttgccgcggttctccaccagctcgtactcgacggtctggttctcgttcagtgtgctgagacctgcgcgttcgaccgccgagatgtgcacgaacacatccttgtcgccgacggccggcttgatgaacccgtagcctttggtcgggttgaaccatttgacggtacccttcggcatcgtctctctcctagtctagacataaaaaagacgcggccacgttttccacgtgccacgccacaagcgggccttccgctgtctgttcaatttccgggtcttcagatccaaagtcttcaagtccgaagttttgcctctcgaagccttggataaaacgtcgtgaaacgcacagtcgaacggcagcaatccgattgtgaagggattgcaacacgaaaattgcgccttagcaagcgcggtggttttgcctgacgcaacctcagcctgtgccggtcgaacgacaggcccaaggcgttcggccactggccggcggtcggatggaacctggcgcgctagccccggtccacccgcaccacgcggcccttgtcgatcgcgagcgcgagctggccgtgcttgagcttgagtgccgcctcgccgaacaattcgcgccgccagccatgcagggcgccgacctcggcctgatcgctggccgcgatctgctcgaggtcgtcgacggtggcgatcaccttgctggcgacgccgtggcgctccgacgtcatgcggagcagcaccttcaacagctcgacggtcgccgccccgttggaattgtttctgggtttttccagcttggggagcgtcgccgggtcgcgggccagcccgcgctgcacggcggcgatgatgtcggcgccccatttcgagcgctcgaaacccttcggcagcgagcgcaggttaccgagcttctccagcgaggtcggcgcatgggtggcgatgtcgccgaccgcatcgtccttgagcacgcgcgagcgcggcacgtcgcggctctgcgcctcctgctcgcgccaggctgcgacctcgatcagcaccgcgagctcgcgcggcttgcgcacgcgggtcttgagccgctcccaggcgcgctcggggtggaagtcgtaggtcttcggcgaggtcaggatctccatctcctcgctgacccagtcgctgcggtcgcgcttgcgcaagtcggcgtcgagcgccgcgaacacttcgcgcagatgggtgacgtcggagacggcgtaatgcagttgctcctcgctcagcggacggcgcgaccagtcggtgaagcgatgggtcttgtcggggcggtggccggtgacgcggtcgaccagctggtcgtaggcgatgctgtcgccataaccgagcaccatggccgcgacctgggtgtcgaagatcggatgcgggatcgtgccggagaggtgccagacgatttcgatgtcctgccgcgcggcgtggaacaccttcagcacggcctcgttcgacatcagttcgaagaacggcttgaggtcgatgccgggcgccagcgcgtcgaccacgacggcttcgtccgcgcttgccatctgcacgacgcagagcaggggatagtaggtcgtttcccgaaggaattcggtgtcgacggtaatgaccttgtgctgggcgagccgatcacaggcggcggcgaggtcggaggtcgtgctaatcagatccatgaactatccatgacggcttgaccccacgcgttctgccgaaagggcagctatgtcaagggtcttgcagggattttggccctgcatggggtgagggacgggtcatttttgaattgattgggcgtgattcgagggcgttttcggcctgatcgagctgcgaattcgcccgtcctccagccggaagccgggacccataaccaccgaagttcgttcgcggctccggcctcgtgcggtcttgggcactgggggtgatggggcctggctcccttgcgcaattgcgcacaggcccggctcgccgcctccgctaaagcttcggcgcgcaggggcgcttgacttcgtcgaagccttggcgaagaccggcccgggcgatccagtatcccagggacgccggtgctggaatcgagaagccgcggtgactggatcgtctgcatgcgcgggcgatgacagttgaagatgaggacgccatgtctatgatcatctcccgtcgacccggatttgctgtcggctaacgcattccagcccgacgcgatcaaggctccgacgggtgcagcttatcgcgatctcagaaacagcctagcgaggatcgtcccgatggagccccaccacgcgcatcagatcgaggaaacgatcgaacgcgatgttcggcttgacctgttcagagggctcgggttgtggatgatatttctggatcacatccccaacgatggagccatcggctggattacgctgcgcaactacggcttcagtgacgctgcggagtttttcgttttcatctcgggttaccttgccggtttcatatacggcccgatcatcgcttcaggtttcctgctgtctgcagcgaagcggctgtggacgcgggccgcgcatatctacgcggcgcatatcatgttgttcctgatctttacggcccaggtcgcgagaacctcccgacggctcgacaatccgatgtatgaaaacgagttcaacgttttcaattttcttcagcatccggatatcctgatcggacaggcactcaccctgcgatacaagcccgtggatctcgacgtgctgccattgttcattgtcttgctgctcgcgtccccactggtcatctggggactggtgcgtcgccccaatctcaccttgctggcttctattgttctctacgtgctggcgcgatggttcgattggaacatcgcatcatatccaccgggcacaacgtggtacttcaatccattttgctggcagttgctgttcgttttcggccagtggtgcggggtgggcgcattgtcccagattttcaggctgatcaagtcgcggatcgtcgcggcggtggcgattgcctggctgatctttgcgttcctgatcgtgatgacctggcatttccatgcgctggagacgttcataccgggatggatgatgaagttcatctacccgatcgacaagacagatctcgatatgttgcgcttgacccatttccttgcgctcgccgtcgtcgtccatgacctgattccgcgggactggccgccgctgaaatcccgatcattgcgtccactgaccttgtgcggcgaacattcgctgccgatcttttgcctcggggtcttgctgtcgttctccgcccattgggtcttgacccaatacagcggcgcggtcatcgcacagctcgtggtgagtgcggccggaatcgcgatcatggttgtcgcggcatggttgctgcatcgcgccgacaacattccgaatttgttcgtcgatgtgacgactgcagagcttcgacggaaaattggcgaccgaactggaataataagcaacaaggagctgccgtgatcgccccgcagccggcggccgttaccagcgagctgtttcaaatcgcctcggatgtcccggagcatcgtcgcgacgctgtgctcgacgacatcaacagcatcatcgatacgaactggctgacggaaggaagattctggtcgcggcagcactcgccgttcaaacccgaccacggcatcgtcctgcttcaccacggcggtgcatgcgtggcctacatgatcatccagcgtctggccgttggcggcacgccggtgatctatctgtcaggcaccgcagtccgcgacgcctatcgcggcagcggcttcttcaaacggatgttcgagaccgcgatggcggcggagttcgccgacccggcggcgccggcggaattctgcctgtgctggcggacgaggaatccggtcatctacgtgctggggcgcgcgcaatgccgcagcgtcgtgccggccattccagccgcgaccaacgggggcgatctcgacgcgctttgtctcaggctggctgcaaccttgtaccctcatcagaccatcgagaagcagacgatggcgatgcgcggcgcctatggccagctgcgctatcgcgacgagccgacgacccagacgtcaccggacgtcgaccgatggttctcgcagaccattcccgactgcgccgacgcagtcttctgcgccgggtgggctggtaatcgctggtcgcggcgctgagcggcgaagaattgccttggcaacgactggaccgccgctgatgtgcgccgccgggcaatcagtgatagcggcgcgcctccatccttcggtcattccggggcagcccgaagggctgagcccggaatccattgggccgcgcgaatcgaggatgaatggattccgggctctcgcttcgcgagccccggaatgtcgagggaggctgccgtgcggacttgcgcccttgggcaactcagcgattggcgatccgcccggcctcgaccggcgtggcgatgttgccctgatcgatccgcgcttcgcccgcacgaacgcgcgacggccatccatatcgcgaggccagcatcgtgagtcggtccctgacgcgatcatgcgcgggacgttcgaggaagcgccagacgaaccacgccagcagcaccatgcacgccacgacgaacgtggttgagagtgcattcggcgttggtgtgatcaggagcaggatcacgtagccgagctgcagatgcagcaggtagagcggataggtgatgccgccgatggccctgacgagcccgcctggcagcggcacggacttgacccgggtggccgcgaacacgatgccgagcgaaacgatgcagatcaccgtcacgacgcgcggatcgaagctgccacgggtgtggacgccgagccgctccagcttgtgcacggcctggaacgtcgccgttcccatcgccagcgtcaaaaggctgtagagcctgctgtcgcgccgtccacggtagtgttcgtaaatcaggaggccgacagcgaagaagccgctgtcgtcggccatgaacagcttctcgaacagcggaatgtcgagcgtcaattcgttggcgaaggtgacggcgatccacgccacaatgatggtgtcgatccgcctcgggaagatgccccaggccagcaacagcgcgacccaggcgtagaacacgacctcgatcaccagcgaccaataggcgtcatccatgtagggctggccgagcatcggcgccgcgatgaacaaattcgccagccattgaccccacgtcacctgaaaccaggcgtggccggcgagcagcgtcgcgaggaaggtcagcgtcatgcagatgacgaaggtcggataaatgcggctgaagcgcgcgatggcgaagccgaccggggtgcggccctcggccgaataggcgatgacgaagccggagatcgcgaagaacacggggacgccgaggaagccgtattgcgcgatcggggccagatacggcatcgccacctcctgcaagccgtgcgacgccgggccccagaagccgtaatggtaaaggatcacggccccgaccgcagcgagccgcagcaggtccagcacaggaacccgggtcggatccggttgtttggcaacgctcggcataggcccgttatcatggcggcgaggcatgaaggcgttcttaatccggccggcgaggcggccggcgcggccgttcacgattgcagaagccccgttgcgatgccggcggcggcgctgaggacgaccaccacgagcggcggcgcccgccaggccgtgagcagcacgaagccggccagcgcaatgccgaaatcgagcggacggtggacgctgctggtccacaccggattgtagagcgcggcgccgaggatgccgaccaccgcggcgttgacgccgcgcatcatcgcctgcgccgccggccgcctgcggaattgatcccagaacggcagcgctgcaagcaggacgagaattccgggcacgaagatgccgacgaggcccgtgatagcgccgggcacgccgccgatcacggcgccgagataggccgcgaaggtgaacagtgggcccggcacggcctgcgccgcgccgtagccggtgaggaacgcatcgtcgccgatccagcccggcgtcaccaccgcttcgcgcagcagcggcagcacgacatggccgccgccgaacaccagcgcgcccgagcggtagaacgcctcgaacaggccgaggccgggccatgtccgggcgaggagcggcagtccgaccagcagggcgataaacaggatcagcgcaccgaggccaacgcggcgtgacaccggcatcgcaatatgggtggcgccattggccgtttgcgcccggcagagccagaggccggcgatggcgccgagcacgatggcgccgatctgcgcgatcgacgaggcgctggtgagaatgaccagcgccgccaccgtcgcaatcgatgcgcgctcacgatcggggcagagcgagcgcgccatgccccagacggcctgggccacgatcgcgactgcgaccagcttgaggccatgcaccagtccggcgccggccggcccgctcaatccgctggcgccataggcaaacagcaccagcgcaatcgccgacggcaacgtgaagccggtccaggcggccagcgcgcccaaatatcccgcgcgcatcaggccgagcgagaagccgacctggctgctggccgggccgggcaggaactggcagagcgcgactagatccgcataggcctgctcgtcgagccagcgccggcgggtgacgaattcgtcgcggaaatagccgatatgggcgatcgggccgccgaagcagctgacgccgagcttgagaaagatcagcaggacctcgagcggcgaatgcgcggcggcgggcgtcgtggtcgaatgctggatgtcggtgtcgttcaagcgccgtcaattccctggcttgcgtccgatgtcaggactcatcagggcaaggatatcgcgatttggtgacgcctgagcgcgatttctggctacggcgagagaaatgtcggacgggacgaccggcacgtcggtggatatggcgatagctcactcgtagcgcatgttcttcgacggccggcgcgctgcgggcatcgccagcacgacgaggcacagcgcgatcatcgccagtcccataaattcgaatgcaaatgcgtccacgggccgttctcccccatttggaaacatttagacttgttgggggagcgttgacgcgctgttaagccttatggttaccgccgcgagcctcccggcatggtggagagtgagttaacgcttacaacgggcgagatgcgtaggatgggtagagcgaagcgaaacccatcaacttcgcagctccgggagagatgatgggtttcgctgcgctctacccatcctacgaagcgacaatcttgccttacgtcccgcagaacgtctgcgtcaccatctgctcgggcagcggcggatcggcgtaggcggcgaactgcgtctggtcttcgtacggcttcgccagcaccgtcagcaattcctcgaacggcgcgtagtcgtccgcgttcaccgcagccgcaatcaccgcctcgatgcggtggttgcgcgggatgaaggccgggttgacggcggccatcgcggccttgcgctcggctgcgctctgcggctccagcgcgaggcgggcgcgccagcggtttgcccattcgtcgaacgctgcgggatcggtgaactgcgcgcggacgtcggcggcgtcatcggctgcggcgtttccgagatggcggaaggtcagggtgaagtcggccgcgttcttggccatcgcgtccagcaagtcctggatcagcgcctcgtcaccatcctgcgcggtgaacaggccgaccttggcgcgcagcccggcctgataggccgcggtgaatttttcggggaattcgccgaggatcgtctgcgcctgctcgatcgccttctcctgctcgctgtcgaacagcggcagcaggcactcggcgagccgggtcagattccacagcgcgatgcgcggctggttggcgtaggcgtagcggcccatctcgtcgatcgaggagaacacctgcgccggattgtaggcgtcgaggaaggcgcaggggccgtagtcgatggtctcgccggatatcgaggtgttgtcggtgttcatcacgccgtggatgaagccgaccagcagccagcgcgcgaccagtgcggcctggcgcgcgacgacgccggcgagcagcgcgtgatagggccgggcggcatccctgagctcggggtagtgcctcgcgatgacatggtcggcgagcgcgcgcacgccgtcggtgtcgccgcgggcagcgaagaactggaaggtgccgacgcggatgtggctggaggcgacccgggtcagcaccgcacccggcagcgcggtctcgcgcatcaccggctcgccggtgacgacggcagcgagcgagcgggtggtcgggatgcccaaggcgaacatcgcctcgctgacgatgtattcgcgcaagaccggaccgagcgcggcgcggccatcgccgcggcgcgagaacggtgttgggccacttcccttgagctggatgtcgcggcggaggccgcccttgtcgatgacttcgccgagcaggatggcgcggccgtcgccgagctggggaacaaagtgcccgaactggtggccggcataggccatggcgatcgggtcggccccctcgggcagccgcttgccggcgaggatttcggcgccctcaggtgttgccagcaggtccggatccagcccgagctggaccgccagcggccggttcagcttgatcagccggggggcggccacgggggtcggcgcgacgcgggcaaaaaagttcgccggcagcgccgaataggtgttctggaacggaaaatggacggtcatatcgcaaagataggccggcaggccgaataggcaaacgattggctgcgtcggtgccgaaaatctgcggtttggcccgaaacggccgcgttccattggttgccgcacccggcctcgtcgggtaaaccctccgcaacttcggacagggcattttggcgctgtcgcgattcgaccctccgacatcagttttggaacgaaaatgcatcgctaccggtcacacacatgcggcgcgctccgtgagagcgatatcgaccagacggccaggctgtcaggctgggtccatcgtgtccgcgaccacggcggcgtgctgttcgtcgatttgcgcgaccattacggcatcacccagtgcgtggccgatccggactcgccggcgttcgccgaggtcgagaagttccgctcggaatgggtggtgcggatcgatggccgggtgcgccgccgtcccgaaggcaccgacaatccggaactgccgaccggcacggtcgaggtctacatcaaggagatcgaggtgctgggcccggcggccgagctgccgctgccggtgttcggcgagcaggaatatcccgaggacatcaggctgaagtaccgcttcctcgacctgcgtcgtgacaagctgcaccagaacatcatgacccgcggcgcgatcgtcgactctatccgcaggcggatgaaggggcagggcttcttcgaattccagaccccgatcctgtcggcgtcctcgccggaaggcgcgcgcgacttcctggtgccctcgcgcatccatcccggcaagttctacgcgctgccgcaggcgccgcagcagtacaagcagctcttgatgatgtcgggcttcgaccgttacttccagatcgcgccgtgcttccgcgacgaggacccgcgcgccgaccgcctgccggagttctaccagctcgacgtcgagatgagcttcgtcacccaggacgacgtgttcgcggcgctggagcccgtcatcaccggcgtgttcgaggaattcgccaatggcaagccggtcacgaaaaactggccgcggattccgttcgccgaggcggtgcgcaaatacggctccgacaagccggacctgcgcaaccccatcgtgatgcaggaggtctccgagcacttccgcggctccggcttcaaggtgttcgcgcggatgctggaagacccgaagaaccaggtctggggaatcccgggcaagggcggcgggtcgcgggcgttctgcgaccgcatgaactcctgggcgcagggcgaaggccagcccggcctcggctacatcatgtggcgcgagggcggcgagggcgcaggcccgctcgccaacaacatcggagcggagcgcaccgctgcgatccgcgaccaactcggcctgaaggaaggcgacgctgcgttcttcgtcgccggcgatccggagaagttctggaagttcgcaggccttgcacgcaacaagctcggcgaggagctgaacctgatcgacaaggaccggttcgagttcgcctggatcgtcgacttcccgatgtacgagtacgacgaggagaacaagaaggtcgacttctcgcacaacccgttctcgatgccgcagggcggcctcgaggcgctgcagtcgcaggacccgctcacgatcaaggcgttccagtacgacatcgcctgcaacggctacgagatggcgtccggcggcatccgcaaccacaagccggaagcgatggtgaaggcgttcgagatcgcgggctatggcgagcaggaggtcatcgaccggttcggcggcatgtaccgcgcgttccagtacggcgccccgccgcatggcggcatggcagccggcatcgagcgcatcacgatgctgctctgcggcaccaacaatctgcgcgagatctcgttgttcccgatgaatcagcagtacgtcgacctgctgatgggcgcgccgtctgaggcgacgccgaagcagctgaaggagctgcatatccggcccaacccgccggctaaggggtaggtggccacctcgccccgcaagcagtcgcttgcgggccggacggtacttgcgcgatttcgaaatattagaaatatatctccgatttgcccgacgtgtcaagctggcggccgctatcgacagctggcggccgaacaccagtagccgccggctcctttgcatggggttgtttttcgatatttggcttacagccccgtcgaggcctcgatcttgaattgcgccagcgccgattgcggatcggtgttgagcagctgcatcagttgaagcgccggcgccttcgcgcgcggggtcagcttgatgaccagcgtctgccccggcgtctcgatgaactggctgatggcggtgatgagggctgtcgcatccggattgcctacgccgatcgcatcgccctgcgcctggatgctgtcgaggatggccttgcgcgcctcgtcgcggccgacgttccgggtgcgggcgaactgggcgaccgcgaggtcgatgacgccgaggtcgtggacaacaagctcgatcgtgccggtctcgatctgcgcggccgcgccgagggattccgctgcactggtcgagaatgcctcgcgcgacacgttgtcgagcgccaccctcgccgacgcattgagcaggcccgccatgtcgagcttgaccggctcgagcgcgaacgagcgtgacgtctcggtccaagcggcgccgagatcggcatcgaccgccattctgtcgatcccggcggcgaccagcgcctgctgctgcggatcggctgcatccagcggtgcagccatcttcgcgaccaacctcagcttgctggggatcgttccgacgaactggccccagtcaaggctgaacacatcgatgttgaccggcttgccggtggccttgtagggcgaggtgacacccttgatctcaacgccctcgatcagcggaaacagcgccagcgcctgttcaggcgacggtttctgcccggcgaactgtgccgacagccgcatgaggctcgcgacgtcgagcgccttcagcgcgaagcgtccgaccttgaaggggccgttcggcgcattgccgtcaagtccctcgaccgcgagctcaccgatcttgccgtgttcgaagttgaaccgcatcgaggacagcttgagcgggcccttcggcgtctcgaccgagagcccatgcatctcggcatttccgatggcggcgcccgagtaaaggctggcgaccttctccagcagttcacgcgcctgggccggagacggcggcgggctcccgggaggcgggaccatcgtcagcagcgccggcagctgcatccgcgacgggttgatcctgacgtcgtcgatggcgatgccgtcgagccgcatgttcaggccacgcgtggctgtgacggcatcgggcgtcacggtgatgacatagggacccgccgaaacatgcccctgaacccgataatcccggtcgtcgttggtcttggccggatcgaagatcgccgccgtcgcgccgacgtcgatatccgtcgcgacgatattggcgagctcgccggtcatcttgatcggcttgcctgcggccgtctggttgatcgtgaacgccaccttgccggtcttgctcgacgcgatctttccgtccttcatattttcgatggcaaggccggagtaatcgaatgtgccaccggcaccgtcgccgacatgggcggcggcactgaacgccatcgatccagtcaggctgggggcggtgaccgatgaggcgttgatgctcgcgagctgcgcgaacccaaaccggtacagttcgaagatcgacgacgaggcggggagctgcggcaagccggccggaccggaatagtccttcaccgtgatccgcggcgccttgtaggttatggaggcgatcgtgggcgtcgggctcgtcaccccgatctcgacgtcgccgaattcgacgttgctggcggagacccgcgccgcgtcggtttgaccgaggcctgccatcgtgaggctggcgatcttgacgctgaccggagattgcgtccccgactcagtggtgatgtccgaaatcgtgagggtacggctcttggtgtcgaaggcgatcttgccatggctcgccttggcgccggcggcacggatctgctcgaaggcagcctcgacgtcgcgcgtgacccggcgttgggcatagaggtcgaaaccgaaatagccaccggccgcgatgactgcgacggcgatcaggccgagcagaattttcttcattcggtcaactccggatcatcaagggaaaaaaattgccaaccggcggtcggaaggtgcagcatcgacggacgggcctgcccgggcctgttgacggggattgtatccgatgttgcatccaagcggctggacatgcttcacatccagctcgatttgccggacaactgacttttgcctggattagcacagaaacaagaaatttgggccggaaacgcggggagcatgcatgtcgtcatcgtccgaagaactccataatgcagcgctcgcttaccaccggctgccgcggccgggtaagctcgagatccaggcgatcaagccgctggccaaccagcgcgacctggcgctcgcctattcgcccggcgtcgccgccgcctgcaccgagatcgccaacaacccggccgaggcggcgacgctgaccgcccgcgccaatctcgtggcggtggtctcgaacggcactgcggtgctcggcctcggcaatatcggcccgctggcctccaagcccgtcatggaaggcaaggcggtgctgttcaagaaattcgctggcatcgacgtgttcgacatcgagatcaaggccgacacgatcgagcgcgtggtcgagaccgtcgccgcgctggagccgaccttcggcggcatcaatctggaggatatccgcgggccggagtgcttcgagatcgagacccaactcaaggagcgcatgaagatcccggtgttccacgacgaccagcatggcaccgccatcatcgtcgccgccgcgatcgtcaacggcctactgctgaacggcaagcaattgagcgatgtgaagatcgtctgctccggcgccggcgctgccgcgatcgcgaccctcaacctgctggtctcgatgggagcacagcgcaagaacatctgggtctgcgacatcgacggcgtggtctatgacggccgcaacaccacgatggatcgctggaaggcggtctatacccagaagaccgacgcacgcgtgctggccgatgtcattccgggcgcggacatcttcatcgggctgtcggcgccgggcgtgctgaagcccgagatggtcaagcagatgggggacaagccgctggtgatggcgcttgccaatccggtgccggaaatcatgccggaagaggcgcgcgcggcgcgtcctgacgcgatgatctgcaccggccgttcggactatccgaaccaggtcaacaacgtgctgtgcttccctttcatcttccgcggcgcgctcgacgtcggcgccaccgcgatcaacgaggcgatgaagcatgccgcggtggatgcgatcgcgcagctcgcgcgcgatccgccgtcggatgcggtggcccatggtttcgagagcggtgagacgcagggcttcggcccgggctcgctgatcccgagcccgttcgatccgcgcctgatcctgcgcatcgcgccggccgtggcgaaggcggcgatggagtccggggttgcaacgcggccgatcaagaatttcgacgaatattgcgccgagctgcagcgctacgcgttccgatccggcctgaccatgaagccggtgttcgccaaggccaagacccagccggtgcgggtaatctacgccgaaggcgaggatgagcgcgtgctgcgcgcgacgcaggtggtgctggaggaaaagctggcgcggccgatcctggtcggccgcccatcagtggtcgagaccaggatcaagcgcttcggcctgtcgatcaaggccggccgcgatttcgacctcgtcaatcctgaggacgatccgcgctaccgctcctatgtgcagtcctatatcgaccttgccggacgtcgcggcgtgacgccggaggctgcgcggacggtggtccgtaccaacaacacggtcatcgcggcactggctgtgtcgcgcggcgaggccgacgcgatgctgtgcggcgtcgaaggccgctacatgagccatctgcgccatgtccgcgagatcatcggcttcctgccgggggtcagcgactatgccgcattggcgctgatgatcacctcgaccggcgcccatttcctcgccgatacccaggtccggccgaatccgagcgcggaggaactggcggaagtggcctcgcttgcggcgatccacgcgcagcgcttcgccttcaagccgaaggtcgccttcgtgtcacattccgacttcggcagctatgatacggactcctcgcgcaagatgcggcgggccacccagctcctcaaggacaagcatccggagatcgaggcggacggcgaaatgcagggcgacaccgcgctgtcggccgcggcgcggcgcatggtgctgccgcaatcgcggctcgaaggcgaggccaacatcctgatcatgccgaacctcgatgccgccaacatcgcctatcagatgatcaaatcgctggccaatgcgttgccagtggggccgatcctgatcggtccggcgcgcccggcgcacatcctcacgcccggcgtgaccgcgcgcggcatcctcaacatgaccgcggtcgccgcggtcgaggcccaggagcgtgccggccgcgcgcagccgacactgttcggttgagcaggggactcaagacggattcgatttgatcgaagcaggctgggcggccataatcgtcgcgcctgcttcgtctgatttctgccatccagtgaggccgacccatgccagcattgatcaccttcgggcggattctgttcgccgtgctgttcctctattcgggagcaagcaagctgttcggcatccaggcgacggcggacgtgctcgcggccaaggtgacgattcctgcgatcgttgcgccctatgcgcagcagatcgagacctttgtcggcatgccgttcatgcagctgctggcgattgcggtcggttgctttgagatcctcgccgggctgatgatcgcggtgaacgtactggcgcggttcttcgcgctgctgctgatcatcttcgtgtgcgtcaccaccttctacttccacgatttctggaatcagccggcgcccgacaacctcaggacgctgatcgacgcgctgaagaacctgtcgctgatcggcgcgctgttcatcatcgccggctacggccgcggcccgcgccgcgacgatccggcgtatggggatgtgtaggacaatgcgcaattgcgtagggcggattagcgaatcgtaatccgccgaccggcacattgggtgcgagaggcggcgggttacgccttcggctaacccgccctacgagaaagtcttcaacctgcccgccgccacggtgtgacgctgacgtcgtgctctgcgtcgatcagctgcggcgcgccggggtgcaggccgtgcgctgatagcacctgctgcggggtgcgcgcaggcacgccaggaaagcacggctcgccgtcggggatgcgcaccttccacgcgaccgagagccagaacgtgtcgtagcggtccatgaacatgccgaacacgcggggaccgccgatgatcgcgaccatgcccgaggtcacgccggcctcgcggcgcgccgtgtcgaacgggcagccggcaggattccacagcagcgcctttggattggtcggatcggacgcgatcgccgcgaccttgccggtcaggatcaggcggcggcgcttcggcgcgttcggctgctcttcctgggaatggcggccgtgcacgacgaggtcggcgcgctcgagcgccgcggtgaagaattccttgtcgccttcgatcttgagttcgtcaggcatcacgttgtgcgcattggccagccggccatcggccgagacgatgacgaaaccctcgatacgcaactcagacaccgagacgatcgccggcgcttttactgatcgacggtggtgacgacgctgttgaccggccgcgagctcacggtcggcagcttgacgtccttggcgagatcctgctcgtattgcggcagcacggtcgccgggaacttggcgcgcatcgcgaccaccttgaagccgccggccttgagctgcgtcagcagcgtcggcagagcttccgcggtgtgcttctggaagtcgtgcatcaggatgatgcccttgccgagcttggcgagcttcttcatcacggtgtcgaccacctgttgcgagttcttcgacttgaagtcgaaggagtcgaggtcgcaggagaagatcgcgatgttccggttgccgagataggtgaccatttccggcggatgctgcagcgccgggaagcggaagaacggcgagggtgaggtctcgagcgcccacttcaccgcagcgaggccgcgctcgatctcgtctttcttctgatcctcggtcagcttcttgttgttcaggttctcgtgcgaccaggtgtgcgagccgacggtgtgaccggcggcatagacctgacgcaggatttcagggtgataggtggcgtgcttgccgatcgggaagaagatgcccgtggtgcattcgtccgccagcgccttcagcaccgccggcgtgttgcccggccaaggtccgtcgtcgaaggtcagcaccacttcatggtcgcgcaggaagtcgagctgcttgaaatgctcgaagccaaagcccggtccgcccgtcgtgtcgatctcgaccgtgcgggcaacgccgagcgcgttcggattgttgcaggcggcacgcgccggctgaggcgcttgcttcggcggcgcggctgcggtggctggcgcgggcgccgccgcggcaggcgctggagcggcggccgcgggagc

SEQ ID NO: 35 - DNA, 96551 bp, Bradyrhizobium enterica
gtccttcagagatctgtgcatgccctagggcgaaggccgggacccataccgcgtgatctatcgacgaaaggcgttggcagacaccttccgtataactatagccggtggttatgggtcccggccttcgccgagacgacggcggtggtgcaccgcgcaagttcatcttgcgctgcggcaaaaaaagcgcacactcgggaggagccgggcagcctctggagtagccacgccatgtctccccagactttgcctccccaaaccatgccctccgagaccgaaaaccgtgccaggcgcgccgaggaggccagcctcctcgataagacggcgcaggaggaggacgcgcggctccggaacgacatccggctgctggggcgcgtccttggcgacaccgtgcgggaccaggagggggccgacgtgttcgacctggtcgagcggatccgccagacctcggtccggttccaccgcgacgaggacaagctggcgcggcgggagctggaaggcatcctcgacagcatgtcgatcgccgagacactgcggatcgtccgcgccttcagctatttctcccacctcgccaacatcgccgaggaccagaacaacatccgccagatgcgcagccgcggcccgggcggggcgccgcggccgagcacgctggagcagacgctggtccatgcccgacaggccggcatcagcccggccgaactgcgcagcttcttcaagagcgcgctggtcagtccggtactgaccgcgcatccgactgaggtccgacgcaagagcacgatggaccgcgagatggagatcgccgatctgctcgatcgccgcgagcggttgcagatgacgccggacgagagcgaggccagcgacgagcagcttcgccgcgcggtcgtgacgctgtggcagaccaatctcttgcgccggaccaagctgaccgtgctcgacgaggtcgccaacggcctgtcgttctacgactacaccttcctgcaggaggtgccgcggctgcattgcgcgctggaggaccggctgaacaaggagggtggcgaggccggtgaactcgcctcattcctcaagatgggaagctggatcggcggcgaccgcgacggcaatccgttcgtcaccgcagaggtgatgcgcggcacgctgcggctgcagtcgagccgggtgctcagcttctacctcgaggagctgcacgcgctcggtgccgagctgtcgcttgcggcgcatcttgccgatatctcggaggagctgcggatccttgccgagcgttcgcccgacacctcgccgcatcgcagcggcgagccgtatcgcctggcagtttccggcatctacgcgcggttggctgccactgcgatgcggctcgaggtcgagaccacaaggccaccggtcggcaaggccgagccctatgcgaccgtcagcgagttccaggccgatctcgatgtgctcgaccgctcgctgatcgcgaacaattcaggcgtgatcgcgcggggccggctgcggcagctgcggcgggcggtggattgcttcggcttccatctggcgcggctcgacatccgccagaactcggcggtgcacgagcgcaccatcgccgagctgttcgataccgccaatcccggcatgtcgtatctggcgctcggcgaggacgcccgcgtcaatttgctgctcgcggagctgcgcaacgcgcggccgctggcctcgccgttcgtcaaatattccgaggagacccaaagcgagctcgcggtgttccgggccgcggccgaggcgcatgccaaattcggccccgaggtgatctcccagtgcatcatctcgatgtgcaagggcatgtccgacatgcttgaggtcgcggtgctcttgaaggaggtcgggctggtcaatccgtccggccgcagcgccgtcaacatcgtgccgctgttcgagaccatcgaggacctgcaggcctcgagcggcatcatggaccgcatgctggtgctgcacgactaccgcaagctggtcgacagccttggcagcgtgcaggaggtgatgctcggctattccgacagcaacaaggatggcggcttcgtcacctcgggctgggagctctacaaggccgagatcggcctcgtcgaggtgttcgagcgccacggcgtgcggctgaggctgtttcatggccgcggcggctcggtcggccgcggcggtggtccgagctatgatgcgatcatcgcgcagcccggcggtgcggtgaacggccagatccgcatcaccgagcagggcgagatcatctcgtcgaaatattccaatgccgaggtcggccgcagcaatctggaaatcctcgccgcggcgacgctggaaaccagcctgctgcagccgcggcagagcgcgccgcgccccgaatatctgagggcgatggaggagatttccgcgctcgccttcaaggcctatcgcgggctcgtctatgagaccccggggtttgccgattacttctggggctcgaccgtgatcaacgagatcgcgaccttgaacatcggcagccgtccggcctcacgcaagaagacccgcgagatcgaggacctgcgcgccattccctgggtgttctcctgggcgcaatgccggctgatgctgcccggctggtacggtttcggcgcggcggtcgagacctggatatcgcagcatccggagcagggcatgccgttcctgcaggagctctacaaggaatggccgttcttccgcacgctgctatcaaacatggacatggtgctggccaagagctcgatcgcgatcgcctcgcgctatgccgaactggtgcccgacgtcgccctgcgcgagaagatttttggccagatccgccgcgagtggcatctcgcgatcgagacgttgctcgacatcatgggccacgaccggctgctgcagggcaacccgttgctggaacgcggcatccgcaaccgcttcccctacatggatccgctcaaccacgtgcaggtcgagttgttgaaagagcatcgcgcgcagaacccggacgagcaggtgctgcgcgggattcagatcacgatcaacggcatttccgcggggttgaggaatagcggttagccactgaggaagagcgactagcctcaatgtcgtcccggcgaaagccgggacccgtaaccacaactggccgtgtcgtgaacggtttgggccccagccttttcgagcaatcaacagcggtgctaatgggtcccggcctacgccgggacgacgacagcatcagcagttgtgcgcgccccgtgtctccacatacaccgcgtagagcgactggctcgcggtcatgaacaggcggttgcgcttcttgccgccgaaggtgaggttggcgcaggtttccggcagcaggatctggccgatgcgttgaccgtcgggcgcgaacacctgcacgccgtcatagcccggtccgacccagccggcgccgacccagatgttgccgtcgatgtcgacccgcatgccgtccgggaagcccgacttgccgtccagcgtcatgtcgatcagcgtgcgcgggttggacagcttgtcgccgttgaggtcgtactgccagacgatgttcttggcgttcggataatgcgtgatgccggtgtcgcagacatagaccttcttgtagtcgtggctgaaggcgatgccgttcggtttgaacggctcgtccgcgaccttggtgatctggccggtggacgcatcgatgcggtagacggcttccttctggtagggctggttcgagccggtgttggcgcgctggccctcatagatcgagatcgcgccgtagccgggatcggtgaaccagatcgacttgtcgttgggatggacgaccatgtcgttcggcccgttgagctgcttgccgcccgcctgctccgccaatgaggtgacggttccgtcgtgctcgtagcgcaccagccgcgtgcgctcggcggtgatctgccttccctcgaaatcgaaggtcgagccgttggcctcgttcgacggcttgtggaactgctcggagatgtggccgtcatcgtcgagatagcgcaactgccggttggccggaatgtcgctccacaccagatactggccctgcgcgttccaggccgggccttccgcccacaggcagccggtgtagagccgcttgatcgcggtgttgccgactttggccttgaagcgcttgtcgtcgatcacgacgatgtcgggatcgggataacgctgcggctccgcattgcggccgtagtcgcgcgcggatgcaccggacgccgccatcgccgtcgcagcaagcgcggttgcaccgcgcaaaatggttcgacggtcgaacgccttcgttccgtcggcctcgtgttgctctgtgttgtttggatttgtcacgaagtcctcccaggctttttgttatggggaggacgatcatgcgcccgcaattctggcacaatgcgggcacgccatgaaaaaacaaccaaggagtgtgtcgcccccgcggcttcgcggaggcgactttttcataaaactgtcagatcggatcagatcgcaggatcagatcggatcccaggtgaagacatccgccgagcggtcgagcggggagaacgatgccttcagcgccggcatgccgtgttcggcaatggtctccggcgtccagccttcgccgcgatgcaccgagcgcaccggacgatgctggccgaacaggaagatctcgttcatgcgcacgccgaagatctgtccggtgacgtccttggcggcgtccgaaagcaggtaggcgcagaccggcgcgatcttctccgggcccatctgcttgatcttctcgacgcgcgccttctgggcgtcggtctcggtcgggatggtgccgatcatgcgggtccaggcgaacggcgaaacgcagttcgagcgcacgttgaagcggcccatgtcgagcgcgatcgacttcgacagcccgacgatgccgagcttggcggcggcgtagttggcctggccgtaattaccgatcaggccggaggtcgaggtgaagtgcacgaacgagccctgttcctgctcgcgatagatccgcgccgcggcgtggctgacatagaacgagcccatcaggtgcaccttgatgacggcctcgaaggcttccacgctcatcttgtggaagatcatgtcgcgcaggatgccggcgttgttgaccacgccgtcgagccggccgaaatgatcggtcgcggtcttcacgatcctgctggccggaatggcttccgccaccgactcgaaattggcaacggcggtgccgccgcgcttcttgatctcctcgaccacctcctcggcgggggccgcgctcgagccgccgccgtcggccgcgccgccgggatcgttgaccacgaccttggcgccttccgccgcacagagcagcgcgatctcgcggccgatgccgcggcccgcgccggtgacgatgatgactttatcctgcagtgattttgccatgtgggttctccgctttcgattgctctcttcgtcgtcattccggggcgcgcgaagcgcgagcccggaatccattttgccgcacgatggattccccgatgcgcaattgcgcatctgtggcctgcgcctgacggcgcatcccggaatgacgaatgactatttctcgttcgtaaagatgatcgtgcctgacgcagcgaacatgccgccgacgccgtggcagaccgagatcttggcgttcggcacctgcgcaggtgcaatgccgcgcatctgccgcacgctctcctgcaatgcgtacatgccgtacatgccggagtgcatgtagctgaggccgccgccattggtgttgagcggcagcttgccgccggggcgggtgttgccgtcggcgatgaacttgccggtctcctcatggggcatgaagccgaggtcgccgaggccgtacagcggcaggtgcgcgaaggcgtcgtagatcatcagatgatcgacgtccttgtgggtgatgccggcctccttgaacgccaggggacctgccaccttgaaggcgcgcgacgagtcgaacgtcttcatctggctgaccatcggcgtttcgacgctctcgccggtgccgaggatgtagaccggcttttgcgggaaatccttggcgcggtcggccgaggtgaggatcagcgcgccgccgccgtcggtgacgaggcagcattgcagcagccggaacggataggcgatcatccgcgagttcagcacgtcggcgaccgtgatcgggtccttcatggtcgcgcgcgggttcttcgccgcccattcgcgctgcacaacggcgaccatcgcgagctgttcatgggtgatgccgtgcgtcttcatgaagcgcagcaccgggatcgggaacatgctcggcggcccgtagacgccgaacggcgattcgaactgcccattgaggctgtcgggcgcggtgaagcgcggctgcttgccgatcatcgacttgccgctctcggcatgggtgatcagcacggtcttgcacaggccggcctcgatcgcggcggcggcgtggcggacatgcagcatgaaggagcagccgccgaccgaggtgccgtcgacccaggtcggcgtgatgccgagatagtgcgccatctgctgcggggtctcgaccgcggtggcgaagccgtcgatgtccgacagtttcagtccggcgtccgcgatcgcattcagcgccgcgtccgcgtgcagctggatctgcgacatgttggggatgacgccgagctcggtggtttcggccgcaccgacgacggcaacctggttcctgcgcatcgcgttaccctttcgccggacggaacaggggaagggtgatcttgtcgtcgagcgcctcgaaggcgacctcgagcggcatgtcgagctcgagcgcttccggcgtctgcgggcaatcgatgatgttgctcatcatgcgcggaccttcgtcgagctcgacgatggcgatcgcgtaaggcggcgtgaagccgggtgcggcgggacgatgattgatgacgtagctgtacagcttgcccttgccgctggccttgaataccgagaccttgcgcgaggcgcaggacgggcagaacggccgcggcggaaagtagacattggcgcaggcgtcgcagcgctgcaggcgcaactcgccggccttggtgccgtcccagaaatgctgggtctcaggtgtcggttttggtttcgcgcgcgctggctcggccatggctgatgtttcctcccgaagtcgttccggtcttgatgcgccatcggaccgaggcccgtcaacggtccatccatgccctgcgcagcggcctgtgtccggcgcatgccgcatattccgcccctcgcacaattgctaaggctgcgatgcttgtgtcgcctcgatccggcgcgtagaagggccgcgtccaacacggctccaagatacgttcgagacacgtccaagatacccgggaggaataatatcatgctgaggatcatcggcgcggcactcgctgccagcctcgcatttgccgcgcaggcaatcgccgccgacgcaccgtcggagatcaagatcggcacgctgtacgcgtcctccgggcgctacgcctcgatctcgatgccggtctacagctcgctgaaattgtgggtcgagcagaagaacgccgagggcggcgtcttcgtgaaggcgttcgacaagaagatcccgataaagctggtctcctatgacgaccagagcaacaccgcgaccgcctcgacgctctataaccagctgatcacccaggataaggtcgatctcctggtcgccgattccggatcggtgctgacggcgcccgcggtcgcgatcgcgcgcgatcacaagatgttcctgttcgaccagaccggcaccggcgcgagcttcttctccaaggacaatccttatatcgcgctgatggccgacccggtgtcgacgatctggccgaagccggtcgccgacttcatcagccatgacggccctggcctcggcatcaagaaggtcgcgatcctctacgcgaccaacgaattcaccggcacccaggccaatgcgttccgcaagttcgtcaaggattccggcgcgccgatcgagatcgtctacgaccagggcgttccgaccgagaccaccaactacaacgtcatcatcaacaacatcagcaagaccaatcccgatgcggtgatccatttcggctatgcgccgaacgacatcgccttcctgcgcaacgtccaggatgtcggcaccaagttcaagatgctgttcgcgatctatgccggcctcgagaccgagctgctggagaagaatgtcggcgccaaggggctggagcacatctggacctatgtgccgccgtccgagctggattatccggtcaatttcgggatgaccatgaaggatttccgcgaagcctggctgaagaaatacaacgacggcaagatggagttcggcttcaacgcggtggccggctacaccacggcgctggtgatcgagaagacgctctcggttgcgaccagcctcgaccagatggagctgcgccgcgcggtgttctcgctcagcggccagctcaagaccctggacggcaccttcgcgctggacgagaccggcggccagatcggcgaactgacgccgctcggtcagctcacggtcgacgagcacgaccacatcaagttcgtctcgatctacccgcacgagaccgccaccggcaagccgatctatccggcgccgtgatgcagtctgaagcggcaggcgtaaccttcggcggcgagcgctagcatgacctatgcgctcgttgccggcgtgctgttcgggctgtatttcagcctggtcggcatcggtctcaacctcgtgttcggcgtcatgcgcatcgtcaaccttgcgcatggcgacatcctgatgctcggcgccttcatcgccttcggcgtggtcggcatcgccgggatcgatccgctgttcgcggtgccgctggccttcgtggtcttcgtgctcgccggcgtgctgctttactgggtgctggtgccgcggctgcaaggctcggccaatccggaaatgctgtcgatcatcctgttcttcggcctgtcgcaggtgatcgaggcggtgaccacgatcttcgccggcaccagcgaacgctcgatccagagccggctgctcggcaccgtattctcgaccatcaaggtcaagctgttcggcggcaagccgggcgggacagggccgatccagatcttcggccagggctttcccgcgccgtgggtgatcgcggcgatcacgagcctcgtcgcgatcgggctcgtctacctctatctctaccacacgcggctcggcaccctgacccgcgcggtgatgtcgcgccgtgacgaggccctggcgaccggcatcgatgtcgatcgcgtctcggctgcggcgttcgggatcgggctcggcatcgcggcggttgccggcgtgttcgcgcccttcatgttcggctcggtgacgccggcgttcggcgccgatgcgacggtgacgtcgtttgccatcgtcgtgctcggttcgctcggcaatcccttagggacggcgctcggcggtgtcgtctatggcctctgctacatgctggtgcagacctatctcagttcctgggccgacttgctgccctatgtgttgttgatcgtgatcctgttgttgcgcccgagcggtctgctcggaaggcgggtgcgcgttgcataacgcctcgaaacacctgctgttcatcctggcgccgctggtggtggtgttcgcactgctgcccggcgtctatcaaaaccatctgctgctgttcaacttcgtgatcttcctgatcctcgcgcagggcgtgaacatcatctatggcttcaccggctatctgccgttcggctatgtcggcttcttcggggccggcgcctacggcttcgccatcatggtgatgcatctgcagacgccggcgccgctcgcggtgctggtcggcggccttgttgcggtcgcgctcggcctgttgctgacgccgctgctgcggctgtcgggggcgtatttcgcgatcgccaatctcgcggcctcgctcgcggtgctgcacttcgtcgccaaccccgcgctggaggggatcaccaagggcccgtacggcgtgtcgctcaccggcaccttcaacccgacccacgcctactacgccgccgtggtggtgatggcgctgacagtcggcgcggtggtgtatctgaagaactcgccgttcgggcttgcattgcaggccgtgcgcgaggatgcggtgtcggcctcgatggccggcgtcaacatcatcaagatgcgggtgatcgcctggctcgcctcggcgctggtcgccggtctcgccggcggcatctacgcctggtacgtctcggtgttctatcccgacaacgtgttctccggcgagttctcgatcttcgcgatcgtgttcgcgctgttcggcggcgttgccaccatcaccggaccgatcgtcggcgtgctgatcctctatggcatctacaacctgatcggcttcaccacgccgcaatatttccagctgatctatggcctgttgatcatgggactggtgctgttcctgcccgcagggctggtgtcgctggcaacccgcagggggtggcatgtcccctgagaaaaccccgatcctcaaggtctcgaagctggtcaagcgcttcggcggcttccacgcgctcgacggcctgagcttccacgtcgtgcccggcgagatactcggcctggtcggcccgaacggttccggcaagaccacggcgatcaacgtcatctccggtctctatgcgcccgacggcggcgaggtcgtgttcgacaatgtctcatccggcggcgtcgcctcgcacaagctggtccaccgcggcatcaaccgcacctttcaggtgccgaagccgttcctgtcgctcacggtacgcgagaacatccaggtggcgctggcctatggcggtgccaccggggcgcccgcgatcgccgaactgcttgaggatttcaggctgaaggaggtcgccgaccgtcccgccgccgatctcaacagcgcgcagcagaagatgctcgatctcacccgcgcgctggcgacgcggccgcggctgctgctgctcgacgaactcgcggccggcctcaacccggcggagctcgactggattgcgggccgcatcaaggcgctggccgcgaccggcatggcgatcatcgtggtcgagcatctgatgggcttcatcgaacagatcaccgaccgcgtcatcgtgctcaacgcgggcaaggagatctttgaaggcacgcttgccagcgcggtgcgcgagccgcaggtgattgaagtgttcctgggaggcgagcatgcccactgatgcagcttcgcttctcgacgccaggggcgtcgatgccggctacggcaccatgcaggtgttgtggggcgtcgatctcgacgtccgccccggcgagaccgtgctgctgctcggcgccaacggcgcgggcaagaccaccttcctgaaatcgctggtcggcctgatcgaagcccgcagcggccacatcaggctcggcggcgaggacatcacgaagatgcgatcgtcggatcgcatgaagcgcggcatgacctacatgtcggagcttgcggtatttcccgatctgtcgatcgaggagaacatccgcgtcggcgcgcaggcgctcggccatgccaatccgggtgcgcgggtcgacgaactctacggcctgtttccggtgctgcgcgacaagcgccgcgatccggcctccagcctgtccggcggccagcgcaagatgctcggcatcgccaaggcgctgtcggccgagccgaagctcttggtcatggacgagccctcggccgggctgtcgccgctgttcgtcaaggaggtgctgcgggccctgtcgagcctgcagggccgcggattggcactcttgattgccgagcaaaatatcggttttctagagattgccacccgcgtattcgtgctggaaggcggacgcatccgcttctccggcacggttgccgagatgagcggcaatgaagagctgcaccgcgcctatttcggactgaagtgacccggatcggcgcaggctattcgggcgacaacgagccccaactgtgaagtgaaagccatgccgaacaacccgacgctcgcctcccttgccgccgatctcgccagcggcgcgacctccgcccgcaagctcgtcgagcaatgcatcgccaggatcgccgatcccacaggcgagggccagcgcaccttcatccatgtcgatcgcgaggcggcgctggaagccgccgatgcgatggaccggctgcgcaaggccaacgccgcgccgtcgccgtttgccggcattcccatctcgatcaaggacctgttcgacatcaaggggcaggtgacgcgcgcaggctcccgggcgctggaggattccgcgccggcggaggccgatgcgcccgccgtggcgcggctcaagcgcgccggcttcatcgtgatcggacgcaccaacatgaccgagttcgcctattcgggcatcggcatcaatccgcatttcggcacgccgaagagcgcctggaaccggagcgtcggccatgtgcccggcggctcgtcctcgggggctgcggtctcgatcgccgacggcatggcgttcggtgcgctcggcaccgataccggcggctcctgccggatcccggccgccttcaacggcatcgtcggctacaagccgacgcagcgccggattccgcttgccggcggcgtgccgctgtcgttcaccctggacagctatggcccgctggccaattcggtggcctgctgcgccgcgctcgatgccgtgctggccgacgagccggtgacgccgatcgcgccgcgcccggtcaagggcatgcggctcgcggtgccgactacggtcgcgctcgacgatctcgacgatgccgtcgcaaagaccttcgagcgtgcactggcttcgttgtcgcgcgccggcgccttgatcgaacgcatcgaggtgcctgaattgctcgatgtcggcgtgatgaataccaaaggcgggttctccgcggccgagagttatgcctggcaccgcttcctgctggcgagcaagggcgacatctacgatccgcgcgtcgccgtccgcatccagcgcggcgaaggctttccggcggccgactatatcgacctcatcaacgcgcggcgctcgttcatcgcccgcaccgaggcgcggattgcgccctttgatgcgatggtgctgccgaccaccgcgaacctgccgccgaccattgccagcctcgccgacgacaaggcgttcgccaccgagaatttgcgcgcgctgcgcaatccttcgctgatcaacgtgctcgatggctgcgccatctcgctgcccgcgcatcgccagggcgaagcgccggtcggcctgatgctcgccgccgcgggcggttcggatcgccgcatcttcgagcttgcggccggaatggagaccgtcatccgtgtttgatctcaccttcaatgtcgacgataagggcgtggcaacaccgctcacgctggaaatccggcaagccgtgatcgccggctggaccggccgtgatccggtggcgcgcgacaagcacatcgccgagctcgaggcgctcggcatcgcccggcccgcgacgacgccgatctattaccgctgctcggcgcgccggcttaccttcgcggatgcgatcgaggtctgcggcgaggagtcgagcggcgaggtcgagttcgtgctgatcggctggcagggccgcatcttcgtcggctgcggctccgaccataccgaccgcaaggtcgagagctacagcgtcaccgtctcgaagcagatgtgcgacaagcctgtcgcgtccgagctctgggagctcgaggatgtcatcggccactgggaccagctgatcctgcgctcctgggccacgatcggcggccagcgcgtgctctaccaggaaggcaccctcgatcacatgctgccggtgaacgacctgatcgcgcgcggcttcgatggcggcaagctgcccgacggttgcgccatgttcggcggcaccttcgccgccaagggcggcatccgaccggccagccgcttcgagttcgagctggaagacccggtgctgaagcgcaagatcagccacggctacgacgtggtgacgctgccggtgctgtggccccagccttcgccaaacgcgaagcggtggttatgggtcccggccttcgccgggacgacgggggagcttggggcgctgtcccggatattacccgccggaaatcgggtggcgcgggccgcgatcatcggccagattccgccccatgacagcaacagccaaaaccctcacccgcgcatccaccaacagcctcgcccgcatcgacggactcccctgggaccagatcacggccgacctcgacgggcagggctgcgccgtcctcaatggtctgctgacaccagcggaatgtgatgccatcgccgcgctgtatcccgacgacagccggttccgtagccgggtcgtgatgggccgccacggctttggccgcggcgagtacaaatatttttcctatccgctgccggacctgatcgcggagctgcggccggcgctgtatgcgcggctgaccgcgaccgccaatcgctggaaccagacgatggggatcgagatcagctatcccccgtcgcacaccgcgttcctcaaacgctgtcatgacgccgggcagacgcggccgacgccgctgctgctgcaatatggcgacggcgactacaactgcctgcaccaggacctctatggcgagcacgtgtttccgatccaggtcgcgatcctgctgtcgcagccggggcgcgatttcaccggcggcgagttcgtgctgaccgagcagcggccgcggatgcagtcgcggcccgaggtggtgccgctgaccaagggcgatgcggtggcgtttgccgtgcatcatcgtccggtgcaggggacgcgcgggccgtatcgtgtcaatctgcgccacggcgtcagccggatcaggtccggccatcgtcacaccgtcggtgtgatcttccacgacgcgaagtgagtgcgagagagtggccgctgatctgttcgagagcatcggcgatgcgaggccgccgcgcgagacgatcgcggacggtgcagtgctgttgcgtggcttcgtccggccgttcgaggctgaactcattcccgctttgcgcgcgatcgtgaagcaggcgccgttccgccatctgatcacgccgggcggccaccggatgtcggtcgcgatgaccaattgcggcagcgtcggctgggtctccgatcccagcggctatcgctacgatccgatcgatcctgatacggggctgaattggcctgtcatgccggaggtgctgcgcaggctggccgccgctgccgctgatgaggccggcttcaccggcttcaccccggaggcgtgtctgatcaatcgctacgtgcccggtgcaaaactgtcgctgcatcaggacaaggacgagctcgattacggcgcgccgatcgtctcgatctcgctcgggctgccggcgaccttcctgttcggaggtctcaaacgcagcgacaccccgcgtcgctatcggctcgaacatggcgacgtcgcggtgtggggcgggccgtcacggttattttatcacggtgtggcgccgcttgccgacggcgagcacggcgtgctcggccgccagcggatcaatctgaccttccgcaaggtgcgctagccattgcgcggcggcgggcggctgcgcaatttcggaataatggaaatgtgccactgagttgcccgacgtgtcaagtgcctttccgagtgccggcggaacgcctgctgctttgcatggggttgttttcgatatttttggcagcgcgtagctttgcttggtcgcttcagccaggctgaaggcctcccgcaaagaggagagctggtctaaactctgcatatgaccaccagggccgaccgcgcgatcaaccgcaccggcgtctatctcgccgtgctgcaactcgtgttcacgctgggctggaccacctacctgatctacctgcccaagctgtgcgccgaagttggcatcgcgccttcaactgttatcctgatcctgatgatggaccaggccatcttcaccatcacggatacggcgatgggcatggcagccgacaggatctcgatcctggtcggccgtctcggcctgttcgtcggcatcctcgccgcgatctcctgcgccgccttcatcgcgctgccatacgtcgccggcaccgggccgggcgcaaaggtctggctgatcgccttgatcgtgatctgggctgccgcatcgtcggccttgcgcgcgccgccattgacgctgctggggaagtatcgcgcgcaaccttccgtcccgttcctcgccgcgctggcgatgctcggctacggcattgccggcgcggtgtcgccctatctcggcgtcgtgctgcgcgatcatgatgcgcggctgccgttcgtgctgtcgggtgccgtgctactgttgaccgcgctggcgttctcagggatcgagcgccgcgtcgccgcggaggtgcagccggagcggcttgcgtcgccggcaaggcggcttggaacggtgccgatgttgatgatcgcctcgatggtgctgctctcgctcggctatcaattgcacttcaacatcaacagtgcgccgttctatctgcgtttcgccaaatcggacgatctgcaatggttgatgccggtgttctggatcggcttcaacatcgcgatgtttccggcgagcatcgtcgtcaagcaccgtggcgggctgatcgtgatgggcgcagcggggctgctcggtgccttcgccatcgtcgccgcggagatcgccggcagcctcaacgtcctgatcgtggcgcagttcatggcgggagctgcctggggctgcatgctgatgagcgcggtgtcggccgcgcttgcgatcggcgagaccggcgccgaaggcaaggtgacgggcctcgtgttctcggcgctcgcgcttgcgaccttcgcgcggatgaccgcggtcgccggcggcctgcagaagctgcctgattatgcgccgctggtgcactgggcgccggtcgcctgctggtcggtcgccggcgccggcctgctcgtgatcgccgcgtcgcggctgcaacgcggcgtgaagagcgtttagttgtttcttgccggatgaatgaacgcccagggagagacctcggaatcggtcggcacttccaccgagatcacatatgggccgccatcggccagtgccttctccagcaccgggcggaagtgatcgggcgaggtgacgcgtgcggccccgacgccgaaggattcggcgagcttgacgaagtcgggattgaccaggtcggaggcgacgacgcggccgtcgaagcgctcgcgctggtcgcggcggacattgccataggcgttgttgttgaacaccagcgtcaccacgccgatcttgaactgcaccgcggtggcgagctcctggacgccgaacatgaagccgccgtcgcccgtgatcgcgaccaccggcttgtcggggttggcgaccttggtgccgagcgcggtcgggaagcccgaaccgagcgtgccctgatagcccgaggtgacgaaggtgcgcggctcatagatcgggaaaccgtaccaggaggcgaagccgacttgcgacaactcgtcggtgacgatggcgttcgccggcagcacctcgcgcaggatcttcagataggccatctgcggctggatgcgctggatctcctgctcggtcgctgcggtcgcttcgcggatcgcagcacggcggcctgaggtcttgctgtagccgaccttgcgcacggcggcgacgagatcggcggtgccggccctggcgtcggcgatcacgccggcgtcggccggccagcgccgcagctcgaccggatcgatgtcgatgcgcacgcatttcagcccggccggctgataaggccagcgcgacatcgtcggcagctccatgcgggtgccgatgccgatcatcaggtcggtcttgggccacagcttgtaggccgacgccatggtgagcccgagctcatgcgcgttggagacgatgccgcggccgctgcggaaggcgacgacaggcgcgtcgatcatctcggccagctcgaggatctcctcgcgcgcctcgatggcgccgctgccgacgaagatcatcggcgccttgctgccggcgatcagatcggcggcctgcttgatgcggtcgggatcgggctgcggcgccggcaatgggtcgaacggcttgacggctgcgacctgggtgcgctgggtgaagacatcccacggcatctccagcgacgcgggaccgcgccggcccgacagcatctcctggaacgcgcgcgacaccagcgcgggcgcattgtcgggatattcgatccggtcggcccatttcacgaaggtgcgcagcgtcgcgagctggtccggcatctcgtgcagatggccgcggcccttgcccaggaattgcgtcggcacctggccggtgaggcacagcaccggctcgttgcagccgaacgcggtgagcagcgccgccgaggcgttgagcacgccggggcccggcaccacgctgaacacgccgggtttgccggaagagcgggcatagccgaacgccatgtagccgcaggcctgctcgtggcgggcgccgatcaccttgagctgcgcctgatggaaagcatcgaacaggccatagatctgcgcgccgggcaggccgaacacggtgtcgacgccgtgagcgacgaggccgttgacgatcgcttcgccaccggatgttgaggtcatggcactgtccacttgcttgcggggttagttggcttcgtcgacgacgctgttgcgcaggatgccgacgccttcggcctcgacctcgacgacatcgccgggcttcagatagcgcggcggatcgaaccgcgcccccgcgccggtcggcgttcccgtgacgatgatgtcgccgggaaccagcgtcgtgaaggtcgagatgtagttgatgaggtagcggaagccgaagatcaagcgcgaggtgcggtcgtcctgcctgacttcaccgttgacgcgcgtggtcagacggacatcggcgatctgcgcttcgtttgtataaggcacgatccacgggccgagactgccggtggaatcgaagttcttgccttgggtgacgttgaatttggcgtggcgtacccagtcgcggatggtgccttcgttgcagagcgtgatcgcggcgatgtgatcgagcgcggcgccttccgcaatgtgccggccggccttgccgatcaccagcaccagctcgccctcatagtcgagctgcggcgaggcccgcggccgcaccaccggcgtgttgtggccgacgaacgagcgcggcacccgcaggaacatgctcgggtatttcggtgcgtccgagccgtccttgtactcggcattgcggtccggatagttgacgccgatgcagatgatcttgtccggcgccgggatcggcggctgccaggcaaccgcgtcgagcgcgtggtcgggcgatcgcttggcggcgtcctccacgagcttggttagcgcgccggcggcaatcgcctcgcgcaacgtcggatagtccttggcgaagcgtgacgagagatcgacgatgccattgtcagtcacgacaccgtagcgggtggcaccgtcgatggaataggtggcgaggcgaggggcgggcatcagcaatccattcgttggtgtcgtcccggcgaaagccgggacccatactccgcggccattaaaaggggcacgcggccagacattcgttcagcgactcaattcagtggttatgggtccctgctttcgcagggacgacgagtagatgaaggcgtgactagtccgcaaccagcacgtcggcgacgaagcgcggctcgcgcaccgcttggccggcgaaggtcgaaccttcctcgaaccaggagcgcggcgccggcgcgccccacagcgtctggcggcgcggatcgcgcagcgaccagcgcagcggctcatggtcgtgatcgccggtgaaatagtcgctggtgtagagctcgatgcgatggccgtcgggatcgcggatatagaggaagaaggcgttggagatgccgtgccggcccgggccgcgctcgatgttcttgaggaagccggaagacgccatcacgtcgcagagatgcacgatgttcatcgcggtcggcacccaataggcgatatggtgcaggcggggaccacggccgttggtgatggcgaagtcgtggacgttgcccttgcggtgcatccaggcggccgcgatgcggccgttgtcgccgtcctcctcggcatattcggtgaggcggaagccgagccgggcgtagaaatcgacggtgtcctgcacttcggcggcgaacacgttgaaatggtcgagccgctgcggatggcagcccttgtagagatcgtagcgccgcaacagatgcggacgcttctccatcgtggcgtagagctcgatctggaagccgaacggatcggtgaactgcagcgtgcggccctggaacggctgctcgacgaaggcgtagctgatgccgttttcggagcagaaggcggcggccttgtcgaggtcgccgtcattgccgaccttgaagccgagccggttgcaggcggccttcgccgccttgcgcagcaccaccgagtgatgctggtgctcctcgctggcgcgcagatacaccgacttgtcgtcgcggtcctcgatgtggaggccgacggtcttctcgtagaaggcggcgctcttgtcgagatccgtaacgtcgagcaccgcgtggctgcagcggatgatgttgaacggcggatcgaaaacgtgggtcggagcgggcatcggtgtttcctcaattttgtggtccgtcattccgggctcgccgccaagcgtcgccccgcaatgacagtgctggttaaattcccagtttctggatcttgtgcgtcccgcgcgcgagcgagacgtgcttggtttccatatagaagtcgaacgagtagtcgccgccgtcgcggccgatgccggacgacttcatgccgccgaacggggtcggcaggtggcggacgttttccgagttgagccagatcatgccggcttccagcgcatccgcgacgcgcagcgcgcggcccatctcgccggtccagacatagccggtcaggccgtattgcacgccgttggcgatctcgatggcctctcgctcgtccttgaacgggatcacggtcaggaacgggccgaacacctcttcctgcgcgacgcgcatgttcgcgttggcaccggtgaccagcgtcggctgcacataatggccgccgccggggccgtcatgcggcttgccgccgaccgcgatcgtggcgccatcctttttggcgacatcgaaatagctgcacaccttggcgaggtgccgctcatggatcagcggcccgatctcggtcgcgggatcgaggggatggccgaccttcagcgccttgacgcgcgcggtcagcttctcgacgaacttgccggcaatgctctcctgaaccagcagccggctcgacgaggtgcagcgttcgccattgagcgagtagatcatgaacacgacggcatcgagcgcgcggtcgagatcggcgtcgtcgaacacgatcaccgggttcttgccgccgagttcgaaatgcacccgcttcaaggtaggcgcgccctgcgccatgatcgccgagcccgtcgcgctttcgccgacgaagccgatcgccttgatggcggggtgctctgtcagcgccttgccggcctcttcgccgaagccgtgcacggtgttgagcacgccgtcggggaggccggcctgcttggcgagcttgaccagcatgtcagccgtcaccggcgaccattccgccggcttgtgcaccacggtgcagccggcggccagcgcgggcgcaatcttccaggtcgagagcatgaacggcgtattccacggcgtgatcacgccgaccggtccgatcggcacccgggtcgagatattccagtgctcatcagagggcgtgttgaggccgtcgcgggcctcgccgcatttgtcggcgaagaagcggaaattctccgccgctcggatcgcggccttggccatgaagcggtgcgcctggccggtatcgatgcattcgagcacggcgatgtcgtcggcgcgctcctcgatcgcatcagcgacgcggtgcaaaagcttgcggcgctgtgccgccggcatgtcgcgccaggccttgaaagctttggctgccgcggttgcggcacggtcgatatcctcggcattgccgcgtgcgaccgtcgccagcaccgcaccatcgaccggcgatttggtctcgaaggtctggccggaagccgccggaacgaccttgccgtcgatcacgttgccgatgccatcggccttcaacttcgcgagcaggggaccggcgcgatcgcggttggcctggaacacgtcggctgacgatttcgctgtcgctttatccattgaccgtctccaccttcagtgcgtcgtggatgttgttgcgtttccagctggtttctttgtcgttgatctgcatgtcgaacgacagagcgaacttgctgttggcgaataccggatcgagatgggccgatagcgccttgaagatgtgttcgccggcccgcttgcgggtggcgaggtcgcggccttcaccgagccgcagcaccatgtcgaggaagccgtaagtcttacggccgtcggcgatcgcgtaatgctcgcacctgacggcgcgaacacggatgccgccgagcgggaagatgccggtctcgaccgcggccttgcggaccatctcgaccgtggcgcccatgtcgacgaggccgtcgagattggcggagtattcaattgtgaaatgcggcatgcagcgctcctgctgagtgcgtcaggcgaagtagcagctcacggaaccataaggtccgtaatcggcctggatggtgtcgcccttgcgggtctcgatcgggcggatgaacgagcccgccagcacgatttgaccggcctccagcgccagcccgttcggcgcgatcttgttggcgagccacgccaccgcggtcgccggatgattcaacacgccagcggcgagaccggtttcctcgagctggccgttgcggaagcagagcgcaccgatccagcgcagatcggcctccagcgggcggatcggccggccgccgagcacgatgccggcattggcggcgttgtcggcgatggtgtcgaagatcttgcgcgtcgccttggtctcgggatcgacgcgctcgacccgcgtatccaggatctccagcgccggcaccacgaagtcggtggcgttgagcacgtcgaacaatgtgcagttcggcccggccaggcggtgcttcatcacgaaggcaagctcggcctcgacgcgggttgcgatgaagcgatcggtcggcaccaggccgccatcggcaaagaacatgtcgtcgagcaggatgccggaatcgggctcgtcgatattgagcgcgctctgcatcgccttcgaggtcaggccgatcttgtggcccttgacgatgcgcccctgcgtcaccttcatctcgacccaggccttctgaatcgcgtaggcgtcttcgagggtgatgcgggggtattccagcgatagctggcggatttgcttgcgggtcttttccgcgttgtcgagccgctcggcggcagcgcggatatcgtccttggagagtgccatgcgtgctacacaaaaatggatgccgggaaatgattaacatgttaagtgatttcccgcaaactgaatcagcgtatgttgcggtgcaaaaggttgcggcggcggattaggtgatggcgcgcaagaaattgtcgaacgagacagggcaggagcagggtgacgacacatcgtcgcgacgtggcccgatgcgcgaattctcacgttcgctgccgatgtcgctgctccgtgcgcgcgaggcggtgatgcggcagtttcgtccctcgttgcgcaatcacgggctgaccgaacagcaatggcgaatattgcgtgcgttgaccgcggtcgacgagatcgaggttaccgagctcgcccgcgtggcgttcctgctcggcccgagcctgtcgcggatcctgcgtgacctcgagggccgtgcgttgatcgagcgcaaggcggcggagaacgacgcgcggcgcgcggtggtctcgatctctgccaaggggttgaagctgatcgaggcggtggcgccgacgtcggaggcgatctacgccgagatcacgcgacgatatggcgcgcgcaagcttgccgagttgcacgaaatgctgggtgtgctggaggcaagtctggctggaatgggctcggccgatgacgccgacgtcgaggtcgacgagtagctgcgatcatgcgcgcggcgatgcgagctcaggtcatatagggcacgcgcgagatcacgttgatggcgcggaattgggcgatccagctggcgaccttcgagtgggaccactcgatatgccggcgcaagatcgcggctgccgcatcgccgtctcgcgcgcgcaacgcttcgatgatcaccagatgctcgtccatgaaggaatcgatctgcggcgcagtcagcgcgacttgaatgtgctttccgatcgcgaacgcgcagtgggtgcgcttgagcgcctcgatcatctcgcgattgataccatagcccaggcagcggatgtgcaggtcgccctcgatctcgtcgagctcgccgacaccgacgcgactgcggaattgaattccctcgcgcagccgctccgccatccggtcaagcagcgcggcaggaattttcgcggtcgcggatttgagcagcagcggttcgagggttgcgcgcacctcgaagatgtcgcgaaggcgatcctcatccagtggcaccacgtaccaatgcgccttggcgcctttctcgaggattccgatcgcctgcgcgcgtagcagcagattgcgcgccaccgtgcgcccgacccggaagtgccgcgccagcgcgagctcgctgacgcggaagcgtccgaacagcgaccggtagatgacctcgcgttcgagcttgtaatagagcgtgtcccaggcgtcgctgcgcaccgcctcgaccgggccatcggtcagcccgaacatttccggtgtgatcgggacgcgccgtggttcgacctggcgcttgccggcgatgacgccgcggccgtcgaatcggcgcaccaggccgatatccgccagttgttcgaaagcctgccgcaccggggagcggctggagccgaacaaggtcgcgatcgccgattcggagagcaccgtgccgggcggcacgtcaccggcccgaatgtgctttgccaatgcgctcttgatcagcgcgtaggccggctgtttccgtctggtctgcgatttcgctttaggaatcgacatcgatggctgcccgtcggccacattatcacgtgatcgcgtcatctcgctggtagcaggcattcacgcaccgttgccagaacttttgactattgcgtgcaatgtgcaatcgtggttagctgcgccaaacgccagattgatggccgctgctgcgcgtcttgtgcgctgcagcgggcctccacgtttgttcggcgcgccaatcgacggtcgcgggtagggcaacagatcgacgcgtcagctcgtctcaacgcagccgacatgcaagttcggcgcaccaaagggaggattgaatgaaactgacgaggcgtgaattttccgccggcttggcggcaggtcttgctgctcccgccttgatgcgtagcgcttgggcgcagggcgcgaccatcaagatcggcatgtgcgtgccggtcaccggaccggccgcggagcagggcctgtgggcccagaacggtgccaagctggcgctggccgcagtcaacaaggccggcggcgtgctcggcaagcaggtcgagctcgtgatcgaggacgaccagaccaccaacccgggcatcgtgctggcgttctccaagctcgccgcacaatccgacatcgtcgccttcctcggctcgatccgctcgacccaggtgcaggcgatggcccccgacgtcatcaaggtcggcaagcccgtgatgatcggcggcaccaatcctgatctcacccattccggcaatccctggctgttccgcttccgcccgaacgacagttattccggccgcgtgatcgccgatttcggcgtcaacacgctcggcaagaaaaaatgggcgatcgtccattccaccgacgccttcggcaccgcgggcggcaaggcgctcaccgaggcgctgaccaagctcggcgcgccgccggtgctcgaccagggctatgccaaccagagccaggacttcactccggtcgtgctcgccgtgaagcagtccggcgccgatgtgctcggcacctacttcaccttcgagaacgacctcggcatctttgcccggcagctgcgccagctcggcgtcaacatcccctgggtcggctcgccctcggtggtggcagtgtcctcgaccaagctcgccggtcccgcgctgttcggcacctacggtgtcgccgacttcgccgaagactccagcgccaccgcgaaggcgttcggcaaggcctatcgcgatgcctacaagaccgcgcccgacaaccagagcgcctggccctatgacgcgatcaccatcctgtcggcggcgatcaacaaggccggctcgaccgatccgaccaagatccgcgaggccatcctggcgacgcagaaattcgccggcgccgagggcgagtacaatttcgacaagaacggcgacggcctgcacggctacaatgtcgtgaagaacgagaagggtacgatcgtctacgacaagcacatcgacttcaacgactgatctgaaacggtcagggaggcacgaatggatgggttccctccccccttgcgggggaggggtagggagaggggtaagccgcacgggcggaattcgtggtttacccctctctctccaactctcccccggggcaagtcgggcctgcccgacttgcccaaatttacgatgcgcaaccgggatagaccccggttgcgagggggagagagccctgccacctcccgtgtagcgctaacacgacaacactccgatccggccggtgccgggatatttgcttctgcttcaaccgagcgctgtcatggatctagttctgcaattgctgttcaccggcatcggcatcggcgcggtctacgcgctggtcgcgctcggtttcgtgctgatcttccgcgccaccaacgtggtgaacttcgcgcaaggcgaattctcgatggtcgccgcctatctgatggtggtctgcgtcgagctcgggctgccctactggttgtccttcgtgatcgcgcttgccggtatggcgctgctcggcgtcgtcttcaatctaggcgtctactatccgctgcgtcaccgcacctatctgcctgtcatcatcgccaccatcggcgcctcgatcctgctgtcgaactcggtgctcgcgatctacggcccgcagccgcaggtgctgcaaggctggttcgatacgcccggcatccagctcggcccggtctatctcgacagccagtatcttctgatcatcggcgttacgatcctgctggtgctgttcaatttctggttcttcgagaagacgctgctcggcaagaagctgcaggcgacctcgcaggacaaggaaatggcctcgctgctcggcatttccgtctccaccatgatcatgatcaccttcatctattcggcggtgctcggcggcctcgccggcatccttgtggcgccggtgctgttcgtctcgatccagatgggctcgaccatcgcgctgaaggcattcgccgcgaccatcatcggcggcttcggtgacgtcgccggcgcgatcgtcggcggcctcgcgctcggtgtcattgaaaccttcggcgccgcctacatctcggtgccgtacaaggacggctttgccttcctggtgctgatcgccttcctggtgttccggccgcagggcatcttcggcgaacgcgtcgcggagaaagcatgagcgccagcgacaacatgattccggcgcctgccgtgcgctcgaaaccgctgatcattcggcacctgccgtatttcctgggcgccgcggcgctggtggcgctcgccgccagcatgcagttcgacggctacgtgctgaacatcctgctccaggccacgaccttctcgatcgcggtgttcggactgtcggtcgtgctcggcctgtgcggacaaatcaatctggcgcaggccgcgttcttcggcttcggcgcctatgtcgtcggcctcgggactgccgacctgcatctgaacttctggctctgcctggttggcggctgcgcgatcagtttagtcgccggcgctttcctcggcatgtccacgctgaggctcggtggccattaccttgccatggtgacgatctcgttccagcagatcgtgacgctggtgatgatcaacgccatcggcgtgacccacgggcctgacggcgtcgccaatatccgccggcccgagctgttccagtcctcgcaaagctacctggccttctgcgtcgcgatgctcgccatcgtcggctatctggtctggcatctgcccgacaccaagcttggccgcgccatgcgcgcggtgcgagacaatgaacttgcggccggcgtcaacggcatcgatgtgttccgtaccaaggtctccgcctttgccgtctgcgcggtgcttggcgggctggcgggcggcttgttcgccggcggcttcgcctatgtcagtccggaccagttctcgttcgcggaatcgatccagttcctgaccatgtcgctgctcggcggcgtggcctcgccgatcggttcggtgatcggcaccggccttctgatcctgatcccggaatggctccgtttcctcaagagcgtgcccggcctctacctcgcgatctacggcctgtcggtgatcctgatcatccgcttcatgcctgacggcatctggggcttcgtgtccgacgcgttcacgcggatgcgcgcgcacagcaaggcgccgcctgttgccggagcgctgcagctcaaaccggcgacgacgggcggcgacatcgtgctcgaagtctccgggctgtcgaagcatttcggcggcctcaaggcggtcgacggcgtcgacatcgcggtgaagcgcggcagcgtgcatgcgctgatcggacctaacggctccggcaagacgacgacgctgaacgtgctgtccggtctctacaaggcaacgtcgggcaaggtcgtgctcgacggcaccgacatcaccagcatggcgccgcatcagcgcacggccgcgggtctcgggcgcaccttccagaacatccgcctgttccgctcgatgacggcgctggagaatgtcgagatcggcgccgagcgtcccggcaacaccatgatcgggaagggcgacgaagcgctgaccgagcgcgcgatggaggctttgaccttcgtcggcctcggcagccgcgccaacgaactgatctcgagcttctcctacggccaccagcgcctgatcgagatcgcgcgggcgctggcctcgaacccgaccttgctgctgctcgacgagccggccgccggtctcaactcgaccgagaagctcgagctgcatgagctgctcaagcgcatcgcggcgcagggcctcaccatcctgattatcgatcacgacatgacgctggtctcggaagccgcccagcacatcaccgtgctgaacttcggacgccgcatcgcggacggcgagtccatggccgtgctgcgtcatcctgacgtcgtctccgcctatctcgggagcgaatgatgccgctgctcgaaatccgcaatctggtggtccgctacggcgagatcgaagcgctgcgcggcgtcaccatcgccgtagagcaggggcaagtggtcacgctgctcggcgccaacggcgccggcaagtcgacgacgctgcgcgcgataagcggcctcgccaagcccgcctccggcgacatcctgttcgacggtcactcgatcgccggcctcggcccggaggcgatcgtccggctcggcatctcgcatgtgccggaaggccgccgcgtgttcccgggcctcaccgtgaaagagaacatcatgctcggcgcgtcgaaccggaaggtttcggcgtcgcagatctcgcgcgaggccgatgcgatgttcgacctgttcccggacatccgcgccttttcgaacgcgctgggctggacgctgtccggcggccagttgcagatggtcgcggtggcgcgcgggctgatggcgaagccacgcctgctgctgctcgatgagccgtcgctcggtctcgcacctgtgattgtgcaggcggtgttccgcatcatttcgcagatcaggaaggacaccacggtcttgctcgtcgagcaaaatgcgcgcatgggactttcggtcgccgatcacggctttgttctcgaaaccgggcggatcgtgctcggcggcaagcccgacgaattgtggggcaatgaagccatcgccgcggcctatctcggcggacacgccaaaacccacgcctaatcgagcgagctaatttttcatggtcaccatcaaggtcgataatctcatcaacttcgtgtccgaggtattttcgcattcagagtcctctccggaagaggcgaagcgcatcgcgacctacctgacgacggccaacctcaccggccacgacagccacggcgtgatccgcgtgcctgtttacgtcaggtggaagaagatgggttcgatcgtgccgaaccagacccccgaagtcgtggtcgacacgccgtcgctcgcggtggtcgatggcaagttcggctatggccagaccgtcaccccggtcgcggtcaagctcgggatcgagaagtgcaagaaagcggggcttgctgccgtcgcgctgcgcaactccggccatctcggccgcgtcggcgactgggccgagatggccgctgctgaggggcttgtttcaattcatttcgtcaccgcagcaggctcgctgctggtcgcgccttatggcggcgtcgagaagcgcctgtccaccgcgccatactgcgtcggcattccgcgccagggccaggatcccatcgtgctcgatttcgcaacgtccgtcgtcgccgaaggcaagtgcctggtagcgagtcgcggcggcaagaagctgccgatcggcgcgctggtcgatgccgacggcacgctgagcgaagacccgcatgtgctgtatggtccgtatacgccggatgggccgcgcgatcacaccaagggaaccggcgcgatccgtgccttcggcgatcacaagggctcgggccttgccttcatctgtgagctgcttggtggtgcgctgaccggtaccggcgcgacatcgtcggaccgtcgcttcgccaacggcatgatggcgttctacatcgatcccaaggtgatcgacaccagcaacttcttcgacggcgagatcacccgctacaccgatttcatccgcgccaccaagccgatcgcgggtacggattcagtgctggttccgggcgatccggagcggaaaacccgcgccgatcgcaccaagaacggcatccccttgcctgacgacacctgggcggcgatagtgaataccgcgcgcgaagtcggcgtcagcgaagtctcgatccagcgggcgaccagctgaggtccgccctccaaaaacacaaaaggaaacgcgatcaatggcaaacaaggtcaagcaggtctgggcatcgggcaaggcggtggtgaacgcgtggctcgcgatcccctccgggttttcggccgaagtgatcgcgcaatgcggcttcgacagcgtcaccgtcgacatgcagcatggcgtgcaggactatcagtcgatggtgcaatgcttccaggcgatgcatgcccatccggtgacgccgatggtccgcgtgccctggaatgagcccggcatcatcggcaaggtgctggacggcggcgcctatggcgtgatctgcccgatggtcaacacgccgcaggaagccaagaacctggtctcttacgcaaaatatccgccgaagggcgtgcgctccaacggtccgatccgcgccggcatgtacggctcggccggcacctatcagcagaccgccaacgacgagatcgtgctgctgccgatgatggagaccaagaccgcggtcgagaacatggaagcgatcctcgacgtcgaaggcatcgatggcgtctatatcggtccgtccgatctgggcttctcctacggtctggtgccgaagctcgatcgcgacgagccggagatcctcaagatctacgagaagatcatcaaggaatgcggcaagcgcggcctcaacccgggcatccactgctcgggcgccgagggcgcggtgcgcgcgatcaacatgggcttcaagctcgtgacgctgtcgaacgaggtcggcctgatgcaggtctacgccaagatgcaggtcaatgcgacccgcgagaagtccggcggcaaggcgtagtcatcttcgcgaatggcgaacagggagtagcgaatggcgctgctcccaattccattcgctattcgctccaaaggagaactcccatggcctcggcccaagtgatccgcctgcacgccgacgacagcgttttgatcgcgcgcgcgagcctgccgccggggctggaggtgaccgagggcatcaccacggtcgatcgcattccggccggccacaaggtcgcgatcaagccgatcgcgcaaggcgaaccgatccggcgctatggccagatcatcggctttgcgacgcagccgatcgcaccgggccagcatgtgcacacccagaactgcggcatgggcgacttcgccaaggactatgcctatggcgtcgacgtcaagccggtcccgaacttcgatctgccggcgaccttcgagggcatccgccgcgccgacggccgcgtcgcgacgcgcaactatatcggcatcctcacctcggtgaattgcagcgcccatgttgccggcatcgtcgccgacatgttcaagaagaacccgttcaccggcgacaatccgctcgccgactacccgaatgtcgacggcgtcgtcgcgctgacccacaagaccggctgcggcatgacccaggacgagccgctagcactgcttcgccgcacgctcggcggctatgcgcgccatgtcaatttctccaacgtgatcgtgctcggcctcggctgcgaggtgaaccagatcggcggcttgatggccgagcagaagcttgccggccggctgcgcgcgatggacatccaggaggtcggcggcacccgcaagaccgtcgaagccggtgttgccttcgtcaaggaagcgctcactgacgccaacaaggtcaagcgcgaagcggtgccggcgagcgaactcaccgtggcgctgcaatgcggcggctcggacggttactccggcgtgtcggccaatccggcgctcggcgccgcgagcgatctgctcgtgcgccacggcggcactgtgatcctgtcggagacgcccgaaacctatggcgccgagcatctgctgacccgtcgcgccgtcagccgcgaggtcggcgagaagctggttggcctgatgcgctggtgggaagaatacacccagcgcgagggtgccgagatgaacgccaatccgagccccggcaacaaggcgggcggtctcacgacgatccttgagaagtcgctcggtgcgatggccaaggcgggcagcaccaatctggtcgacgtgctgcattatgccgagcccgtcaccaagaaaggcttcgtgttcatggacacgcccggctacgacccggtcgctgcgaccgggcaggtcgcgggcggcgccaatctggtctgcttcaccaccggccgcggcagcgtgttcggctgcaagcccgcgccgtcgatcaagctcgccaccaacacgccgatgtacaagcggatgcaggatgacatggacgtcaattgcggcaccatcctcgacggcgaggagagcgtgcaggaatgcggccagcgcatcttcgacctcatcctcaagaccgcctcgggccagccgaccaagagcgagagctttgatttcggcggcgccgagttcgccccctgggtcttgggcgcgacgatgtagcgctcggggacggccaccttggcgctgtcattgcgaagcgatgcgcagcccagcttgcggagcgatggattacgtcgtcgctgtcgctcgtcgcaatgacgactgctaagtcggcttgttcactgattgaccgacgccaccgtgatctcgccgaccttggtccaggtctcgccgccgcacaacaccgccagcacgcagccgcgcacctcgagcttcttcgtgccggcgagctgcagatcgctggaataagtcttgccgtcgtcggcgttgtagatagtacccgaccatttcttgtcggcgaccgaacgcatggcgttgaagatgttgatgccgacgatcggccgctgcgccaatgccttgttggtgttcttgtcgtcgatctgcggcttgccggtcgcgggatcgatcggcgccttcagccagacgatgatgccacacaacgccttgccgcaagagctgatgcggatcttggcgtcaccggccgcagtcagccagattccctcgacctcgtctgcgcgtgcggcctgattcagcccgagcagcagcattgcggcggtggttagcaggatggtcaatttctgcatggcgctactccatactcaacatgcgtccgtaccgttatggtgaatggacttggttaagtttgggttcagcccggccgccaatcggcgaaatccgctctcccgataggcacttgctgcccgttgttagtgcttgatgtcggccggaaccagtgttctgcttaaaaaagctgctggagttcctggtccgtgtcgatcttcgtcgcactgcatcacgtcacgcactacaaatacgaccggccgatcgatctcgggccccagaccattcggctccggcccgcgccgcatacccgcacgccgatcctgagctattcgctcaaggtcacaccatcaaaccatttcgtgaattggcaacaggacccgcaaggcaactggctcgctcgctacgtgtttccggacaaggcgaccgagctcaaggtcgaggtcgacttcaccgcgcagatgacggtggtcaatccgttcgacttcttcgtcgagccctacgccaacagctttccgttcgaatacccccccgatctcaagaccgagctcgccccctatctcgagaccgaggcgcccgggccgctgctcgcggcgtatctgaaggacattccgcgcaaggcggactcgaccgtcaattttctggtcgagctgaacgcgcagctgcaaaagaagatcagctacgtcatccgcatggaggccggcatccagacgccggaggagacgctggccgcgggctccggctcctgccgcgattcggcgtggctcctgatccaggcgctgcgccatctcgggctcgcgacgcgtttcgtctccggctatctcatccagctgcggcccgacatcgatccgctcgaggggccgcgcgaggtcgagagcgatttcactgacctgcacgcctgggccgaggtctatctgcccggcgcgggctggatcggtttcgacgtcacctccggcatgctgaccggcgagggacacatcccggtctgcgccacgccgcactaccgctcggccgcgccggtgaccggcactgcgggcttcgccaatgtcgagttcggcttcgagatgagcgtcaagcgtatccgcgaggcaccgcggatcacgcgaccgttttcggatgcatcctgggcgcggctcgaccggctcggcgagcagatcgacgccgatctgacgaaggatgacgtacggctgaccatgggcggcgagccgaccttcgtgtcggtcgacgatctggaatcgccggaatggaatgtcgcagccgtcggtccgaccaagcgcgcgctggccgatgagctgatccgcaagctgcgcacgcggttcgcgccgggtggcctgctgcattacggccagggcaaatggtatcccggcgagagcctgccgcgctgggcgttcggcctctattggcgcaaggacggcaagccgatctggaagaatgccgatctgatcgcctcagtcgaaaatccgggcaaggctgaaatcgccgatgcggagcgcatcgcaatcggcatcgccgcgcgactcggcctgaaggctgactacgtcatgccggcctttgaggacacagcgttctggctggagcgcgaggccggcctgccggccaatgtcagccctgcgaattccaaattgaccgatccggaagagcgcgcgcgtctcgcgcgggtgttcgacgagggcctcaccacgccgaagggttacgtgttgccgatccagcgctggagcccgctggacgatcgcgtgccggcgcgctggcgcagcgagcgctggaagatccggcgcagccacctgttcctgttttcgggcgattccccgctgggcttgcgcctcccgatctcttcgctcgaacacgttccgcccgaggattttccctacgtcatcgagcgggatccgatggcgccgcgcgatgcactgggggagatcgatccggagctgacgcgggcgctgaaggagattccggagccgttgccggtgcgcacggcgatgtcgatcgagctgcgcgacggcgtgctgtgcgccttcatgccgccggtcgagaaggtcgaggattatctcgagctgatcgcggcgatcgaggccgctgccgaagaattgcagctcgcagtccatgtcgagggctacgcgccgccattcgatccacgcgtcgaagtgatcaaggtgacgccggacccgggcgtgatcgagatcaacgtgcagccggcgcagagctggcgggaggccgtcgacatcaccctcggcctctacgaggattccgcgaagacccggttaggggccaaccgcttcctgatcgacggccggcataccggcaccggcggcggcaaccacatcgtggttggcggcagcaagccggaggattcgccgttcctccgccggccggatttgttgaagagcctcgtgctgtattggcagcggcatccgtcgctgtcctatttgttctccggcatgttcatcggcccgaccagccaggcgccgcggatcgacgaggcgcggcatgacgggctctatgaattggagatcgcgctggcgcacgttccgccgccgggcatggacgcgccgctgtggctggtcgaccggctgttccggcacatcctggtcgacatcaccggcaacacccatcgcgccgagatctgcatcgacaagctttattcgcccgatagcccgaccggccggctcggcctggtcgaattccgcgcgctcgaaatgccgcccgatccgcgcatgtcgctggcgcagcagctgctgatccgtgcgctgatcgcgaagctgtggcgcgagccgcaggacggaaaattcgtgcgctggggcaccgcgctgcatgaccgcttcatgttgccgcatttcctctgggaggactttctcggcgtgctcgccgagctcaagcagttcggctacgacgttgaaccggaatggtatcaggcgcagctcgagttccgcttccccgccttcggccgggtccatcacggtggcgtcggcctcgaactgcggcaggcgctcgagccctggcatgtgctgggcgaggagggcacctcgggcggcaccgtgcgctacgtcgattcgtcggtcgagcgattgcaggtcaaggccaccggtttcgtggagggccgccatgtcgtcacctgcaatggcaggcggatgccgatgaccgagaccggccgctcgggcgaagcggttgcaggcgtccgcttcaaggcctggcagccggcctccggcctgcatccgaccattcccgtgcacgcgccgctgacatttgatttgatcgacacctggaacggccgctcgcttggcggctgcgtctatcatgtcgcccatcccggcggccgcaactacgagaccaagccggtcaactcctatgaggccgaggcgcggcggctggcgcgcttccaggagcacggccacacccccggcaagatcgaaacgccgccggaggaacgcacaattgagtttcccttgaccctcgacttgcggacgccgctcctgcagtaattaagggcaggggaagtggaatgaccggaccgggtggccaaggcgggagtagtcaggagagcagggcccggcccggccagcgccggatggcgcaatggacccgcgactatgtccggcttcccggcattcccgatgaatacatcgccgagaacggcgcgccacggccggtctgggcccgtttcttcgatgccttcgctgcgctgtcgccggccgacatcgagcgccgcttcgcttccgccgaccgccatctgcgcgaggccggcgtcacctaccgcgcgcccggcgacacgtccgaccggatctggccgctcagccatctgccgctgatcatcgatgctgccgactggcgtcagctcgccgccggcgtcgcgcaacgcgcgcagcttctggaaatggtgctggccgatctttacggcgacggccgtctcgtcgccgagggcgcgatcccggcggccgcgatcgccggcagcagcgaatatctgcgcgcgatcagcggcatcaagccgccgggcggccgctatctgcatctctatgccgccgatatcggccgcgggcccgacggccgctggtgggtgctcggcgatcgcacccaggcgccgtcgggtgcgggctatgcgctggaaaatcgcctggtgctgtcgcgcgcgttttccaacctctacaagtcgatgaatgtcgagcgcgtcgcgccgttcttcgaagcgttccgcgattcgctgcgcgccagcgccgaccgcgacgagccgcggatcggcctgctgacgcccggcgcattcagcgagacctatttcgagcacgcgacgctcgcgcgctatctcggcttcctcttggtcgagggcgacgatctcgcggtctccggcgaccgcatccacatccgcaccgtcgctgggctgaagcggctcgacgtgctgctgcgccgggtcgattccaacatgctcgatccgctcgagctcgatgcgtcctcctatctcggcgtgcccggcctcgtcgaagtgctgcgcaagagcggcgtcgtggtcgccaacatgccgggctcgggcgtgatggaggcgagggcgctgctcggcttcctgcccaatctgtgccggcgcctgctctctgaagacctgatgatgccgcacatcgcaacctggtggtgcggtcagaagtcggcccgcgagcaggtgctgtcgcggctcgacgagttcgcgatcgaaggcgcctatggccgcggcgttgcggatttcccgggcaatggtccggtgctgccgggcgaattgtcggctgcggaccgcgaccgcctgaaggatgcgatcagtcaccgcggcatcgattatgtcggacaggagctggtgcgcctttccaccacgccggtgtgggagaacggccgcatcgcgccgcgtccgttcgtgctgcgggtgtttgcggcggcgacgccgaacggctggaccgtgctgcccggcggcttctgccggatcgccgaccgggccgatgcgcgcgcggtgtcgatgggcgatggcgcggtgtccgccgacgtctgggtggtctccgacaaggcggttgcgacctcgaccttgctgccggcggtcgacacggttcgcatccgccgcatcgccggcgtgttgccgagccgcgccgccgacaatctgttctggctcggccgctatctcgagcgcgccgaggccaccattcgcctgatccgggcgctgtgcacgccgctacgcgatccggcgcggggtaattcgaacggcaacgcgccggcgatgcattcggccgagcgtatccagcgcctgttggtgacctggggcgcggcctcgcagaccgcgcgcgccaatcccgccaaggtcgcgctcgaggcgctgcagagcgaggacaagttcggctcggcgctgtcgctggtgcgctcggcgcagcgtaccgcgacgtcactccgcgagcggctgtcgccggacgcctggcaggtcatcaccgagatggccgaccgcctggcgatcgaggttcatgacgatgacggcgtggtcagcgccgccgaactgaccttgcaggagctggcaagcttcgccggcctcgcgcaggagaacatgaaccgcgccgccggctggcgcttcctcgagatgggccgccgtgccgagcgcgccatcaacaccatccgctttgcccgtcagttcgcctatgacgaagccggtgacgaggacctcgacgtcctgctcacgctggtggactgccagatcacctatcgctcgcgctatctggtgcagccgctgctgacgccggtgcgcgatcttgcggtgctcgatccctataatccgcgctcggtcgcattccaggtcgcggcgctgaacgagcatatcgccgcgctgccgagcctgaaggagcatggcctgatcgagcggccgcagcggctcgcggtctcggtcgaggcgatgctgacgacggccgaagcctcgagcctcgacgtcaagaccctgttcgcgctggagcaggatctgctcaacctcgccgatgcggtcgggctgcattacttcccgcatggaccgaatgccagccggccggagaagctcacggggctggcgtgatctacgacatccgccacgtcacgacctacagctacgagacccaggtcagcttcgcgcgctgctcgctgcggctggagccgctcagcggcgacgggcaggagctggtttcccattcggtcgagatccgccccaggccggcggaacgcaccgcacggcgcgatttcttcggcacgctgaccgaaagcgtcctgatcgagaccgcgcatcgcagccttcgcatcgattcccgctcgcgggtcgcggtggctcgagagccgcgagcgcgtgacgccgccagtccgccctgggagagcgtgcgcgatcacgcgttcgaggcgctgagcctcgatgcagcctcgccggtcggctatgtcttcgccagtgcgctggtgcccgtgctgcggccggtgaccgcctatgcctccgcgagcttcgcgccaggtggcggcatcctcgccggcgctgccgacctgatgcgccgaatccgcggtgacttcaaatacgatcccaaggcgaccgtcatctcgacgccgcttcgggacgtgttcgagaagcgccacggcgtctgtcaggactttgcccatgtgatgatcgccgggctgcgtggtctcggcctgcccgcggcctatgtcagcggctatctgcgcactattccgccgcccgggcagccgcggctgcagggcgcggacgcaacccatgcctgggtgtcggtctggtgcggcagcgagctcggctggatcgggttcgacccgaccaacgatctcatgatcgccaacgatcacatcattctcgccatcggccgcgacttcgccgacgtctcgccggtcgacggcgtcatcgtcggtgcgcgcaagcagaggctcagcgtcgcggtcgacgtgttgccggtggagtgaggactaggattgcgtttatacgcattcgctatttcttgacgatggtatagtgagccttgggatcgcgcgcatactcaccgggccagaatatcaggtgccccgcacgcatcaaacgatcgaggtccttcttgctcgtttgccaagtgcgcccggtaagccgagaagcttctgagacttggatcgttgagttctggaacgcgtacgccaaaatcttgatttcgtgatcttgaaggcgcttccagacatcgacgccgaaatggttggcgacgtcggtgttcgttgctcgttttctggttgcatggtcgttgctaagggttacacgtacaactacgccgtggaccgcctcttgtttccattgtggctcgggtagatgatactccttcatgctttcgcgtatgcggcgcgtaccctcgcgagccatccgcacataacccagaaagcgtagagcatccatgaagtgatgattccgagcggcgcgaacttcatagattgtcttctcgttgacgggcggaacaaatcctcccggactttcgatctccattcgatcgggaaagagcttcacaaagacctctgagccgctgaagttgtacgagcgatggaccaatgcgttcacaacgccttcgaaccaggcataggtagggtattctggcgttgtgacaaattttccttggtcgttcagccaagtaacgtcgtaaatgaggccagcgatgatctcagcgccctcgcggagcatttttacgacgttgccctctacggtgcggtccctctgaggggtgtaggattggccttgcccctctgtctcgctagcaaaacgctgaatacggaggcgacagcccggtatcgaaagtcccggatctttggcagccaataaaacaagaccgtttagtggctttagcttgccgtcctcacgccgaagcaaacgacgatcaatcagcaactcatcgttggagaattcgaccccttctcgttgtcgataattatcacaaaagtcttgaatgatgcggagatcaaaatcgctcggatagttgtatggagccgtttcgagctcaaacgacaactcttggcgcgtggcacggaaatcgtgtttctcttgctcgctcatcttggaacggctctcgccgtatctgatccacgcctctcccttgttggtctccacaagcttcccaaggtatgggacgaatattgcgtagcaatagtcctgcttcccatcgacgacgaccggaaatttcttgaactccggttttgcctgcgggcatcgcgtcaagtgagagcactcgatatcattgatttgcttttggctgagcgagttgcatccgacgattgtgccgtcgttctccacgccgtagacgagaaggccgccgtcaggcgtattagagaacgtgctgtagtaggtggcgagatcgtctatcgaaatctttcgacagcctttgcgttcgaatctgcgatcctctcccaagaattcgatgacctgctgattgagccggacccaaatgtcgcggggagtccaaacggcaggattatcgttgacaccaaccgccgcgttgaaatcaaactcgaactggtctgacatactcgatgtagtatatcgagccatgctcgatacctttatgcggtaggatgggtgtgaaggcggacccaaatcactatagcgagaagagagccgctcgtcgcggccaccccgtaacggcacccgcgttgtccacactgctgaggttacatgaatacagcaaacgggctcacctcaaaaagctgccctaaaaccccaaaagggcccggcgtgaaccgaacccctttggcggagcgggtgggattcgaacccacgatacagttgcctgtatggccgattcgtaatcggctggcttcaaccactcacccaacgctaagtttattaaggcacttttttgcaggactgccaagcgaaagatgcatcgagaagattgaggcgggtctcgacatccgcacacacgcggttgtcggccgcgacttcgccgacgtctcgccggttgacggcgtcatcgtcggtgcgcgcaagcagaggctcagcgtcgcggtcgacgtgttgccggtggagtgagcggagcgcggcgagaatgccgatcaggcgacatgccgcttgcccgatttgtcccatccgatcgggctgacgatcacgcggtcgcggccttctgccttggcttgatagagcgcaaggtccgctgccttgagcagttcgcgcgacgtgcgctcgtggtcgggcacgaggcaggacaccccgatgctgacggtcggtaactcctgctcggattcgcgtgcggccgcgagcttcgcgcgaatctgttcggcgacctccaacgcaccggccttgccgatgccgggcagcaacaccgaaaactcctcgccgccgtagcgcgcgccgagatcggtgacgcgcttggcgctggctgcgatgcatcgccccacggtggcgagtacggcgtcgccagcctgatgcccgtaggtgtcgttgaaggctttgaaatgatcgacatcgatcatcagaagcgaaaccggcgacttcgcgcgcatgccgcgccgccattcggcttcaagggtgtcatcgaggcggcggcggttggcgaggccggtcagcgcgtcggtgctcgcaagatgcgcgagccggcgttcggcagcggcccgccgcttgagagcagccagcagatagaacatcaggacgatcgagaagctgcacagcgcggccaccacgctgccgatcagccagacctgctgccaccaatcggcatagatgccgtcgagcgagagaccctcggcgatgatcaggcgatggttgccgaccgcctggaagacatagagccgcctgacatgatcgacgagcgatttcgtcatgtaggagccggattgccgcgccggatactgcttgaagacctgggagtccttgatgctctgcccgatcttgccgatctcgaacggtgtccgcatcagcatgacgccgtcagtgttgaacagcgccatgctgtcgccgaggccgaagttcagcttgcgaaacaggttgtggaaatagctgagccgcatgctgcccgcgaccacgcctgcaaaggatccatcctccgtgctgatacggcggctcaggctgatcagatattcgccgtccggcgtgacccagggagcgctgatgaacagtccgcggtcggctcgcgtctgatgcacctggaagaagtcccgatcggcgaaatttgccgtccgaggcttcaatgtccgggaatccagcgtgacgtctcccgcgacattcagcacgaggatcgagccgagatccttggccgtggcggcgcggtcgaacagcacgacctggcggagttccgggctgaccttgccgagctccggcagcttgacgccgtcggcgaccgcctgcagagagaggtcatagagctcgatgttgcggtcgatctcgctggcaatggaggcgacgaggttggtcgccccttccttcgcatgctgatagtccttgtccgccatctcccagaggatcgatgcgcagatcgccgaaaagcccaaaacgaggccgatcccgagcgcaagcagccgtttggtcggcaccgccttcggctttggcacaggcccgttcattgttcgcttcccgcttcccccgcgcccccgcgctttgacgttttctataggggcatcaaattgagaaaggcgacctgaagcgcaggcaatttatgcgcgtgcgttgggggagctttaaccatccggcttgaccgggacccgtcgcgggtcctcgacagatcgcgcgttccgttcaggttccggtccgccgtaggtcctctgcggcgtcgctgcgcaaattgcggaagaactgctcgacctcgcgcgacagcgtctcggcggtcgcggtcaaatcgttcgatgccgcgagcaccgattctgccgccttgctggtctggtccatgtcgtcgcggagcgagccgacattcgtcaccagggtctcgttgccctgggcggccatctgcgcattggcggagatttcgcgcgtcgccgcgtcctgttggccgatcgcgcttgcgatattggcggtgacgttgttgatctcgcgcaccgcctggccgatttcgcgcacggcggcgacggagttgcgggtcgaggcctggatcaggccgacattctcgctgatctcggcggttgccttcgcggtctgtccggcgagcgccttgacctcgtgcgcaacgaccgcgaagccgcggccggcatcgccggcgcgggcggcttcgatggtggcgttgagcgcgagcaaattggtctgctcggcgatcgcctggatcaggctcagcacgccgtcgatgcgctgggtggtggcggcaaggctctcgatctcggtgatcgaccggtcggtgcgcgcaccggcgtgatcgaccgcgccggacgactgcttgacctggcgaccgatctccgcgaccgaggcggagagctcttcggccgcgcccgccaccgcggagacgttgctcaaggcctgttcggtcgcgcctgccgccgcaaccgcccggccattggcgtccgccgcgacggtcgcgatggtctgcgcggtctgccgcatcgtcgcggcgttgtcgtgcaccgcgcgcagcacctcaccgatggtgccgcggaatgcgtcgacgaagctctcgatgtgccggccgcgtgcgtcgcgggcctcggaatcctgcaggacttgcgcgttcaggctgcgattgcggtccatcgcctcctggaacaccttgatggcgcgcgccagggcgccgatctcgtcgccgcgttcggcgtggggcacctcgacatggtcgtcgccctcggcgacgcgcttgatggtcgttgtgatctgcgacagcggccgcgccaccgagcgggcgatgatcagcacgccgagcaccaccacgaccatggccgccgcgccgagcccggtcagcagcagtgccagctcgcggttggtgtcggtctgccgtgccagcctcttgctgcgctcggcatagacttttgagagcgcctcgaggtccttgttcagcgcgctgcgtacgtcgcggttggcgtcgttgtcgccccattcgcgtccggctgcgccgccgatctcgatgccgcgacgaaccagctccttgcggaaatcgatgaactgctcgatgcgcttcttgaagaccgcgaactcggtggcgtcgtcagcctgcaccagggtttcccagttcttgaccacgccgatgatgcgttcgttgaacgccagcagtccgtcgctgtatttcttcaccgccgccggatcggtcgacatgtagatgccgcgggattccatcaccacggcatagaccagcgaattgacccgctcgacattgagcgcggcacggctcgcgaggtcgacggcggcggtcaactcggcattgcgccgcgcgttgtagtcggacaggaaagtgatggccgcagtcagcgccgcaatcagcgcaaacgtcgagtacagcctggcagcaagcgagaatcgggatgccattggaggccgggacatggagatggaggatgtgatgggggcgggcactgagggcactccaggggccggggcgtaccttcggccgattaaagcttatgcaaaatcttcatggacaatctcttaacgcgcgggctttgcgcgattgcagtcgttaaaatccctaaatgatcccaatgtcttatgcagcctcttgaacctgccgggttcccgcgactggcggttgtgttgaatgacgcgccgccatcatcgtcattcatcaacatccaaggtgcatcgggcgaagccgatggcacgactttcgcaaagaggtgctaggttacgccgccccagccctacgcgaatttcccatgcactatcgtcacaccatcgacgccaccagctacgcattcgacgatctgcgcatcctgcttgccagggcctcgccgccgcgctcgggcgaccggctggccggcatcgcagccgacagtgccgcggagatgatcgcagcgcggcttgcgctcgccgacgtcccgctcaagcaattcctcgatgagcctgtcatcccctacgaggacgacgaggtcacccgcctgatcctcgacagccacgacgtcgccgcctttttgccggtgtcgtcgcttaccgtcggcggcttccgcgactggctgctgtcggatgccgcgaccggtgaagcgatcagcaggatttcacgcggcgtcaccccggaaatggttgcggcggtatcgaagctgatgcgcaaccaggacctgatcctggtcgccaagaaatgcgaggtcacgacccgcttccgcaacacggtcggcttgcgcgggcgaatgagcacacggctgcagcccaaccatcccttcgacgatgccaagggcatcaccgcctcgatcctcgacggactgctgctcggatccggcgatgcctgcatcggcatcaatccggcgagcgacgatccgaatgtcatcggcaccctgctgcggttgctggacgacgttatcacccggctcgggattccgacgcagggatgcgtgctgacccatgtcacgaccacgctcggactgatcgggcaggggctgccggtcgatctcgtgttccagtcgatcgcagggaccgaggcggccaatcgcagcttcggcgtcgacctctcgctgctgcgcgaggcacgggaagccgggctgtcgctccggcgcggcacggtcggcgacaatgtgatgtatttcgagaccgggcagggctcggccctgtcggccaacgcccatcaccaggtcgatcagcagacctgcgaggcgcgggcctatgcggtggcgcgcgcgttcgatccgctgctcgtcaacagcgtggtcggtttcatcggccccgaatacctctacgacggcaaggaaatcatccgcgccggcctcgaggatcatttctgcggcaagctgctcggcctgccgctcggaatcgacgtttgctataccaaccatgccgaggccgatcaggatgacatggacaatctcctgacgctgctcgccgccgcaggtgtgaacttcatcatgggcgtgccgggcgcggatgacgtcatgctgaactatcagtcgacatcgtttcacgatgcgctttatgtccgtgacctgttcggcctgaagcgggcgcccgaattcgacgattggctcgcgcgcgccggccttgccgggcaggacttccgcctcgttgccgatgcggggcggctgcctgacctcgccgccaggctcctgacctgacgggatagcaaaattctgcagagcaactatctcgccgttgtgacgttggtaagtgccacaatgttgaagaatttctggcccagcgttccacgccatggttagatttgcggacgcttcggggtcgattgatgagagctgagggcatagagacagcacggcgtatcctctgcgtctttccgcgctatacgtcgtcgttcgggaccttcgagcacgcctaccccctgaccgacggcgtcaaggcgttcatgccgccgcagggcctgctgctgattgctgcatacctcccagagaactggcaggtccgtttcgtcgacgagaacctgcgcccggccacggcggaggatttcgagtgggcggacgcggtgttcgtcagcggtatgcacatccagcgccagcagatgaacgacatctgccgccgcgcgcatgaccatgatctcgtggtcgcgatcggcgggccgtccgtcagcgcgtgcccggactattatccctcattcgactaccttcatgtcggcgaactcggcgatgcgaccaatgagctgatcaggcgcctggcggatgacaccagccgtcccgaccagcaggtggtgctgaagaccatcgaccgcctgccgatgacggatttcccgctgccggcctatgagctcgccgaaaccaagaagtactttctcggcagcatccagttctcatcgggctgcccctatcagtgcgagttctgtgacatccccgggctctatggccgcaatccgcggctgaagtcgccgcagcagatcatcgcggagctcgacaagctgcgcgcatgcggtgcgaccgacaccgtgtatttcgtcgacgacaatttcatcggcaaccgcaaggccgcgagcgagctgctgccgcatctgatcgaatggcagaagcggaccggctatgtcacgcgcctcgcctgcgaggcgacgctcaacatcgccaagcggcccgagatactggagaagatgcgcgaggccttcttcgtgacgatcttcgtcggcatcgagacgccggatcccgatgcgctgaaggccatgcacaaggatcagaacatgatggttccgatcctggaaggcgtacgaaccatcaattccttcggcatggaggtcgtctccggcatcatcatggggctcgataccgacaagccccagaccggtgatgcgctgatctccttcgtcgaggagtcccggattccgctgctcacgatcaatctgctgcaggcgttgccgaagacgccgttgtgggaccggctggaaaaggcggggcggctggtccatgacgacggccgcgactccaatgtcgagttcctgctgccctacgaggacgtggtcagttcctggcgcaaatgcatggaaatcgcctacgagccgaagaagctgttcgagcgctatctgcatcaatgcaactacacctatgccaaccgcatcaaggtgccggtcagtccggagatgaagagctgggccaacatccggcgcggcctgatcatgctgcgcaacatcttctggaaggtcggcgtgctcggcgactacaggcgcgtgttctggaagtttgcgctcggccggctcaaacgcggcgacatcgaggggttgatctcggcgacgctggttgcgcaccacctgatcacatttgcgcgcgcagcctccagcggccggcagaacgcctcgaactactcgatccggctgcgcgaggcttcagttccggccgaatgacagcatgacgacaccgccggcgccatcgaccgcttcgctacccgatttgcgtgacctcacgccggcacgcgtcggtctcggtcggtccggggccagcctgccgaccaatgcgctgctctccttcacgctcgaccacgcccgcgcgcgcgacgccgttcacgcgacgttcgaggtcagcggcatcgctgccggtcttgccggcctcggcatcacaccgcacgaggtgtcgagccaggcgcacgagcggcgcgactatctgcgccggccggatcgcgggcgcatgctggattccgcatcgcggcggtcgctggaaagctgcggcatcaccgcgtgctcctgcgccatcgtgatcggagacggtctgtcgccgacggcggtcaatgtgcacgccgtcgaattgatccggcatctgctgccgcggcttgcggccgacaagatcgatgccggcgcagtgatcgtggcatccggcgcgcgcgttgcgctcggtgacgagatcggcgccatcctcggcgcgcgcatgctggtgatgctgatcggcgaacggcccggcctttccgcgcccgacagtcttggcgcctatctcacctttgcaccgcggatcggcctcaccgatgccgatcgcaactgcatctccaacatccaccgtgctggcctgagctatgcggaagccgctctcaggatcgcgtggcttgtgcgtgaagggctggcgcgccagatcacaggggtcgcgttgaaggacgaaagcggcggtggatcatcacagaatgcgctcccagggtgtggcaaatcagatacttaatggtggggatcagcggttccccgctgatttggctcgaccctcgcgcttgcgagcaagagggcagacaggtaaaaccggcgccggtcaatattcacgtgttttcaaggactagcgccgaaaagccgcgctcacccgcctcattcgcgcccctagacccaagctagacagattgagccgttttcagaactggacagggcatgctcgaaaagaactccgaaagtcaggtccacgtcgagaaggtcgaagagccgcggtcgggccccagcatcgcgttcgggatcgagcgtctcggcctgatcccgatgcgggcgccgatcctgtcttgcatcgtgctcgttctgttgctggtcggcgccgtattcggcgtgcatcggatcaagatcgacgattcgctgtcgcaattgttccgctccgaatccaaggactacaagcagtatgaggccgtgaccaagcgcttcccggcgaccgagttcgacgtcctcgtcgtggtcgaaggcaagacgctgctcgagcgcgacaatctcggcaagctccgtgacatggtcactgacctgcagctcgtcgagggcgtgcgcggcctggtgtcgctgttctccgcgcgccaggcgccggagcccggcaagctgccggcggcgctgttcccgaacgagctccccgagggcgcggcctacgacaagttcgtcgagaccgtcaaaagcaacgagattatccgcggcaagctattgtcggaggacggcacgctcgcgctggtcgtgctgtcgctcgagccggaggtggtcggcagcaacaagctcggcaaggtggtcggcgacatcaggaagatcatggccgacgatctcggcggcagcgggctcaatgcccagctgtccggcgtgccggtcatgcagctcgagatccgcaacgcggtcgagcgcgacggcctgacctacaacattctcggcatcctcgccggctgcgtcatcgccatcatcttcttccgcaagatctccttcatggtggcggcggcgttcccgccgatgatcgcgatcctgctcgcgttgggcggcctcggatgggccaatttcaatctcaacatgttcctcaatgtgatgacgccgctcatcatggtgatcagcttctccgactcgatgcagctgacattcgccgcgcgcgaccggctgatcgccgggcaggacaagttcaccgcgttcaagaacgcggtgctggtggtcggcccggcctgcgtgctgacgcacggcacggccggcatttccttcatcgcgctgcagttctcggactccgacctgatccgcaaattcggcgaggccgggcttgcggcgaccatcatcgcgctggtcgcggtgctctcgctggtgccggtgttcggcatcctgctggtgcgcaacgagaaggtctttgcggtcaagttccagagcgcggacgccggcgtgcaggcgctgcgcaatttctgctactggattgccgtgcgcatggtcggtcgtcccgggctgttcagcctgctcgcgctgatcgtcgtcggcggcctcggcatcatctatgccaacctcgagccgcgctaccggctcgccgaccaggtgccggacaagcggcaggcagtggaggcgtcgagccggctcgacgccaagctgaccggcgccaatccggtcgatgtgctgatcgaattccccaagggtcagtcgctctattcgccggagacgctgaagacgatcgccgatgtccacgcgatggtcgaggactctgccggcgtcggcaatgtctggtcgctggaaaccctgcggcgctggctcgccgaaaaggccggcagcaacgatgtcgcgacgctgaaggaatatgtcggcgtgatccccgagcatctcgtgcgccgcttcatctcgaaggatcaggatgcggtggtggtgtcgggccgggttccggatctcgactcgagccaattgcttccggtggtgaacaagctcgatcattcgctggacaaggtgcgcgccgagcaccccggctacgagatcgccgtcaccggcctgtcggtgattgccgcgcgcaacagcgccaacatgatcgagaagctcaaccgcggcctgaccgtcgagttcgcgctggtcgcgatcttcatcggactggcgttccgctcggtcgtggtgatgttctcctgcatcctgccgggcatcttccccgtggtgctgtcaggcaccgtgttgtggctgctcggggaggggctgcaattcgcaagcgtggtggcactgaccgtgtcgttcggccttgggctcagcgcaaccatccacttcctcaatcgtctgcggctcgagaccaagcccggtgtcacgccggagcttgcggttgagcgcgccaccgttctggtcggtcccgcgctgatcctgacgacggtggtgctggcctgcggcctggtcgtcaccgtgttctccgatctgccgtcgctgcgcctgttcggctggctcagcgcattctcgatggtcgcggccctggtcgcggacctcttcatcctgcggccgacctcgatgttcctgatcaacctgtcgcaaaagctccgcggcaggggcgggcagccggcgccgatcgaaaaggcctgatcggtcgacaattagaaggcccggttccgaggtgttcggaaccgggccttttttgttcgccggcgaaatcgatcggaagcgtcaggtcttcgtcatcgtgatcgtgacgccgcggatctcgcccttggagtcgatctgcaccacctgcttggagccgttggtctgcaggttcaggtttgcggcaaagccggacgcctcgacgaacacgtcgatccgtccgccgcccgcggtgccctgcaaattgccgaagatgttgcggcttgcctcgctccagttgccggagatccggtcgccctggctggtgacgtcgctggagaggtcgaacttgtagctgtcgctggcgcaatgcagcgattgcttcaggttcatgcccgacggcgcgaccttgtagtcagccttgcaacgaatgcgttcggtcgtgccgttggacagcgccaccgtgcccgttccggtccacgagccggcaaaaccggcgaacggaccgctggcctgcgcatggactgcggaggcagacagcatcagtgcggcgccgacgcccacagctccgagggcctgagcataatggctggaaccaaacagtttcattgtgaatttcccatcaaaatcaacgcctcccttgcaagaaagcgtctcgccgcatcgaaggtttagtgtcacccaagaatgttaggttcaaacgacaaaggcgacgcgcacgatgcctgtcgtcttcgaacagaatcagaaacgattggcctcatgacggcatctagctttgcgtgcgtgccatctgcaatagccaaacgcgacaaagtgatggcgcgaatcgcttttgtgaatcaataacttaagtgggggtttacagcgccgtaaatttagccgcatttagcagtgcttgtcgtcaatccgttgccgcgttacgtggcgtctgcaatccccaaaatccgtcccggccatgccgaaacgctttcgggaacagattttctgctgtcggaaatgaaggaatacgatgcgtaaatttctcttggcacttgccctgttgtcgatcccgctcgcgtccagcgccgtcgcccagcagcagcagggacgcggtacacccgatgagcagaaggcctgcacgcgtgacgtgcagcgtcactgccgctccgtcatcgatcagggcgatttcaccattctcgcctgcctgcagcagaatcgcagcaagatcagcgccgcctgtgagcaggtgctgaagagccacggccaataagaccgaattcaggtctcaagggaccgccatcaataccgaggctggcagccatgccggccgcggtcacatatgctggcggtcacagatagcattggttttggtggcgtattcccctatatggggctcgcaaatcccccgcatgcgctgacggttcgcgcctgcgtcgtgccatgaccagtgtagcccaaatttcccatgaccaccgcgagcgacctgcgatccggaaagacccaccgcgacgagaattttccggtcgcgtcgtggatcattcatccgcggcaccgtgccctgatcctggccttctataatttcgtccgcaccgccgacgatatcgccgatcacgccacgctgcagcctgcggaaaagctgcgctatctcgacctcatggaggccgagctgctcggcaatggcgagacccagaacgaggcggtcaatctgcgccgggccttcgccgagcgcggcatgccgccgcggcatgcgcttgacgtgctggtggcgttccgcctcgacgtcaccaagcagcgttatgaaaactgggacgatgtgatcgactattgccgttattcggcgatgccggtcgggcgcttcatgctcgacgtccatggcgaggatacctcgacttgggccgcatcggatgcgctctgcgccgccttgcagatcaacaatcatctgcaggattgcggcaaggactaccgcaacctgaaccgcgtctacctgccgcgcgatgcgctcgccgccgcaggcgcgacggtggagatgctcggcgaggcgaagtcacagccggccctgctcaactgtctgcaggcgctcgcggtgcgcaccgagacgctgcttgtgcaaagcaaatcacttgccgccgaggtgaaggacttcaggctcgggctcgagatctccgtgatccaggcgttcgccgacaagatcgtcaacatgctgaaggtgcgcgatccgctcagcgagcgggtgcatttgagcaaggttgagctactgctgcagagcctcggcggcgtcgcagtcgagaccgcgcagcgcgcgaccggacggcgtgtggtctccaggacggcggccggcgcatgagcgtcgaggcggcggccaacgcaaattacggaagcactgcgtcgggcagctcgttctatgccgcgatgcgcatcctgccgcacgcccagcgcgaggcgatgttccagatctacagcttctgtcggcaggtcgacgacatcgcggattccgacggcccgcggccggagcggctggcggcgctgcaacaatggcgcgacgatatcgacgcgctctatgccgggcacccgccggagcggctgaaggactatgtcgcctcggtcaagacgttcggcctgaagcgcgaagatttcctcgcgatcgtcgacggcatggagatggacgtgccgcaggacatccgcgcgccggatcttgcgacgctcgatctctattgcgatcgcgtcgcgagcgcggtcggccggctgtcggtgcgtgtgttcggcctgcccgaggacgacggcatccagctcgcgcatcacctcggccgtgcgctgcagctcaccaacatcctgcgcgacatcgacgaggatgccggtctcggccggctctatctgccgcgcgaatggctctggcacgccggcatcaccaacaacgacccggcgcgcgtcaccgccgatcgcgcgctgccgaaagtgtgcgcgccgctggccgagcgcgccaagatgcatttccagaagtccgacgagatcatgaagcgcaattcgcgccgcgccgtgcgcgcgccccggatcatgtcgaaatactaccgcgcgatcctcgatctgttgatcgcgcgcggcttcgccgcgccgcgtgcgccggtgcgtgtgtccaaggccgccaagatcggcattcttcttcgttacgcgatcatctgatgcaaaagaccgttcatatcatcggcgccggcatttccggcctctccgccgccgtgcggctcgccaatgccggctacaaggtcgccgttcacgaggcgacgcagcaggctggcggccgctgccggtcctatttcgacgccgccaccaatctcaccatcgacaatggcaatcacctgctgctgtcgggcaaccgtcacgcgctgagctacgcgcgttcgatcggcaccgaggccggtctcgtcgggcccgcgcgcgcgcagtttccgttcgtcgatctggcctctggccggcgctggcagctcgacctcggcgattcccgcctgccgctatgggtgttcgacgaggcgcgccgcgtcccggacacgaccctgcgcgactatctcgcattggcgccgctggcctgggccggcaccgcggcgctggttggcaacaccatcccctgcaagggcacgctgtatgaccgcctggtgcagccgctgctgctcgccgcgctgaacgtcgatccaccggagggctcggccgggcttgccggcgccatcgtgcgcgagacgctgctcgccggcgggcaggcctgccgcccgctgatcgcgcgcgacggcctcagctccgtgctgatcgagccggccgtgaagctgttgcaggagaggggccacagcgtccagttcagtcacgaattgcgtacgcttggcatgtccggcgatcgcgtcagcgagctggacttcggcggcggcgacaagatcgagctggcggccgacgatgccgtcgtgctcgcggtgccgccgcgtgctgcggcgaccttgctgccgggcctgaaaaccccgaccaaattccgcgccatcgtcaacgcgcatttccgcgtcgatccgccgcgtgacgccgcgcccattctcggcgtggtcggcagcctcgtggaatggctgttcgcgttcccgcagcggctgtcggtgacgatctccaacggcgaccgcctggtcgacatgccgcgcgaggaactcgcgcaggcgatctggcgggacatctgcaaggcatcgggcgtgtcgggcgacctgccgccctggcagatcgtgcgcgagcgccgtgccacatttgaggcgacgccggagcagaacgccctccgtccgggggccacgacggcgcaaaaaaacctgttccttgccggcgactggactgctaccggattgccggcaaccatcgagggatcggtgcggtcgggtgatcgcgccgccgatctggttctggccacgcgctagattcgacctgctggagcattttcgagcgaagtggtcaccggttcgcgtcaagaaagtgcgaccggcaaatgaatgagaacatgatccgatttgatcggatcatgttcggaagcggccgcggctttcgaacagccggcccgcgatgaagaggatatcgagcgagatgctttcgagagatcacggcgttgcagtcgatccggtcgcgctggagaagagcatctccaaggcaaccgaagcactgcttggctatcgccagtccgacggacattgggtgttcgagctcgaggccgacagcaccattccggccgagtacatcctgctgcgtcactatctggccgagcccgtcgatgcggccctcgaggccaagatcggcaactatctgcgccgcgtccagggcgcgcatggcggctggccgctggtgcatgacggcccgttcgacatgagcgccagcgtgaagtcgtacttcgcgctgaagatgatcggcgattccgtcgacgcgccgcacatggtgcgggcgcgcgaggcgatccgctcgcgcggcggcgcttcgggcagcaacgtgttcacgcgcttcctgctcgcgctctatggcgtcgtgacctggcgcgcaacgccggtgctgccgatcgagatcatgctgctgccgatgtggtcgccgttccacatcaacaagatctcgtactgggcgcgcaccacgatggtgccgctgatggtgctcgccgcgctgaagccgcgcgcgaagaatccgaagggcgtcggcatcgacgagctgttcctggaggatccgaaatcggtccgcatggcgccgaaggcgccgcaccagagcgcgagctggttctacctgttccgctcgctcgacgccgtgctgcgcgtgatcgagccgatgtttccgaacagcctgcgccagcgcgcgatcgatgcagcgctcgccttcaccgaagagcggctgaacggcgaagacggcatgggcgcgatctatccgccgatggccaacatcgtcatgatgtatgaggcgctcggcaaggacgagagttttccgccgcgcgccgtcacccgacgcggcatcgacaagctgctcgtgatcggcgacgacgaggcctattgccagccctgcgtttcgccggtgtgggacacggcactgacctgtcatgcgctgcaggaagccggcggcgacgacaccctcgccaaggccaagcagggtctcgactggctgaagccgcgccaggtgcttgagctgaagggcgattgggcggtcaaggcgccggacgtgcgtcccggcggctgggcgttccagtacaacaacgaccactatcccgacctcgacgacaccgccgtggttgtcatggcgatggatcgcgtgcggcgtcataccgggacccgcgaatacgacgaggcgatcgcgcgcggccgcgagtggatcgagggcctgcagagccgggacggcggctgggccgcgttcgacgccaacaacctcgaatattacctcaacaacatcccgttctcggatcacggcgcactgctcgatccgccgaccgaggacgtcaccgcgcgctgcatctcgatgctgggccagctcggcgagaccgccgagagcagcaaggcgatggccgacggcattgcctatctgcgccgtacccagctgcccgagggctcctggtacggccgctggggcctgaactacatctacggcacctggtcggtgctgtgtgcgctaaatgtcgcaggggtcgatcgcaacgacccgatgatccgaaaggcggtagaatggctggcgtccgtccagaatcaggacggcggctggggcgaggacgccgtcagctaccggctggattacaagggttatgaagttgcgccgtcgacctcctcacaaacggcatgggctttgcttggattgatggccgccggagaggtcgaaaacccggccgtcgtgcggggggtggagtacctaaaggcaacacagacggaaaaagggctgtgggacgagcagcgatacacagctacggggtttccgcgggtattttacttgcgatatcatggctactcgaagttctttccgctctgggcgctggcgcggtatcggaatctgagaagcaccaatagcagggtggtaggggtcgggatgtgattgttgaggcgggggccgccgagaccgtggacagtagaattgatcctcggccggtattgattgtgactggattggtgcaggaggcccgtatcgcagcgggtcccggcatgatcgtgatttgcagttcgagcgatccgcagcagctgcgtgcattgctggcgacgctggatccgacgaccttccgtggcgtgatttcgttcggcgtggccggagggctcgacccgtcgctcaagtccggcgacgtcgtggtcgcgaccgaggtgatgtccggcgacacgcgtttcctggcggcgtccgccctgaacgaagagatgatcgccagcgccgcgctgaagcgccgcaggatcgttcgcggcgggcttgccggcgtggaagaggtgatcgcggcgaaggcctgcaaggccgctctgcgctcgatgacgggtgcagccgcggtcgacatggagagccatattgcggcagcctatgccgccaaggcgcgcattccgttcgccgcgctgcgcgtgatcagcgatcccgcgcaccgggcgctgccggagcttgcgaaatccgcggtgaagccgaatggcgacatcgacctgcgcaaggtgctgcggggcatcgcgcgcaatccgcgcacgttgcgggcactggtgtcgaccgggatcgacttcaaccgcgcgctgcgctcgctgcgcagctgccgcggcttcctgctcggcaacgaagtgctgatgccggtggacggcgtcatggtcacggcgaaggcggcctgatccaaccgtcccgggctgggacgggtttctcgacgcatcaagttcaaaacaaaggcctggtcgcatcgcgaccgggccttttgcttttgggacctggtggtttggcttgatgcccacaccgggctggcgcattgcgctggacggggggacagctcggtccttgccgaggggcgcgcgagcgcgttgctgcgtgctgcctgcgcgctcccgtctttcgtgcggggcggcgcggcttcggggctggcaggcgcgtcctggggccgcaggggcccgctggatgcttgacagatccaggcattcaacggaggatgaattatgatcctgtattcatgaattaaggttcacgatggccatcgcggcggttcgcctcaatcagctcgtcgagaccaaggcacgcatcctggatgccgccagggagacggtggcgctgagcggctggaaggatgcccagatcgccctgatcgcggcacgggctggcgtggccacgggcagcgtgtatcgctacttcgactctaaggcggacctgtacgcgcaggtgctcggactggtgtccgagcgcgaggtggcggtggttgccgcgatcgtcgaggccgagggatcggcgtcgcaatgtctggtggatgcgatctacaccttcgcggtgcgtgcgatgcgcggccgtcggctggcctacgcgctgatcgccgaaccctgtgaacccgagatcgacgccgcgcgcctgaaataccgcgccgcactcgccgaccagatcgcaaggctggtccggcgcggcatcgccaatggcgagttcgtcgagatcgacgccaacgtcgctgcatcctgcgtcaccggcgccttcatggaagcgctggtcggtccgctggcgcccgaggcggctcccgattccgatgcggcgaaggcgatcgcgcaatcgatcgcagggctcgccgcgcgcatgctgtttcgccacacgacgcctgaattgacccccgtatcgcgagtctccgcatgaatgcgcgtgtccagcctgtagccgtcgcagaagtgaaagccagtccgtttgcgacccacgaagtccgcaaccaggcgcggcccgcgacaggcttcaacgcgttcgaggacgaccgcgcgctgagcggcctgatcgcgaagctggcgccgtgggcacgcgataagctttctgcgctgggcgcccatgccggcagcgaggccgcgcaggaggcggcacgacttgccaatgagcacgaaccgaagctcgtgacccatgaccgctacggcaaccgcgatgattgggtcgaattccatccggcctggcatcaattgatggcgctggcgttccagagcgaggtgcatagcctggcctggtcgacgcgcgagccgcacggccatctggcgcgcgcggcgctgagctatctctggaatcagatcgagaacggcgtcggttgcccgaccggcatggcttacgccgcgatcgccggatttgccggcaagccgcaatttgcgctgtggcgggagcgaacgctgaccgcggattacgacccgcgccggcttccgatcgaggccaagcgtgctgctgtcatcggctatgcgatgaccgagaagcagggcggctccgatctgcgcgagacccagaccacggcgcgcttcgtcgagcgcggcgcgcatggcgagatctatgcgatcaccggccacaaatggttcttctcggtgccggtcgccgatggattctacaccctggcgcgtacccggtccggcgtcagctgcctgttcgtcccgcgcctgctgcccgacggcagcgccaaccgcatccacatccagcggctgaaagacaaatgcggcaaccgctccaatgcgtcaagcgagatcgagtatcacgacacctggtcgatcctggtcggtgaggaaggccgcggcatcgcggaaatcctctcgcatgcgcatctgacgcggctggatttcgcggtcggctccgccgggctgatgaggcaggcattgagcctcgccatcaatcacgcgcagacccgaaccgcgttcgccagaccgatgtccgagcttccgatgcagcgcaacgtgctggccgatctcgcgctcgagagcgaggcggcgatgctgggcgcgtttcgcgtcgcgcgcgcgaccgacggcttgcaggccagcgagcacgagcggctgctggcgcgggtcgcgacccccgtgatgaagttctggaattgccagcgcgcgccggccttcacctatgagtgcctgcaagtgcacggcggcaacggcttcatcatggagaatgcgatggcgcggctctatcgcgaggcgccgctgaattcgatctgggaaggcacctcgaacatgatgtgcatggacgtgctgcgcgccatgcagcgcgatgccaagtgccgcgatgcgttcatcgacgaattgcgcgggagcaggggcctcaacccgatctatgaccggagcactgacgacctcgccgatcgcttgcaggcccgctatccggacgatgggcacgcgagggcgctggtcacccgcatggcgcatgcgttgcaggctgccgaaatgctgagacacagcgacgcgactgccgctgatctgttcgtgcaatcgaggttcggcgccgatgcgacgcatgtgttcggcgcgctgccgtcgtcggaggggctcagccatatcgtcgaacgcgcctccgtcatccgtcaccaagggcccaagtaacatgcgccagagcgaagtttgtgccgtcaacgacgtcagagccgtcgtgggtgaacgggagtgggcgacccgggtcgacctcgcggcgtgctaccgcctggtcgcgctctatggcatgaccgacctgatctacaaccatatcagcgcgcaggtgccggggcatgacgatcagtatctgatcaatccctacggcatgctgtacgaggagatcacggcgtcgagcctggtcaagatcgacatcgagggccggacgctgttgcagcccgatcacggctacaacgtcaacgtcgccggcttctatctgcatgcgccgatccatcgcgcacggcccgacgtgaagtgcgttctgcatacccacaccagggcaggcacggcggtcagcgcgctcgccgaagggctgttgccgctgtcgcagaccgcgatgcggttccacgggcggatcggctatcacgatttcgaggggccggcgatcgatcgtgaggaatgcgaccgcgtcgtggccgatctcggccgcaacaacgtgctgatcctgcgcaatcacggcctgctggtgtgcggcaacacgattcagcaggcgttcaacgcgatctattggcttgagcaggcctgccggatccaggtcgatgcgctcggctgcggccggccgctgcatgcgccgaccgagcttgcaatcggcaacacggtgacctgctttgccggcaccgagatcacgctggacaatgagcgcgacaccaatccgaccatgaacgaagcggcgcagaatctgcaagccggctacggcctgctggaatggccggcactgcggcgccggctcgaccgccttgatgggagctacgcgcaatgagctcgtcgctggcggcgctgccgatcggcttcatcggcgccggccgcgtcgcgcaaacgctcgcgccggcattcgcccgcgcggagctgaacgtcgcggcatttcataatcgcggtgccgatgccgcgcagcggctcggctcccgcatcctgtcggcacggccgatgccggatccgcagcaggtcgttgacagctgcgacatggttttcctgaccgtgagcgacgatgcgatcctgccggtctgccgcgatctgcgctggcagccgcgtcaccgcgtggttcattgcagcggcgcgaccgagctcgcggcgctcgatcatgccaaagccgcaggcgcggccaccggcggctttcatccgatgcagatgttcgcaaatcccgacgtcgcgctcgagggattgcgcggatgcaccgtcggcatcgaggccgagggcgatttcaggcgcgacctggaatggcttgcgacccgtatcggctgcgagccgctggcgctgccggccggcgtgcgcgcgctgtatcacgcctcggcctactatgtcggcccgttcctgatcgcgctgctcaaggagggcgtcgagctctggaagagctttggcgccagcgaggctgacgcgctgcgggcgatgatgccgctgctgcgcggcacggtcgcggccgtcctcgatggcggattggccaacggcatgggcggctgcgtggcgcgcggcgatgtcggcaccatcctcaagcatctccgcgccctcgacgagcgctttccgtcctcgggcgcgctgtatcgcgagctggccctgcgcaacgtcccgctcgggatcgaacgcggcacactcagcgcgccgcgcgcggccgagatcgagcaattgctgctgcggacgcgatcggaactgctggcggcatcctgatccaacaaaaaggccccggttcgctgaaccggggccttgatgtttctgtgttcgctcggatcgcgcctcaggcggctgtcgaagccttcgcctgctgcttggcggcggaggcttcagcctcgtcgcggcggatctcggagagcttcttctggacctgctcggcgaagatgtactgcgccggacgctgcttcgacatgtcgatctccggcgccatcgggcccgtggtcttgatgccgcgcagcgccacccacatcgccttcagcggattgttgatcgcggcagtggctgcggtcggctcgtagccgcaatgcgccatgcagtcggcgcacttctcgtacttgccggtgccgtaggtgtcccaatcggtggtgtccatcagctccttgaaggtcttggcgtagccttcaccgagcagatagcagggcttctgccagccgaagatgttgcgcgccggcatgccccagggcgtgcactcgtattcctggttgccggcgaggaagtccagaaagagcccggaatgcatgaagttccacttcttgcccttgccgagcgcaaagacgtcgcggaacagcttcttggtcttggtgcggttgaggaagtgctcctggtcgggcgcacgctcataggcgtaacccggcgacatcgagacgccgacgccgagctcggtggtgaagtcgaggaatttggcgatctcctcggccggatggccgtcgaagatggtggcgttgacgttgaccgtgaagccacgcgccttcgccgccttgatcgcggaaacggcgcgatcaaacacgcccttctgcgacaccgccttgtcgtgatggtccttcaggccgtcgagatgcaccgagaagaacagatagggcgacggctcgaacagatcgagcttcttctccagcagcagcgcattggtgcacagcgagacgaatttcttgcgcgccacgaggccgcgcacgatctcgccgatctccttgtggatcagcggctcgccgccgggaatcgccaccatcggcgcgccgcattcatcggccgcgtcccagcattcctgcgccgtcatgcggcgattgaggatcgcatcgggatagtcgatcttgccgcagccgacgcaggcgaggttgcaacggaacaagggttcgagcatcagcacgagcggatagcgtttgcggccaagcagcttctgcttgatcagataaccgccgatacgcatttccttgaagaatggtatagccattagacgattttctttctgcacttattcaaagggaagtgggttcagatcagcccgcagtcagttcggccggcagccggaattcgatattctcttcgcggcccggaacgaccgagaccgataccggtccgatgcgccgcagggcctcgatgacatcgtcgaccagaacttcgggtgccgatgcacccgccgtgatgccgacggccttcgcatccttcagccaatccgggttgagctcgctcccatcggcaatgagataactcgcgacgccgacctcggtgccgatttcacgaagcctgttcgagttggaactattggcggcccccaccaccaaaatgacgtccaccagcttactcaggtcccttaccgcagattggcggttctgtgtcgcatagcagatatccctgatgtccgggccttgaatatctgtaaatttggcctgtagggccgcgatgatgtccctggtgtcgtccacggacagggtggtctgggtgatataggcgaccggagcgtcggtcggcagccgcaattccgccacatcctggacgctctggaccagcaggaccggtcccggaacctgccccatggtgccctcgacctcgggatggccggcatgcccgatcaggatcagggcgcggcccctggagatatagcgtttgccctggttgtggaccttggtaacgagcgggcaggtggcgttgagcacgggcaggtcgcgggcttccgcctcctcctcgacgctcctggcgacgccatgggcgctgaatacggtgaccgccttggccggcacttccgacaggtcctcgacgaagatcgcgcccttcttcttcaggctctcgaccacatgcttgttgtgcacgatctcgtgccggacatagaccggcgggccatacttcgcgagcgcgcgttcgacgatctcgatcgcgcgcaccacgcccgcgcaaaagccgcgcggctgggcaagaaacacttccatgggacgtccgttacgcaaattgcaccaatctcatttcatgccctgcggtctttccgacaacgcactccgcccggtcggaccctgcaacgtcggttgcaatgtccgcatcatctcaggtcctgcacgtgatccgcgccctcaagagcatggaaatacagggttttgtggcaaaaaggtagcgccgcgaaggactgcgatgacgatgcgggagggtatttgaggtaatatagtattggatgaggcccctgcgaccgtcggtccccctcacttgttcgtcactttatcgcccactcatgcggtctataccggccactcgtggccgttcctgtggtttggaaccttctcgccgtcccgtcgaggaagataaccaaaacaacattagatcggtccccggaactccgctacagagcgggcgttttcggccatgcttccccgagcttagaaagaaacgaagtgctgacaaatattgtcgtctccgttgttaggacctgtacgcgttttgcccttccggttgtcattctctctctgctgttgtcgatcggcgcaggcttctatacggcccgcaacttctcgatcaacaccgacatcaacaagctgatctcgccggatctggattggcgcaagcgcgacaatcagttcgaggaagcctttgatcgcgagcggctgatcctggcggtcgtcgaggcagcgacgcccgagctgaccagctcggccgcgaaggcgctcaccgcgaggctgcaagccgacaagaagaacttcgaggcgatcaccgcgctcggctccggcgaattcttcgaaaagaacggactgctgtacctgccgaccgaagaggtcggcaaggtcacgggccagctcgaatcggccgcgccgctgatcgaaatcatggcgggcgatccttcgattcgcggtctgaccggtgcgctcgagaccggcctcgccggcgtcaagcgcgggcaggtcaagctcgacaatgccgctccgccgttcaacctgatctcggagaccgtcgagaccgttctcgccaagggcagtgcgaccttctcctggcgcgagctcaccagcgacaagccgctgaccgattcggacaagcgcgccttcatcgagatcaagccgatcatcgactattcggcgctggagccgggcaaggccgcgaccgacgcgattcggcaggcggcggccgatctgaaattcccgaccgaatatcacgcgcgcgtccgcctgaccggacccgtgccgatcgccaacgaggaatacgccaccgtgcaggacggtgcgatcaccaacggcatcggcaccgtggtgatcgtgctggtgatcctctggctggcgctgcattccggcaagatcatcttcgccgtgttcgtgaacctgttcatcggccttgccctcaccacggcggtcggcctgatgatggtcggctcgctgaacctgctttcgatcgccttcgccgtgctgttcatcggcctcggcgtcgacttcggcatccagttcagcgtgcgttaccgctccgagcgcttcaagaacgacaatctgacgctcgcgctcgagaacgccgcgcgccgctccgcggtgccgctgtcgctcgcggcgatggcgaccgccgcaggcttcctgtgcttcctgccgaccgactacaagggcatctccgagctcggcaagatcgccggcgccggcatgctggtggcgttcgtcaccagcatcacggtgttgccggcgctgctcgacctgctcaatccgcccggcgagaaggaggcggtcggctacgccttcctggcgccgctcgaccacttcctggagaagcatcgcgttccgatcatcgccggcacgctcctggtcacggtcgcgggcctgccgctgctgcactacatgaagttcgacttcaatccgatcaatctgcgcaatgccaaggtggaatcgatcgcgacattcctcgatctgaggaaagatccgaacaccggcgccaacgccatcaacgtgatgacgcgctcggaagccgacgccaagaagatcgaggccaagctcgagaagctgcctgaggtgtcgcgcgtgatgtcgctcgacagtttcgtgcctgatgaccagccggcaaagctgaagctgatcgcgcaggccgccaagacgctcggccccgcgctcaacccggactcggtcgatccggcgccgtcggatcaggagaatgtcgagtcgctgaagagctcggtcgacagcctgcgcaggaccgcgggcgacagcaagggaccgggtgcggttgccgcgcgccgactcgccgacgccctgcaaaagctcgccgattcgaaccaggcgacccgcgacaaggcgcaggacgtcttcgtcgcgccgatgaagatcgtgttcgatcagctgcgcaatacgttgcaggcacagaccgtcacgctgcagaacctgccgcaggaactggtcgagagctggaagaccaaggacggcctgatgcgtgtcgaggtcgagccgaagggcgatccgaacgacaacgacaatctgcgccgctttgccgacgccgtgctcgccgccgagccgaccgcaatcggtggaccggtctcgatcctgaaatcgggcgacgtcatcgtgaaggcgttcatccacgccggaattctggcgctggtcacgatcagcctgctgctctggctgacgctgcgccgggtggtcgacgtgctgatgacgctggtgccgctcttggtcgccggcatcgtcacgctggagatctgcgtgctgatcgggctgccgctcaacttcgccaacatcgtcgcattgccgctgctgctcggggtcggcgtggcgttcaagatctactatgtcacggcgtggcggcagggcaggacgaatctgctgcagtcgagcctgacacgtgcgatctttttcagcgcgctgaccacggcgacggcgttcggcagcctgtggctatccagtcatcccggcactgcgagcatgggcaagctgcttgcgctctcgctcgtcaccacgctggcggccgttctgctgttccagccggcgctgatggggaagccgcgcgaggccctcaaggaggaggatatcgccaacgacgtcacctgacgcgttcgcgatccactgccgatccggcttggcggcaggcgctgccaagccaccatttgccgccaggcagtgatgcgccgtctggccgtgatcagtgcgtcggtcgcgcgatgtccggcagcaggcagatatcgcctacggtgtccgccgacgcattggcggtgcccgggggggtggctgcctgcttttgagccggcttggcggcaggcgccacggcgccggtggtcttctgcggcgctgccggtttgggaagggcgcccttcgcagcaggggcccctgcgggggccgggttgccggcggcgctcaccgggatcggcggaccgacgcgggtccaggtctcgccgccgcacaggaatccgagcacgcagccctggatctcgagctggtcggtgccgaccggcttgatggtcgagctgtagagctgaccgtccttggcgttgtagacttggccttcccacgcatcggcgccggccttcttcttcatgtcgatcaggatcggcatgccgagggtgggcctgctctgcttggccggatcaggattgttcttatccttaccgccgggggttttttcccaggacaccacaccccacatgttgccattgcactgggcgacgcggatggtggcgacaccgtctgcgaccttccagtcgccggtcgggtccgctgcaagcgccggtgataatacggtggccaaaaataaacctgaaacggctattgtacgtgcgaatgttcttgggcagtgcaacatggtccaaacctgtgcttaactagacgatccgagcgggggtcaaaacgccgctagcgagcgttttaagttgacgagatggccatcaaccgacgtatgtaacgaatggtaagttccaatttagacgtttccgagatttttgtggagcgcgaggggcagcgcggtgccatgcacacgcgtcatctcaacgagcagctcgttcgcgtcctcaagaccatcggctatgacgtcggcttccagaaggggcaaggccagtacctgttcgatcgtcagggggctcgttacctcgatctattgagcggatttggcgtttttgcgattggccgcaatcatccggccctgcgcaaggcgctcaagagcgtgctcgacgccgatctgcccaatctcgtgcagctcgacgtctcgacgctcgcgggtgtgctcgcggaacggcttctggagcatgttccatatctggacaaggtgtttttcgccaattccggcgccgaaacggtcgaagctgcgatcaagttcgcgcggggcgcgaccggccgtccgggcatcgtctattgcgggcattcgttccacggcctgtcctacggcgccctgtcgctgaccgatgattcgaatttccgcagcggcttcgaaccgctgctgccgggctgcacgccgatcccgttcaacgatctcgaggcgctggagaaggcgctgtcgtcgcgccaggtcggcgccttcatcgtcgagccgatccagggcaagggcgtcaacatgcccaccgacgagttcctgcccggcgcgctggcgctgtgccgcaaatacggcacgctgttcatcgccgacgagatccagaccgggatcggccgcaccggcaagttcctcgcgatcgagcactggggcatcgagcccgacatggtgctgctggcgaaggcgctgtccggcggccacgtgccgatcggtgcgctgctgacgcgcaagaacatcttcgacaagatcttcaaccagatggaccgcgcggtcgtgcacggctcgaccttcgccaagaacgatctggcgatggccgccggcatcgcgacgctcgatgtcatcaaggccgagaagctcgtcgagaacgctgccaagcgcggcgccgagctccgcctcgcgctgacgcgcatggtgccgggctatgaactgatgaaggaagtccgcggcaagggcctgatgatcggcgtcgagttcggcccgccgaaatcgctgcgcctgaaggcgtcgtggaacctgctggagaccgccaacaagggcctgttctgccagctcatcacggtgccgctgttcaaggatcacaagattctcacgcaagtcgccggccacggcctccacaccatcaagctgctgccgccgctgatgatcaccgaggaagactgcagctggatcgagaagtcgttcgacgacgtgatcgccggcagccacaaggtgcccggcgcgatctggtcgctcggcaagacgctggtcgacaacgcggtgcgcaagtcggcgtaagccggggttctcgaaacttgcgggactgttcccggattgcgccacgctccatccgggctacacggtcatctcatccgtcattgcgagccaccgggtcggcgcgcagcgccgcccgatgccaggttccgcgaagcaatccatcgcacggcgggctgagatgtggattgcttcgtcgctgtcgctcctcgcaacgacgattggtgggtcgaatcacccttccttgttcgcgcgcatcgcgctctcgaacttgtcgccgaactcggtcagctcgtcggcgccgagatcgctgaccgcccagtaattcaggccgcggtcgctccagcgccggatgttgaagccctgcaaggtcgagaccttcgcggtcttgcgttcggtactggcggtctgcgccacgaacaggttgatcacgtgctggcgccgcttgtagaccacggcgccgatctcgcgggcgttgacgtagtcgagccggccgccgatcagcgtgaagccctgcgcggtgaggtcgatcaccggcggcgagacgtcgagcttgccgttgaaccagggcttgaccgtatgctgatcggtcgagaccacgtcgatcagatgaccggcctgcagcgagcgcagatgcgccgacaccacctcgttctcgatgcgctgctcgtcgtcgttgcgcagcacgatcgcgaccagccccgtcgcggccatcgccgataccgccgagcccatcgcaaagccgcgcagcaccgagcgccggctcggcgccgcctgcggctgcggcagcgccttctcgatcttgcggcgcagctcgagcggcgccttgtagcgcaggtcgctctcggccatcgcctggcggatctcctgatagtccttcatgagagcggcgcaatgcgcgcacccctcgacatgggcttccacttcgcgtgcatggccggcgtcgagttcgccgtcgatcagcgcgtggatcagcacttcggcttcctcgcaggtcatttcgcttgctcctgttccgcgagccaggctgatcgcagcatggcgcgggcgcgcgcgagacgggacatcacggtgccgaccggcacggcggcgacatcggcgatctcgcggtatgaaagattctggatttccctgagcacaaaggtctcgcggaacggctcggcgagcgccgcgaccagcttgcgcacggtgtcgccgtcgaagcggcgcagcatctgcttctcgggtgtctccggggcttcgttccacatcggggtctgatcgccgccctcgggcagctcctcgaccgcggtgggggcggtcttgcggcgggcatattcggcgcggcagacattgcgcaggatcgcgaacagccacggtttcatcgcaggtccgcggtagctgtcgaaatgcttgtaggcgcgcaggtagcattcctgcaccgcgtcctccgcatcggcggcatcgcgcagcagatagcgcgccagggtgtaggcgtcgtcaaggtagggcagcgcggcctcgcggaagcgccgtgccttttcgggatcgtcttgcgacgcgttgacaaccatcgtgtcctgcccggctggtcgagagacggcttgtgcccggccgggggctgagggccaccggccgggcatggctgtgattgtatggctggtcacgttacccaaccttgatactgcctgtcatgtgcggatgcagcgagcagaaatacttgtactcgccgggctccgtgaaggtgaacgagaaggtgccgtcggtatccatggtcttggagcggaatttccccgcgcacaccacggtgtgcgggatgtcgtcgcggttggtccaggtcactgtcgtgccgaccttcacgtcgagcgggttcggcgtgaacgagaaattgtcgatgtggaccgcggtgtcttcggcgcgggccgcagtgaccggcagcaacatggccgcgaccacggcgatcccgaagtcgcgtcgattgatcgtactcatcgtctctttcctcagccggatccgtcagccttgcagcggcgtgtcgatgatcgccagcggctggctgttctgcttgaagttgatgctggcgacgccgagcatgctgcgcagcttggcatcctcgaccttcatcgggccgggcgagggcgcggcacccggcgccggctgcgggaaggcggtcgaacgcgcggtgtggaaggtgacgttgccctcgaccttctgcatcacctggtggatgtggccgttgagcacggtgaccgagccgaagcccttgacgtattccagcgcgcgggcgccgtcctcggtgccccagccccattgcggatagaccgtccacagcgggatgtgggcgaacagcacgatcggggtcgacttcgaacggcccttgaggtcgttctccagccattccagctgctcgttgccgagattgccgaggccgccgcccttgaggtcgacgacgttgacgaggccgacgaagtggacgccgccggcgtcgaacgaatagtagcccggacccttggtgcccttgccgtagcgctccttgtagagcttgacctcttcgtcgatgaagtcgtgctcgcccggcacgtaatgcacgtcgagcttggcctgcgagatgatgcgatcggcgtcgtcgaattcggacgccttcgacagatgcgtgatgtcgccggtgtggatcatgaaggacggcttgacctgcatccccttgaccttgttgatcgcctcctccagcgtgccgatggcgttcggattggccggcttgtcgaagccgacatggctgtcgctgatctgcatgaaggtcatgccggtcgcttccgcggccttggccgagccgacgatgccgagcgaatgcggcacgccgccggtgacggtccacagcacgccggtgccggcccaggtcatgcattccagcaccttgcgtcggctgacgcctttttcctcatcgtggtgattgtgatcgtgtccgctcatgacaagtctcccgtggtcccagggattgggtttccggggaggtgatcggcggccccagggctttattcccgcggctttggagagggttgagggaggggatgacgatttcgtgagagcccggcggcccaccatacgggccagcccgcgacaggtggccgcaagggcgagatgcgccattgaaggcgtcggggctgcaacgttatcgaccccggcaaacccctgataagttggaggaaaccacgggcaatgtgaccggcggctgtcactgcggcgagattcgttacgaggtcaccggggaaccggtcgtccatgcgctgtgtcactgcaccgattgccggcgccacgccggcgcgccgctggtcggctgggtgatggtcgccgaggacgccctcaaggtgaccaggggcgagcccagggtctaccgatcctcggaacacggtcggcggcagcaacgtagatgaacggccgcaacaaagctgtcttgcagccgtcagcataatgtcagcgctcctgcttaaagatggcggacttcactcgccagaccgggagatcatcatgagcgaccacgcaggcgttgagcattaccacaaggcagccgagcatcacgagcacgcggcgcgtcatcaccgcgaagccgccaagcaccacgaagagggcaatcacgagaaggcggcgcatcacgcgcacagcgcccatggccatgcgagccatgcccagcatcaccacaccgaagcaagccggcatcacgccgagcaccacggcaaacaccaataacaagttccagtactgcgtgagtggcttccgccgtccccgcaagggggcggcgttttctttgggctgggtgacggcagccctcaagcatgatccggaaaagtgcgaagcgattttccgaaaagatcatgcttaaacaagaatctaaagcgcgatgacgattcaacatgatctcatcgtgccttagtccgcgcgcgcggcgaacgtccgaaccgccgcaatcatcagctccggcgcctcctgcgcgacgcaatggccgacgccatcgaaggtccagcggctggtgtacgggatcagggctgcggcgcggtcggccatctccttgtagatcggccatgactgttcggcggtcgcgatgcggaccgggcaggcgatctcggagaaccacgggaacggattgccgcgggaatcgccggtatagatctgctccatggcctggaagatcggcctgagcatcgcctgttcgatttcgggcgtgcagcgcagttgcatgcggccgtcatcgagccgcgcgaagccgtgatgcacataggcccacagcgaccgctcggtccacgtcgcgaaggttggcgcggcgcgcagccgtcggaacagatcttcggcattgtcgaattcggcgcgacggcgcagcacgccttgcagtgacgcgttcgagatgccactcaggtcgccggcgcgcggcgcgtgcgggtccatcgcggtcggctccgtcacgaacagccgagcgaagcggtccggcatcaacttcgttgccagcagcaggtcggtcgcgccggcgctgtggccgatgccgtagatgtccttcaggtccatgcgttcgaccacggtacaaacgtcaccggcgaaatcctcgaagtgatagcgctcggtggggggcttgtggctcaagccgtggccgcgccggtcgtacgcatagacggtgtagtcggcggcgagcgcttccgcgacctcggtccagacctcggcgacaaagccggtgccgtgcagcagcagcgccacaggcttgcccgaggcgggatcgccccatcgcttcaccgcgacctgcgcgccgacatcgccaaccagaattcgctgcggctgcgtcatgaattgctatcttgcatccctgaggatcatcgccgcgcccttctcggcgatcatcgcggtcggcgtgttggtattgccggaggtgatggtcggcatcacggaggcatccgcgatgcgcaggccgtgcaggccgtagaagcgcaggcgttcgtcgaccacggccatcggatcgttggccgttcccatcttcgcggtgccgaccgggtggaagatcgtggtgccgatgtctccggcggccttggcgagcgaggcgtcgtcgtcgccgaccgaggggccgggcaggaattcctcgggatgatattgctccagcgccttctgcttcatcagtctgcgcgtggtgcggatcgcgtcggccgcgacctggcggtcgtcgtcggtcgagaggtaattcggcgcgatcgacggcttgtcgtcgggcgcggtcgatttgatccgcaccgtgccgcgcgagctcggttgcaggttgcaggcgctgaccgtgatcgcggggaagcgatgcaggggatcgccgaacttgtcgagcgacagcggctgcacgtggaactggatgttggcgcgcgagcgcgtcgcatccgagcgcgtgaagatgccgagctgcgacggcgccatggtcagcggaccgcggcggcggaacgcgtagtcgaggcccatcaggccgcgccggacgaggttgtaataggtctcgttcagcgtgcgcacgcccgacaccttgtagatcgcgcgctgctgcagatgatcctgcagattgtggccgatgccctgcatgtcagcgacgatgtcgatgccgagcggcgacagccattcggacgggccgatgcccgagcggtgcagcacctgcgtggtgccgatcgagccggcgcagagaatcacttcgccccgggcgcgcgcttccacagtctcattgccctggcggaacagcacgccggcggcgcggccgctctcgatgatcaagcgatcgaccagcacgttggtttccagcctgagattgctgcggttgagcaccggcttcaagaaaccgcgcgccgacgaccagcgccggccgcgcttctggttgacgtggaagtagctggtgccttcattgtcgccggtgttgaaatccgcaatccgcttgatacccatctcctcggcggcatcgccgaccgcatcgaggatctgccacgacagccgcggcgcttcgatgcgccagccgccgccgacgccgtgatgctcgcttgcaccgaggaagtgatcctccagcttcttgaacgccggcagcacgtcgctgtagctccagccggtgaggccgagctgccgccagtgatcgtagtctgcggcctggccgcgcatcgagatcatggcgttgatcgccgacgagccgccgatcaccttgccgcgcggataggcgagcgcacggccgttgaggcccggctcggcctcggtcttgaacatccagtccgagcgcggattgccgatcgcgaagagatagccgaccgggatatgaaaccagatccagttgtccttgccgccggcttccaacagcagcacgcgcttgctcggatcggccgacaggcggttggccacgatgcagcccgccgtgcccgcgccgacgataatgtagtcgaaatcaccctcgagccttcgcggcatgtcctcgttcccggcaagcgtcttttgttgacgtctattagtcagacgccgccggtcgagacaagcccggcagtggataccgggcgtgcgctggatgatcagggacggctcggtgcgggctatgtgacctgatgtctcgctcggggaacgcagacgatcagcatcagcgtgccgacgccgggcaccgcgagcacggccgtcatcgacgtctttcgccaattcgaccttcgatggcttttcacgcctgtgccgaacgaataggctttcgttgcattggccgcctcaattgccaagctcaacttgccggaggattcccgtggcagacccgatccgcgccccattctaccacgatggaatgcgtgagctgcaggaccgtttcgacggccgccgcgtcgccgacggtcttgagaagcatcgtctccacttcgaattctgggagcaggaccgcaagctcatcgaagagacgcggttctttttcgttgcgacgagctatcaggacaacgtcgattgctcgatgcggtccggcgatccaggcttcgtgaagatcaccgggcccgacacgctcgagtaccccgagtatgacggcaacaacatgtaccgcacgctcggcaacatccaccgcaacccgaatgtcgggttgctgttcgtccgccttgacggcaagacgtttcgcacgcgcatccgcggcaaggcaacaatcgacgacagcgtggaagcgcttgcccggcaccatggcgcgaaggtcgtcgtgcgcgtcaagtgcgaaatctttcccaattgcccgcgctatattccggacctgatgggcgcttcagctgatgtgccggcgaatccgttcgttcctcggcccggatacgagccgcccgcccccgaatggaaaagccgggattatctcaaggacgtgctttcgaaatacgatccgcatcggaaaacgtgaggtttagggcagcggcgccatgtagggaatgctggcgaccagcgcgaacacctggaccgcattgcacagcatgccgccccaatgcagccggcgcagccgccgcaccgcggtgggatcacctgaatctctcgcgtctgcttcggcatcgagccggcgtagaaaccatcgccgcgccagcacggcgaaagcggcgatcaatgcgatgcaaagtgccgtggtcggccggcccgccacggcaaaggcgagcgtcccgatcacgccggagatggtcagcaccaggaagtaggcattgaacatgccgcgcagcaggtgggtgaccggcgggaggtcgagcttcacaagcaggaacgccggtgccgccagcaggaagtaacccatcggcaccagcagaatgatggtggagaaaaggaccgcctgatccggcgtcatgcagccgccccttctttgaaggtggaggatttcggtgcgaaaacttcaagtagtatccacgcgggatatttcgcgcaccattgggctttggtcgaatgggatcgtatcagtcctggccctcacaggcttgcgcaaaaaggcgcgcgatgccgtgtccgaagaccatgtcgtatcccgtttgcgaatgcaggccccagccggcggcatgtcacatctgtttgggtggaccggctcttgcatgctaagaggacttacgtctaacctctgaggccagaattcccatgcccatcgtcaatcgcgtcgccgatctgcaacccgatatccaggcctggcgccgcaacatccatgaacatcccgagctgctctacgatgtgcaccgcactgcatcattcgtggccgaccggctcagggaattcggttgcgacgaggtcgtgaccggtctcggcaagaccggcgtcgtcggggtcatcaagggcaagaagggcgcggccaagggcgacgtcaaggtgatcggcctgcgcgccgacatggatgcgctgccgatccacgaggaaaccaacctgccttacgcctcgaagacgccgggcaagatgcacgcctgcggccatgacggccacaccgcgatgctgctcggcgcggcgcgctatctcgccgagacgcgcaatttcgccggcgatgcggtcgtgatcttccagccggccgaggagggcggggccggtgcagccgcgatgatcaaggacggcttgatggaccgcttcggcgtccagcaggtctacggcatgcacaacggtccggggattccgatcggctcgttcgcgatccgctccggcccgatcatggcctccaccgacgaggtcaatatcaacatcgaagggctcggcggccacgcggcgcggccgcacaaatgcatcgattccgtgatggtcggcgcgcagctcatcaccgcgctgcagtcgattgtgtcgcgcagcgtcgatccgctcgattccgccgtgatctcgatttgcgaattccatgccggccatgcccgcaacgtgatcccgcagaccgcggtgctgcgcggcaccgtgcgcaccctgaccccggaggtccggcagttgatagagaagcgcatcggcgaagtggtcaagggcgtcgcccagctgaccggcgcccggatcgatctcgactacaagcgcggctatccggtcaccgtcaaccacgcctcgcagaccgaattcgcgacccgcatcgccaaggaagtggccggcgacggcaacgtgcatacgatgccgccgctgatgggcggcgaggacttttcgtacatgctggaagcgcggcccggcgccttcatcttctgcggcaacggcgacagcgcgggcttgcatcaccccgcctacaatttcaacgacgaggcgatcgtgtacggcacctcgtatttcgtgaagatcgtggaggacgcgctggcggcgtgagcctcacgcgtcccagcgcaccggcagcgtgaccgggccgcggaacacccagccgcgaacgacgggcggcgtctcctcgcggaggcgcagattgcgcagccggtcgaacagcatcggcaccacgatcttgccgacggtgagccgcgacacccaggtgccggcgcagaaatgcggcccggcgccgaacgccagatgcgattgcttcggccgcgtcacgtcgaagcgatcgggctcggcgaagcggctgtcgtcgcggttcgccgcgccgacgcagaggccgatctgaaggtcgcgcggcagcgtggtgccggagagttcgacatcgcgggtgacacggcgcggatacatgccgatcggcgagatccagcgcaccgcttcctccagcgctgcgggccacagctcgggcctggccagcacgttgtcctgctgcgccgggttttgcaggaggccgagcacgagggtcaggatcgcatcgcgcggttcgttcagcccgccgccgatgatcaccttgatgttggcgcggatgccctcgagcggcatcggcggctcggcattgaccatcgaggacaggatcgaaggattcggctggctgcgatgatcgtcgagcaccgcgtcgatcgcggcatcgacatcggcgctcgcccgcatcgccttgcgttcgacctcggcatcggcggcgtaattgccggcgccgtcgatcagcgcctgcgaccacgcggccagcgtctgccacggcatcgcgcgaaacccgatcatcgccatcaggctgagcgaggccatcggagcggccagcgcggagaacagatcggcctcatcggccgcggacagatcatcgatcagcgtgttggcgatcgcggtgaatttcggcgcccagtattccttgatcgtggccgggcggaacgagggttcgatcgccttgcggccgatcgcatgctcggcgccgtccttgcgcatgaaggtcggccccatcaccttgttgaccagcgaggccggattgtcggcggagtaggtggcgggatcgcgctcgatcctcacgatgtcgtcgaagcgcgtcaccagtgtcagcttggcgggctcgacgaagaccgccggcgccatctcgcgcaggcggcggaagatcggataggggtcgtcgagcagatcccgatacgagacgtcggtgacgacgggcacggcgtaggtcattggtcctcccggagcgctttttcggaaaggctagcgccggacgtgcaatcgctcaattcgattgagttgatctaggccatcgaaatattgaatgaccttgtgctaggctgggcaccggcaaggcgggaggtgcagcgtgacggccaattcctcgatcgatccgatcgacatcgggatcttgcggacgctcgtgctggtctatgacctgcagtcgttctccgcggcggccaagcgcctcgacgtcaaccagtccaccatcagctatgcgatcgagcggctgcgcggcgcgttcggtgatccgctgttcgtccgcaacggcaacggcgtgacggccaccgagcgctgcgcggcgctggtcggctgggcgcgcgacatgatcggcgagatcgacgggttggtctcagcggtcgaattcgatcccgcgacggcgcagggcagcgtgacgatctcctgcaatcatcacgaacgccagaccctgatcccgcagttcagtgcgcggctgcgtgccggcgcaccaagaattcgtctggtcctgctcgacgccgcgggccatggcgacgtccatctcaagcagaaccagtgcgacatcgtgcttggtccggtcgggatcgtcggtgaaagcatcttcaggcgtcatatcatgaccgatcactatgtctgcgtgatggatccggccaatccgctggcgcggagccggatcgcgctgtcggcctatgcgagggccgagcatgtcttcatcacccatagcggcgagtggcagccgctctacctcgaggcgctgaagacgaggaagatcgagatcgagccggtggtcagtcttcccaaccacgacagtctggagcgcatcatcgccggcacaaggctggttgcgaccattccgcatcacctggcacgggcgatgcgcggcgggctgcacgtcgcatcactgccgttccgcgtgccgatctcgatcgacatgtattggggcgccaggacggcgaaatcgggcctgcacaaatgggcgcgcggcctgctcgccgaggaagcgagggcgtacgcggcctgagccggacgttcaaatgcaaaaggcccgcacctgacgtgcgggcctttgtcgtccggcgcgtcgccgcgccgaaggcagggggcatcagaacacgtggtagaacacgtagtacaggcagcccgagaggatcatcgcggccggcagggtcagcacccaggccattgcgatgttgcggatggtcgcccattgcaggccggagccgttggcggccatggtgcccgcgatgcctgacgacagcacgtgcgtggtcgagaccggcaggccgtagccgtcggccgccgcgatcgtcgcggccgccgtgatctcggcgcaggcgccctgcgcataggtcaagtgggtcttgccgatcttctcgccgacggtgacgacgatgcgcttccagccgaccatggtgccgaggccgagcgcgatggcgacggcgaacttcacccagctcgggatgaacttggtcgcggcatcgagcgagcccttgtactcgttcagcgtggcgacgtcggcggcggtcagttcggcctccttgtccttcatcaggaagcggatcgcctcggaggccaggtacatgtcgttacgggtgttgcccaccgcgtcagccgggaacttggccagcgagccatattgggcaacctgctggccgatgtcgcgcaccagcacggcgagcgaaggaaaggtgccttcgttgatctggtgctgcgcgacataattggtcacggccgggcgcggattgccgatcacgttgtagccggcggccttgccttcgatgaccttgctggccgcggtcgagtgcgcggcgaactgctcgatctggcttgcgggcagcgcgcggttcagcgcataggcggtcggcacggtgccgatcaggatcagcatgatcaggcccatgcccttctggccgtcgttcgagccgtggaagaagctgaccagcgtgcaggtcaggatcaggatgccacggatccaccacggcggcggctggttgccgaccggctcgccgaacaacgccggcgtcgcgcgctgcagcgcgatcttgaggatatagagcaggccggccgcgagcgcgaagccgaacagcggcgacagcagcagcgccttggctatgttggtcgcctgtgaccagtcgacgcccgaggtgccgtcacggccgcgcagcagcgcgttggtgatgccgacgcccatgatcgagccgatcagggtatgcgagctcgaggccggcagaccgagccaccaggtgcccagattccagatgatggcggcgatcaagagcgcgaacaccatcgcaaagccggcgctcgatccgacctgcagtatcagctcgaccgggagcagcgacacgatgccgaacgccacggcgccgctcgagagcagcacgccgaacaggttgaacatgcccgaccacaccacggcgacatgcgccggcagcgagcgggtgtagatcacggttgcgacggcgttcgcggtgtcgtggaagccgttgacgaattcgaagccgagcgcgatcagcagcgcgacgaacagcatgatgtacggcaggaacgacgtgacgcgcgtgccggtggcatcgacgtcggcatagatgctgtaggcaacgaacagcagcgcggccgcgaccacgcccaaatagataatccccgtcatggggtggaagcctttgtcgaggtccggaccctttttcaaggcgggctcgatcgagccgggtaacgccatatcgctcatggtaaactcctgtcccaatgcctccgattttgatccatgcatatgacaagcaattgaaatcaggtccgtgaattgcgccggcgatccgcggtggcggagatcgagccgaatatttgtgcaacgcattgaaggcccacgcgccttcgcggcctcgtggcaaccttcagcaacagaaggtcagtgatgacagcgacgaggcccgcatttgttccgcaaggcaagactgtgtgcgggtgaggtcacactgagcaggcaacccgccggcgggcatttggcggcaggattctgtcgaccggaaatccggcgagacgtcggcggtgatggtcgcggatggtggaagtgcagaaaggagcggggagcaggatggaaggatgaggtggcgcgccgcacgatcggggctagcaaaccgcgcagcgcgcccgcctcagggtacgtcatggcgtgaacatgacgcccgatacctgcggaacacgtcacagtaccacggatcaattaaaggttgtaggtatttgtccgtgttgaggacaatttcacgtcgaagtgtggttactccggttccgccggtccgccggtcttgcggaacttcaggccgaattgcgcaaccgatctgcggcgattttcaggtcgtcgataaagcgctgatattccagcgccttagccttttcgtcgggtagccgcaacaggtaggacgggtgcacggtgacgagcaccttggttccgtcttggtccatcaggcggccgcggttcttgttgacgggtgtgatcttgcccagcacgcattgcgctgcggtggcgccgagcgccaccacgagttccggcttgatggcggcgagctcgcgctcgtaccactgccggcaggcgcggatctccggtgtggccggcttctggtgcagccggatcttgccgcgcggcacgaatttgaagtgcttcaccgcgttggtgatgtagaccccggcgcgatcgatgccggcttcccgcagcgcgcgatcgagcatctgcccggccggcccgacgaagggatggcctgcgagatcttccttgtcgccgggctgctcgccgaccagcatcagcgtggcgctttgcggtccctcgccgaacacggtctgggttgcgtccttccacagcgggcaggcgcggcaaccgacggcctcgtcgcgcagcgcagcgatcgtgtcgtggactggcgcatcctggacttgcttgcgggccatcggctcatccggccgcttctgcggcttatgcggttcggtcggctggttcgcgatcatcgcgccggtggtgcgttccgcgctcgcgatcaatggcttaatcagcgaggcctccggcaggttcctccagtatttctgcggcatctcggtttgcatcgctttcaccttcagccgcgccggattgaagatcgccgcgtaatagcttcgccaggtttcctccagccggtcctggctgggcgcctcggatttggcgacgcccggcgtgatcgagatcgcgtgaccgtcccaatgcgcgcagacatcgggcgtcaggattgaccaaggcatgtcggcaaagcgtttggcgaagaatggcgcagcaagctcgacgatatgatgctccggttcgaaccaggcgacgaaatgcgtattcacgcgcccgacctcgcggaagcggacgaaggcatgcatcttatgttcatcgcgatgcaccgcgcgtgccatcgcgctgatctccgagacatcgcgatcggtggcgacgtcgagcaggtcgtgatcgccgcgaatccgccagagcaggcgatagagcagggcgaagcgttcggagttgcgatgcaggatcgcagccttcgccagctcgacgaatttgaccggcacgttgaaggtgccttcggtcgtatcgggcaagtggtcagcttccgtcgccgcaaacaattccggctcggcattgcgcgcgatccacgtcacgtcctgcggcttcaccccgttcaatgccagctgccgtgcggcttgccgccagccgtcgaagttggtttcgctgtcgagggtgacggtgtgcatcaaaacccaaacccgagttgcgtcgccttcggcttgaatcgctcgaccagtccggccgtatccagcaagcgtgccgacgggcgatggtcactgagaacgatgaacggcagtgccttgttcctggggatgtgcagccgtgccagatcggccacgcggatcgaggtgatgcgccgcgtcgcgatgatgcggtcgactgccttgcggccgaagccgggcacgcgcagcaattcctcgcggctggcgctggcgacgtcgagtggaaagcgctggcggttgcgcagcgcccaggcgagcttcggatcgatgtcgagcggcagcatgccgttttcgtgtccatcggcgatctcgccgacatcgaacccgtagaaccgcatcagccagtcggcctggtagagcctgtgctcgcgcaccagcggcggcgcgatcagcggcagggcgcggctggcatcgggaatcgggctgaacgccgagtagtagacgcgcttgagcctgtaggcaccatagagattagcgcttgttgtgaggatggtctggtcgcttgcgccatccgcaccgacgatcatctgcgtgctctggccggccggcgcgaagcgcggcggccttgttttcgtcgcgggcttttccgcggcttcgtcgagcttcagccgtagtcgtcccatggtgcggcggatcgcgcggacgttcttctccggcgcaagcttggcgaggctggtctcctccggcacctcgatgttgatggagaggcgatcggcatatttgccggcctcagcgatcagcgtgtcgtcggcttcgggaatggtcttcagatgaatgtagccgcggaagtggtgctcctcgcgcagttttcgcgcgacgctcaccacctgttccatcgtgtagtcggcgctgcggatgatgccggacgagaggaagagtccctcgatatagttgcgccggtagaagtcgagcgtcagcttcaccacctcgtcgatggtgaagcgggcgcgcggcacgttggaggaggcgcggttgacgcaatacaggcagtcgtagttgcaggcgttggtgagcagcaccttcaatagcgaaatgcagcgtccgtccggagcgtaggaatggcagatgcccatgccgggcgcggtcgagccgaggcccctgccgtcgctggaatcccgctgctcggtgcccgaggaggcgcaggaggcgtcgtatttcgcggcatccgccaggatctccagcttgcgttgcacgtccatcatgaatccctttgattccactgatgaatcagaaaaatccgtaatccgattgactcatcaggccctgttagctttatattagaacatatcatgaacaaatgagccagtccctggttctctgttcagaccagtgacggcctcaaattttggttgagaaggagcggcgcaatgaacagcgcacgcacgggtacgcttgcgtctctgcgcggcagcatcgcgcgcatcgaggcgccatcggatgcggcgatgccgaaccgcatcgcgctcggccacgccggcgcggacgcgatgctgcgcggcgggctcgcgccggccgcattgcacgaggtgttcgcggccggccatcaagcgggcgctgcgaccggcttcatcgcggggctcgccggacgcgtgtcgacgcgcaagccgctggtctgggtgcggcaggatttttccgatcgcgaaaacggcgcgctgtcggtgcgcgggctcgccgagctcggcctcgatccgcgtctcctggtcacggtgcgcgccgccgatgtcgacggtgctctgcgcaccgcggccgacgcgctggcctgcgacgcgctcggcgctgttgtgctcgaggtctggggcgaagcgcgccagctcgacctcgtcgccagccgcaaattgaccctcgccgcgcaagcctccggcgttaccgcgctgatgctgcggatcgcggcaactccgattccctcgaccgcagagacgcgctggatcgtgcgtgcggcgcattcgccgcccggcaatgcctcaagcgcctggggcgcgccgcgcttcgacgccgagctcgtgcgcaaccgtcatggcccggtcgggcgatggatcatggaatggaaatgtgatgagtgccaattcagtgaaccgtcggcgtatcctcagcctgtggctgccacgcctgcccatcgaccgcatcaagcgcaagctcgcgcaggacatcgcctcgcaagctgagacgcgagaggtggatgaaccacctgccagtgaggtaagcacatcggctgggctctctccccccttgcgggggagagttggagagaggggtagccacgagcaccgcccgagcggctcacccctctccctagccctcccccgcaaggggggagggaacccgtccgctgatgcgtcccttacgaatgccatgagcaacgatctccccagcgttgtggtcgcaaaagatcacaacgcgatcctgctgcatgccgtcgacgaggccgcaatgcgggccgggctgtcgatcggactgccgctggccaatgcgcgcgcgatctgcccggagctcacggtctacgacgccgatcccgcagccgatctgaagatgctgaacgacatcgccgactggtgcgaccgcttcacgccgttggtcgcgctcgatccgccctatggcctgttcctcgacatcaccggctgcgcgcacttgttcggcggcgagcgcgcgctgctgcagatcgtgacccatgcgctgagccggcgcggctttgccgtcagcgcagcgattgccggcacctcgatcgcggcgcgcacgttgacgcgccacatctcgggcaagatcgtcgccagcggcgaggaagcgcaagcggtcggcccgctgccggtgtcggcgctcggcgccgatcccgctgtcaccaccggcctgcgccgcgccgggttgaagaccatcggcgatgtcgccgcgcgtgcgccgcacgagatttcggcgcggttcggttcggccttcaccaccttgctcggccacgcgctcgggcagggcgatgccccgatcagcccgcgcaagccgctgccggattacatcgtcgagaagcgtttccccgagcccgtcgccaccgacaccgtgatcgcgctgacgctctcaagccttgccgatatgctggttgcggcgatggacaaacagggcaagggcgcgcggcaactggaggcgagcttcttccgcaccgacggcaaggtcgcggcgatcatggtcgagaccgggcgtccggtgacgcggcccgagatgatcgatcgcctgttccgcgaacggctcgatgcgctgagcgatccgctcgatcccggcttcggcttcgatctcattcgcctcgccgcagggcgtaccgaaatcgtggtgcagcagcagcgcgacctcgacgccaccgtgcatgacaatgacgagatctcggcgctgatcgaccgcatcgccgcccgcatcggcggcaagcgcgtcgtcgtgcatctgccgctcgaaagccatatccccgagcgcgcggcgctcgcgctgcctgcgcagcatcatctggcggccgccagcgccgccgcctggccggagcgcgtcgcgggcgagccgccgctgcggcccttgcggctgttcgagcgacccgagccgatcaaggtcccgttcgcgagcgtgcctgacggtccgccgcatcaattcacctggcggcgcgccttgcacgcggtggtgcgggtcgagggccccgagcgcatcgcgatggaatggtggaagcaggacggtgcggcgcttacccgcgactatttccgcgtcgaggacgccgagggccagcgcttctggatctttcgtgacggtctctatgagagtgagctgcgcgacgaggagggcaggcccgttccggccaactggtatgtgcacgggcttttcgcatgacaacacctgtatccgcctatgccgagatcggcatcaccagcaatttctccttcctgcgcggcggttccgatccgcgcgcctatgtgcatcaggcgagcgaactcggaatccccgtgatcgggatcgccgatcacaacacgctggccggcgtggtgcgcgcctggaaggaactcgacagcgagaaggtcgcccatccgccaaaatttctggtcggtgcccgcatcatcttcatcgacggcacgcccgacatcctggtctatccgcgcgaccgcgccgcctatggccggctgtgccagctcttgacccgcggcaagcgcggcggcggcatcgagcggatcgagaaaggggactgccggctcacgttgcccgatctcatcgatttcgccgagggccaactcttggtgctggcgctgccgcatcgtttcgaggcggatgacgcgctcgacgtgctccggcaattgaaagcgagcgcggccgatggcgtctggctcgccgcaagcctgctctatcgcggtgacgacaggcgccgcctcgcgcggctgcatgctctcgccaccgatgccggcgtgccgctgctcgccaccaacgaagtgctctatcaccatcccgcacgccgcccgttgcaggacgtgctgacctgcatccgcgagaagaccacgatcgaggccatcggccgccggctcgaggccaatgccgagcggcatctcaagccggcgcatgaaatgatccggctgttccgcgactggcctgccgcgatcgcggagaccatgcgtttcgccgatcgcatctcgttctcgctcgaccagctcaaataccagtatcccgacgagccggtgccgccgggcaagaccgcgcagcagcatctggaagatctgacctgggccggcgtcgacaaatatttcggcggcaagatcgacgacaagctccgcgccaccctgaacaaggagctcgcgctgatcgccgagctgaaatacgcgcactacttcctcaccgtgcacgacatcgtgcgctatgcgcgcagccagaacatcctgtgccagggccgcggctcggcggcgaactctgccgtctgctacgtgctcggcgtcacctcggtcgatccgaccaaggtcgatctgctgttcgagcgcttcatctccaaggagcggttggagccgcccgacatcgacgtcgatttcgagcattcgcggcgcgaggaggtgatgcaatatgtctatcgccgctacggccgccaccgcgccgccatcatcgccaccatcatccattatcgcccgcgcagcgcgatccgcgacgtcggcaaggcgctcgggctgaccgaggacgtcaccgcggcgctggcggacaccgtgtggggcagctggggcaagggcctcaacgacatgcaggtgcggcaggcagggctcgacccaaagaatgcgatgatcaacctcgcggtcgagctcgccaccgagctgatcgagtttccgcgccatctctcgcagcatgtcggcggctatgtgctgacccaggaccggctcgacacctatgtgccgatcggcaacgccgcgatggacgaccgcaccttcatcgaatgggacaaggacgacgtcgacgcgctgcacatgatgaaggtggatgtgctggcgctgggcatgctgacctgcatccgcaaatgttttgacctgatcgatgaccacaagggcaagcgctgggagctcgcttcggtcccgcaggacgacgagaacgtctacgacatgctgtgccgtggcgaatcgctcggcgtgttccaggtcgagagccgggcgcagatgaacatgttgccgcgcctgaagccgcgcaccttctacgatctcgtcatcgaggtcgcgatcgtgcgccccggaccgatccagggcgacatggtgcatccttatctcaggcggcggaacggccaggagaaggtgagctatccagcacccgcgcctgaccagggcgacaagaacgagctctacaacgtgctgcacaagacgctcggcgtgccgctgttccaggaacaggcgatgcggatcgcgatcgaggcggcgcatttcacctcggaggaagccaacggcctgcgccgttcgatggcgaccttccgcaacgtcggcaccatcggcagctatgaggagaagctggtcggcaacatggtggcgcgcggctacgatccggatttcgcccgcagctgcttcgaccagatcaaggggtttggctcctacggcttcccggaaagccacgccgcgagctttgcgcagctcgtctacatctcctcgtggctgaagcattatcatcccgacgcgttctgctgcgggttgctgaactcgcagccgatgggcttctatgccccggcgcagatcgtcggcgatgcccgcaagaacggcgtgacggtgcgcgaggtcgatgtgtccttcagcttcgcgcagaacacgctggaggagaaggtcggcgagcactgcgcggtgcggctcggctttcgccagatcgacggcttccactggctggatgaggatgaggagaggctgaaagctctccaatcgtcattctccgatgcgcaattgcgcatcgtgggtacgcgaagcatgggtgtgcctgagtcagggacgcacgaacggatgggctctctccccccttgcgggggagagttggagagaggggtaagccacgaccaccgcccgtgcgacttacccctctccctaaccctcccccgcaaggggggagggaacccgcccacctcccgcgcggccttggaccagatgcgcgtatcgacggagcaagactgggccgaccgcatcgtcgccgcgcgcaaccgccggcccttcacctcgctggaggatttcgcccgcgacaccgcactccccaagcgcgcgctgatcctgctcgccgacgccgatgcgttccgctcgctcgggctcgaccgccgcgaggcgctgtgggcggtgcggcggctgcccgacgacgtgccgctgccgctgttcgaggccgccaccgcgcgcgagcagccggatgagggcgcaaaaccgctgccggagatgccgcgtcccgagcaggtggttgccgattatcagaccatccgcctgtcgctgaaaggccatccgatggaattcctgcgcgagatgttcaccaaggagcgcgtcgtcgcctgccacaccatcaaccgcagcaacgaccgccgccgcgttcgttgcgccggcgtggtgctggtgcggcagcggccgggcagcgccaagggcgtcgtgttcatgacgctggaggacgagaccggcatcgccaacatcgtggtgtggccgaaggtgatggagcagtaccgcaaggaggtgatgggcgcgcgcctgatcctggtcgagggctatatccagagcagcccggagggcgtgacgcatctggtggcgcagcgcatgaccgatcgctcccacgatctgatcggccttgccaacgattccgcggtcagcaagcatccagtgccggcaggccctgcgctgatcgaaccgctcaatgacgaccgccgcgatcacggcgacaactcgtcgcaaaggatccgccacccgcgcaacgtccgcatcctgccgccgtcgcgggactttcattgaagttgacacagatcaaggccatcgcggagctcgcgtaagacaaggcacgagaaggagaccgggatgtccgcaaccgagatcgcgaagcttcatttttcagcggcgcttgccgaagcccagaccgcagggctcgatcacgacagcgtctgccgttcgctgctcggcctcgttgtctcgaaataccttgaaaacaggagcgtcgccgacgtccagtcggagcttcgcttcgtcgccgacaattgcgatcctgatacggacttcgcgttcatgcgcccgtagcgcaagcggcgaggggcgtgagccattatcgcagcaatagtgtgcgccgcaaccagcagatgccgccttgtgcgccatgaaccagttgctatcgtcccggccgcccgggcgatcgatccggggcctgcaacgacaaccattcgggagcattccatgcattatctcactgcgctcatcggcgcggcatgcatcgcgttcgtcacggccaccggcggatttgcccaggtgccctccaatcccgacaatcccaacgacgtcgtccccgataccctggcgccgccgccctatggcgagccgatcaatctcgaaaccgccaagaaggttgcggctgcggcgatcgccgagacccagaagcgcaactggaacgcgttctgcatcgcgatcgtcaatccgtccggcgagctcgtctatttcgagaagcaggacaactgccaatacgcctcgatcggcgtttcgcaacacaaggcgcgcaccacgacgcgctatcgccggccgacgctgacgttcgaaaacctgatcggcaagggcgcctacttcacctatctcacgacgctcgacgacgtgatcgcctcgcgcggcggcaacctcctgatcgtcgacggcaagatcgtcggcgccatcggcgtcagcggcggtaccggctcgcaggacaatgtgatctcgctcgccggccaggccgcgttgaagtgagatgacggcgtgaaacgtctgccggatgctcggttcggcagacgctttcatttgttcggcttttcagaatttaacttgacgccggacccaactcagatgtttaatgctaccgtctcacccggcacgagggcgcttcgcggtcgtcacgaacgcgggtcgagatgcggtggacgccgattgcgcaactgacgagtg

SEQ ID NO: 36 - DNA, 94352 bp, Bradyrhizobium enterica
tcacggtcggaacagcgctcaccgaccaggccgccaatcccgcgaccggctggaacggctcgtcgctgatcaaggccggcgtgggcacgctcaccctaaccgctgacaacacctataccggaggcaccaccatcgccggcggtgtgctgtcggtgtcgcgcgacgcgaatctcggcgcggcgccgggcggcctgaccttcaccggcggcacgctcgcgactaccgcgagcttcgataccgcccgtttgatcgcgctgacgcaggccggcaacttcgacgtcgctaatggaaccgaactcggtctgaccggcgtggtttccggaggcggcaatctcgtcaagcagggcggtggcacgctgcggctcgataacggagccaacgcctacggcaacacccttgtcgcagccggcacgctgatcggacatgccggctcgatctcaggcaacatcggcaatgccggcacggtgatattcaatcaggcaacggacgccagtttcgccggcgacgttggcgcactcaatggcacgcgcggtacgatggtcaagcggggcgctggcacgttgaccttgaccggcatgtcctcgctcgactggacgatttcggcaggaagccttgtctcttcggccggacgcttcggcggcaacgccgccatcgcttcaggcgcgtccttcaccttcaaccagactgccaacgccgcctatgccggcgtgctgtcgggcaatggcggcttcaacaagaccggcaccggcctgttgaaccttaccggcgactcctccgcattttcgggcacgaccttggttcaggtcggcacgctcgcggtgaacggtctgctcggcggcatgctcgatgtgcttgccggaggccgccttcagggcatcggcacggtcggcagcaccaccgtcaatggcacggtcgcaccgggcaactcgatcgggacgctcaccattgccggtagcatcaccttcaatcctggctcgatctacgaagtagagattaacgcacaggggcaatccgacaagatcgtcgcttcgggcacggcaacgatcaacggcggcacggtgcaggtgctggccggcgcaggcaactacgcgccgcaaacgaggtacaatatcctcacagcgaccggcgggctcacggccaacagcaccttctccggcgtgactaccaatctggccttcctcacgccctcgctcagctatgacgccagcaatgtctggctgacgatgacccgtaacaatatagacttcaaagccatcggcgtcacgcccaaccagatcgccgcaggcggcggggtcgaaagcctcggcttcggcaattcgatctacaatgccgtgtcgaacctttccgccccgcaggcgcggtcggctttcggccagctctcgggcgagatcaacgcctcggcgaagacgacgatgatcgacgacagccgcttcgttcgcggcgccgtcaacgaccgcatccgggccgccttcgaccgtgtcggcgccgcgaacggcgcggtcacgacctatatcgacggcaaaccggtcaccgtcgctgcgaccacggaccaccttgcggtctggggccagggtttcggctcctggggcaacaccaatggcgacggcaacgccacgcgcctcaaccgttcgatcgacggtttcttcatcggggcggatgcgcccgctttcgacaactggcgctttggcgcggtggccggctatagcgccacccacttcgacgtgaaggattaccgttcatccggctggagcgacaattatcatgtcggcctctatggcggcacgacctggggcgctctcgctttccgcactggcacggccttcaccgttcacgacatcaccgcgacccgcagcgtgatcctccccggcctcagtgacacgctgacgggccactacaacgccggtacggcccaggtcttcggtgagctcggctacggcatcaatgccggcgctgcccggttcgagcccttcgccaacctcgcttatgtgagcctgcataccgacgccttcaccgagaagggcggcgcggcggcgctgacgagcgcagccaccgcaacggatacgaccttctccacgctcggcctgcgcacatcgaccactttcgacattggcggaaccgttctgacggcgagaagcgtggtcggctggcgtcacgctttcggggacgccacgccgttctcgacgatgcgtttcgcaagcggcggtgacttcaccatcggcggcgttccaatcgcccgcaatgcctcggtggtcgaggccggcatcgactacgcgctgtcgcccaaggccaccctcagcgtcacctatggtggccagttcggctccggagtttccgatcagtccggccgctccaatttcaacgtcaaattctgagctgcaatccaaggttgacgatgaccaaaaatacgcacgcagcaacaggggcgccaacgcttcctctcttttataaagacccggtgctcctgcgcttcgaggaccacggcgatgtggggctcgctccgcccgccgatttcgggttcgcgagcgaggccgtcgtcattccgctttgcgttggcgagttcgttcccgccatgcgccactatccgatcgtcttcgcggcggacggttcggcttcgccacttgttgtcgtcggcattcggcaaggtcacaacctcttcgtcgaacgcgacggaggatggcgcgcgggcacctacattccggcctatgtgcgccgctatcctttcatcggtgtcgagacgcccgacaaggcgcagcaactcctgactatcgaccggaagtcgaaccgtttcgtcgcctcggcatcggcgcggacggacgcggaacgcctgttcggcgcggacggcaagccgacttcgacggcgcagtcggccatggccttctgccaagcctaccatgccgatatcgtcaatacgctcgccttcgcaaaggcgcttggcgaggcgaagcttcttactccgaaccacgttcagatgcagtttcccgacggcggtcaacagacgctcgacggcttctgcgtggtggatgagaaggcattccgggcattgcctgcaaaaacagtcgccgactggcacgctagaggctggcttgatctcgccacgctgcatctagcttcgcttcagaattttcaaagcctgctcggcctcaatgcgcagcgcgcagacgaacgaaaggcgctcgcatgatgagccgcaaagtctgccttattggaatctcgtccgccgccgcgatcgcggcaggcgtgacgctgtacctcgtgcccgaacttgcgtcttcgacgccttcccaggccgcatccatcactgacaatcgcgacgagccggcgccccaacgcttccaactggctcaggcgcaatccggaagccaacccgccggcgcaacggcatcgtccctgccgggcggcgcgtcctccctcaacgagacctacaaggactggggcgtggtctgcgcacaagacggcagcacaaagcgctgtgcgctgtcgcagctccagtcccagcaaaacggacagcgggtgctggcgatcgaactgaatgcaccgtcgggtaataccgtgtcgggcactctcgttctgccattcggcctcgcgctcgactccggcgtcactttccagatcgacgacaagccagccctgtcgccaatccgcttccggacctgcctgccggccggttgcctcgtcaatgtcaccttcgacgcggccacgctggtggccgttcgggcgggcacggcactcaaggtcaaggccgtcgccgatggcggggctctggcaaatttctcgatctcgcttcagggcttcagcaccgcgcttgatcgcgtggcggcgctggcccgctgatgacgatcattatgcgcctggccgggtaaacctcgatcgccgcctatccgggtgaccggaacgaccaggccgcccttcagcggccatggctttatgtcagatttggtccttataatcgtgctggaggcgccgcagctggagcgttaaccgtcaaccgtcaacaaatgtcggtctcggtctaaacctgtcctcctctgaagcagaaaaagccccgccggcgacggcggggcttttcatttccgatgtccgccagggagaccgatcctcggccgcccactccgcgatcatctgaggacgcctccgcgaacggcgtcgcgaggcgtcccttgggttgactcggcttttacgcttttgactcacgttctacgcagttggacattcgggcgcacaatccgcgttagtcggtcgagtacttgaactccggcatcgccttcagctcatccttggtcgcgctgaacaccgcgtgatccgggtaccagggattcggcttcgacgccgtcgcagcaggcgccgcgccggtggtggtctgcttggtcgtgctgccggtgttggcggcactggtcaaagagaccggctcgttgacgaacttcaccttgtcgatcggcacggcgaccagatgctcgccgacgccaaggaagccgccgacgccgatcacgaccgccttgatggtaccgcccttgtccatcaagaggtcgttgatcgagccgacgctctcgttgccgtcattgtacacgctgaggccgacgaccttggacgcgcgccattcgcccgtgtacgcggtgggcgtcgtggtcgacgttgtcgtcgacgccgcaggagccatcttgtcggccctctcggcgggtgtctgcgcaaccgcgacggttgcgagcagggcggaaccggcgacgccggcaacgatggatttgatcaacattatgcgctctcctcagttcgcaaaatcgatgccgggagaacccgtgatgtaggcgtccgttcctatttcgcgtgcgctcaaaagccgccccgatgcctgcgaacgcgatcctggaacgccatgaatacgacgcggcaagcagcgcgtgcgtttccaacgcatggaacgtcgcgctccttgacgaacgcgaccgtcacctctcaattgggtttgcggttgagcctcacgactgcgccggacccgcagtcccggatgtgacgatgtttggctcactaagtcgtcccggcgaaccgcgctgcacaagccggcacgcgcccacgctgcggcatcgtcgatcgacatgcgtcgatcacgcgcacgcccagccctgcgatcagaagccgccccaatagggcggcacgccgtagaagcgatgcagctcgacttcctgcgaacggtcgccccaatcgaaatccttgtcggcgcggaacgacggcgcgcgcttcagctcgtcgtcctcgatgtcgagctcgtaggcttcgaatttcgggttgtagtgcagccggccccacggcagcggaatcagattggttccgatcccgaggaagcccccaaagctcagcacggcgtacgacaccttgcccgagatcttgtcaatcatcagccgctcaatgtggccgatcatgtcgccattggcccggcgcaccgcggtcccctcgacgcgatcgctggcaatcagttgatgcggcctcgtcctgacctcgacagccatctcaccctccctggcctgaaagagaaacaacgcatcgccgggggaaccggttccgccgctggatatggcagctgcccttcccttttccggtgaccgcagcagcgcaggacggtgccatgccgaaggcgacttcgatctgtatttcaacgcactagctggatgacagaacgataacttttctccgcaccgccgacctgttaactcgttattccgggcaaaatttcagacatatactgaaacaaaattcctgagccgcttcccccgaatcacggacaaaagagtcggtatgacccaggctgcgcccaatatcctcgtcgtcgaggacgaccgcgaaacgcgatccctgatcgcaaaatatctccgcaccaattcctgtcatgtcacgaccgcctccgacggccgcgagatggcgaaggccatgaccgaccaccgggtcgatctcctggtgctcgacgtcatgctgccgggagaggacggcctcagcctgtgccgcaaggtgcgcgcggagtcgcagacgccgatcatcatgctgaccgcgcgcggcgaggatgtcgaccgcatcctcggcctcgagatgggcgccgacgactacctggccaagcccttcaacccgcgcgagttgctggcgcggatcaacgccgtgctgcgccgccaggccgccgcgcgcaacgccagcgcgatcgagggcgcgaccacgctgaccttcctcggctggcgcatcgacatccgcctgcgcgagctgcgcaatcccgaaggcgcgcgcgtcgcaatgaccagcgccgagttcgacctgctgcgcaccttctgcgaacgacccggccgcgtgctgtcgcgtgacagcctgctcgacctgacgcagggccgcagcgccggttcgttcgagcgttcgatcgacgtgctggtcagccgtatcagacgcaagatcgagcccgatccgcaggaagccaccatgatcaagacggtgcgctccggcggctatgtgttcactccgagggtggaggcggttgccgccacgagcaactgaccatgaagctgctgcgtgtgctgagtctgcgggggatcggcgcccagatggcggcgctggtcgtcgtctcgatcgtcgcgctgcacctgatcatcaccgcgaccttcctgatccatcgccccgaccggccggagccgtcggatcgctggcacacccagctcgccgccgccgcgcaactgctgggacatgccccggcatcggagcggccgcggctgcaggccgatatcatcagggccttcccgcagcttgcgatcagcgacctgtcggccgatatcggcccgctcaccgaaaccgaaacgccgagcctgcatgcgctgcgccggctcggtgccggctaccatgtcttctcgctgccgcgcgaggcgggcagcacgccgcatgagggcgagatccgccgcgtcgcgatccgcctgccggatggcgccatgttcgccgcgaacctgatgccggatcagcacatgcggccgttctggggcgggccctggatgatgacggtgctgttcgccgtcatcagcgtcaccctgctcggcctgtgggcggcgtgggcgctgaccgcgccgctgtcgtccttcgtcaaggccgcagagaccttcagcctgaacggcgccgccgcgccgctgcccgagcgcggccccgaggagatccgttcgctggccaaggcgctgaaccggatgcgcgagcgcatcacggcactgatcgacgaccgcaccaagatgctggccgcgatcagccacgacttgcgcacgccgatcacgcgaatgcggctgcgcgccgaattcatcgaggacgagacccatcgccaccgcatgctgcgcgacctcgaccagatgcgctcgatgctggaatcggtgctgtcgttcctgcgcaacgaccgcaagctcgaggagatgacgctggtcgacatcgcaagcacgctgcatctcgtcaccgaccagttcgccgacatgggccacaaggtcagctacgagggtccgcagcatgcgatggcgaccgcgcggcccgccgatctgcatcgcagcatcactaatctggtcgacaatgccgtgcgcttcggcggcgaagtcaccgtccggctcgacgtcgagccggagcgcctcgtcatcgacatcgaggacgacggccccggcatttccgaggcgcacaaggcgagcgtgctggagccgttcgtgcgcggcgaccaggcgcgcaacatggatgaggccgaaggcttcggcctcggcctgtcgatcgccaacgccatcgtgctcgcgcatggcggcacgctgtcgctgcacgatcgcaagccgcacgggctcgtggtccggatcgaattgccggcgcggcaacagcagttgcagcagccgcagaagtccgcggcctgatcagctgcggctgaccggcgacgcaacggaccggcgactaacgcatcaggcggcgagtggcgtgagctgcgtcaggtcgtagatcgcgacggcctcgaagcggtaattgcaggcgcggcaattccacaggaacgacgtgcgtccctcgctgtgctccacccaatcggggcgtgcaatcggcttgccgcattgcgcgcagggattttcgcgaggcatgtagccaatgtcctgacggactgaatcttgacgattcatggcgcatctcccgaatgttgtttcttgcgtgctttggaatgggcagacgtgctgactcaccgcgcgcgctctgccttgccaccaagtgtaaaccttcatcgagtcgtttgcacgacaatcagctgtggatagcgtgcatcaaagcgcggccgcgaaaactgaaagccaggatgtgacagaacaattcctggctgagtcgatcgaagcagacaatttgaagcatttcgcaatcgcgtcgtccgcctcgcccagatccggacaatcacggacgcagaacgttcgctgatgcgaaggttttgccacattcctgcccgctcgccgtaccaatgagaccgcagaaccgacgcgcattgattaccccgagcgtatcagacatgaagaccgttcagacccttagctgccttgccgcgatcgcgtggcttgtgtcctgcgccggcgcgcaggcgcagtctcgcgcgcaatatgaggcgatggtggcagccgaggcgcaggccaatctggtgccggaagagctggtgcatcgcgtcatcgtccgtgagagcaagtaccagccgcatttgatcgggcgcggcggcgccatcggcatgatgcagatcaagctcgcgaccgcccgtggggtcggctacaccggtaccgccgaaggtctgcgcgacgccgcgaccaacctccgatacggcgtcaaatacctcgccggcgcctaccgtgccgccaacggcgatttcgaccgagccgtgcgttatttcgcgggcgggtattactacgtcgcaaagcggcagcgcggcggccacctcaaggaggcgatgcatggcgccgccggtgcgccgccgaaagagctcgccaggcaggatcaggtggcggccgaacccgccgagccgaagccggaacaggccgaaaaataaccgatcgcggccccccgctggcatacacgttgacacgtcagcccatccgcctacattaggggcgttccgaggggtgctccgaaggaggagctgagataccgcaagcttgggcctcgccatcaggcgaacagtccgggaccgcggtgaccctttgaacctgatccgggtcatgccggcgaagggacagggatgtatcagacgttgcgaccgcggggggattcccccgtcaccatcatcggcgcaggcataaccggcgcctggcatgcgctattgctcgcagaggccggacgtgccgtcaccctgcatgagcgcagtgacgcggcgatgacggaatccacaagccactgggccggcggaatgctggcgccctggtgcgaggaggaggccgcggagcctgtcatcacccgcctcggcattcgctcgctcgcgctgtggcgacagcatctcccggaaaccccattcaacggctcgctggtggtggcgcatccgcgcgaccgcgccgatttcgagcgctttgcccgcctcacgtcaggccatcgccggctcgatgccgagggcgttcgcgcgctcgagccggcgctcgagggccgcttcggcgccggcctgttctatcccgaggagggccatgtcgagccgcgccgcgtgctgccgcggctgcatgccgcgatcgccaaggccggcggcgccatcaagttcggcagcgatgccgaagctgacgatctcgacggcctcgtgatcgactgccgcgggcttgccgcacgcgaccgcgagccgagcctgcgcggcgtcaagggtgagatgatcatcatcgagacgtcggaggtcgagctgtcgcgcccggtgcggctgatccatcctcgctggccgctctacgtgatcccgcgcggcgacggccgcttcatgctgggcgcgaccacgatcgaggccgaggacaatggcgtcagcgtgcgctcggcgctggagctgctgggggcggcttacgtcgtgcatccggcgttcggcgaggcgcgcatcgtcgagttcggcgccggtttgcgtccggcctttccggacaatctgccgaaaatcaggatcgagcaggaacgcatcacggtgaacggactctaccgtcatggcttcctgctggctccggcgctggccgagctgacgctcgcctatctccagcgcggcgaaatcgacaatgaggtgatgctatgcgcgtgatcgtgaacggcgagcagcgcgagatcaacgcagcgagcgtcgacgcgctgctggccgagctcgactacgagggcagccatttcgcgatcgcgctgaattacgacgtggtgccgaagagccgctgggccgagactgcactgaaagccggcgacgagatcgagatcatcacgccgcggcagggagggtgatgtgatgactgcacgcgctctcctcccgtcgtcccggcgcaggccgggacccataaccacgaccggttattggcggaaagaacgacgccccgcgtgcctcgttgaagggccgcggcgtatgggtcccggccttcgccgggacgacggcacggtttgaggagacaccacggaccatggtcaccttctacggcaaatccttcccgtcccgcctgctgatcggcacggcgctctacgcctcgcctgcgatcatgcagaacgcgatccgcgcctccggcgccagcatcgtcaccgtatcgctccgccgtgaagccgctggcggcaagaccggcgatgcgttctggtccttgatccgcgagctcggcgtcaccgtgctgccgaacaccgcgggctgccgcagcgtgcgcgaggcggtcaccactgccaagctcgcgcgcgaattgttcggcacgccctggatcaagctcgaggtgatcgccgacaacgacacgctgcagcccgacgtcgtcggcctggtcgaggccgccactgtcctgatcaaggacggctttgaagtgttcccctattgcaccgaggatttctcggtcgcctcgcgcctggtcgaagccggctgcaaggtggtgatgccgtgggcagctccaatcggcagcgccaaaggcatcaccaaccgcgacgcgttgaaacttctgcgcgaccgcctgcccgacatcacgctggtggtcgatgccggcttgggcgcgccgtcgcatgcggcacaggcgctcgagctcggctatgacgccgtgctgctcaacaccgccgtcgcaaaggccgccgacccggttgcgatggccaatgccttccgcctcggcgtcgaggccggccgcaccgcctatgaagccgggctgatggaagcccgcgacttcgcctccccctccacccctgtcgttgggaccccgttctggcatgccgtatcctgatccgttctatcccgtcgtcgacagcatcaactgggtcgagcgactgaccaagctcggcgtcggcaccatccagctgcgcgccaaggacctcgacgattccgcggcgttgcagatcgtcaccgacgcgctggccgtgacgaagggcacgcccacaaagctcgtggtcaacgactactggcgcgcggctgttgtcgccggtgccgagcatctgcatctcggccaggaagacctcgccgacgccgacctcgccgagatccgcaaagccaagctcacgctcggtatctccacccatgacgatgccgaactcgccaccgcgctcgccgccaagccggactacgtcgcgctcggcccgatcttcttcaccacgctgaagtcgatgcggttcgagccgcagggcattccgaagatcaccgagtggaagaagcggatcggcaatatcccgcttgtcgcgatcggcggcatcaagttcgagcaatcagccgagatcttcgccgccggcgccgattcgatcgccgtcgtcagtgacgtcacccagaacgccgaccccgacgcgcgggtgcggcaatggctcggcatccctgcggaggccgcgtgatgcaaactctcgtcccacacactctgctgtcatcgcccggcctgtgcgcaattgcgcacatggaccgggcgatccagtacgccgcggcgtctccgtatcgccccgcggcctctggaatactggatccccgctttcgcggggatgacagcggtaattgtttctcgcgcagcaatgccaacgaattgaagtaaggaggatccctcatgaacatccgctccaaccccgacaccacgctccccgccgtcaccaccggctcgctgcccgcctcgcgcaagatcttcgcgacgcccgcaagcgcgcccgacgttcgcgtgccgctgcgcgagatcatcctgtcggaaggcgccggcgagccgaacctgccggtctatgacacctcgggtccctacaccgatccggccgtcacgatcgacgtcaactccggcctgccgcgcaatcgcctcgcctgggtgaaagagcgcggcggcgtcgaggaatatgagggccgcaccatcaagccggaggacaacggcaatgtcggcgcatcccacgccgccaaggcgttcaccgcgcaccacaagccgctgcgcggcctcgacggccacaagatcacccagctcgaattcgcccgcgccggcatcatcaccaaggagatgatctacgtcgccgagcgcgagaatctcggccgcaagcagcaactcgagcgtgccgaagccgcgctcgccgatggcgagagcttcggcgcctcggtgccggccttcatcaccccggaattcgtccgcgacgagatcgcgcgcggccgcgccatcatcccctccaacatcaaccatgccgagctcgagccgatgatcatcggccgcaacttcctgaccaagatcaacgccaatatcggcaactcggcggtgacgtcatcagtggaggaagaagtcgacaagatggtgtgggcgatccgttggggcgccgacaccgtgatggacctctcgaccgggcgcaacatccacaccacccgcgaatggatcctgcgcaactcgccggtgccgatcggcaccgtgccgatctaccaggcgctggagaagtgcgacggcgatcccgtcaagctgacctgggagctctacaaggacaccctgatcgagcagtgcgaacagggcgtcgactatttcacgatccacgccggcgtgcggctgccctacatccacctcacggcgaaccgcgtcaccggcatcgtctcgcgcggcggctcgatcatggcgaagtggtgcctcgcgcatcacaaggagagcttcctctacacccatttcgacgagatctgcgacctcatgcgcaagtatgacgtctcgttctcgctcggcgacggcctgcggccgggctcgatcgccgacgccaacgaccgcgcgcaattcgcggagctcgagacgctcggcgagctgacgaaaatcgcgtgggacaagggctgccaggtcatgatcgagggtcccggccacgtgccgatgcacaagatcaagatcaacatggacaagcagctcaaggaatgcggcgaggcgccgttctatacgttgggcccgctgacgaccgacatcgcgccgggctatgaccatatcacctcgggcattggtgctgcgatgatcggctggttcggctgcgcgatgctctgctacgtcacgccgaaggagcatctcggcctgcccgatcgcaacgacgtcaaggtcggcgtcatcacctacaagatcgcagcccacgcggctgacttggccaagggccacccggctgcgcagctccgcgacgacgcgctgagccgcgcccgcttcgacttccgctggcaggaccagttcaacctcggcctcgatcccgagaccgcgaagaacttccacgacgagaccctgccgaaggaagcccacaaggtcgcgcatttctgctcgatgtgcggcccgaagttctgctcgatgaagatcacccaggacgtccgcgactacgccgcgacgctcaacgacccctcgggcgtcggcgcatcgatgtcaggcaccatcgaggacggcatggcgacgatgagcgccaagttcaaggagatgggcgagaacctgtatctcgacgcggagaaggtgaaggagagcaatcgggtgttgtgaggcatgcgacggtcaggcggcttcggtaatctaagctaggtatcactgaagccgcacattctccatttgattaagcccctttcggcgctatcttaggtagtcatgaagggggcctagcgcatggcactatcagacatctactacgtaaccgtatcaatttcagccgtcgcagcaacggccgcatttattatctcactcatcgatcaagctcgcgagcggcgcaatttagcgatccagaaatggcaacgagctgtgattcagcaaatatttcagggaacagttcgcgtcttgtcattcgacgagattgcacaacgatatagaaacgaggccgttggttacggcaagtacaaccttaaggcagaggagctctcgccgcaggcgttgcggctcgtactcttggaaatggtggaacaagatatcctcgagcaaaggaaagaggacaagtacagcctcaaatcatttgacagcggcgtcgagagctacaaagaagcccaggctgagctcatgaataaccacaacagcgctatggcggcgttgcagaaatcgaacgcggctaccatgatctccgaaatgactaaccagctgcaaactcacatggcgttcgcgacgcgaatatccaacgacgtcttcaatatcataggggatgaaccttttcgatatgctgtctccgatctttcaataaaagtatctcagaaaatgaatgctcctattgatgtggtgcggggaatagtgatggagctgattgctcgcaagatgcttgaggcgaacgaccgcggaaaggtcggccttggtactaacgtcaaccggtcaggcatgaccgatcttgaaagagaggactgacttcacgttgcgccatttattcaaccgaacgatcgcgatcgacgattttctgtgtccgttgtgcgctatgttcggtcggctcctcccggcgctgccgaccgggcgagtggagtcactcgcaagaatgtagcccggctatgcgaagtgacgtctgggtatttaaccgcacattgcctctctcgaagctaagccgacgtaccaaccgccgccccttgcacgttgcgctgcgagccaccgccaaatgcgatctcctgataccctcccgccgccacgccgttgatgatccccagaaacttcggtgtccctccgttgtacacgaagtagcgcacagtcccctcttcgtggccggcgacgttggagttgtagcccgtgaaccaggacttggctttgcgcatcagcatgatctcgtacatcttgacgacatgcgcggtccaacgctgctcggcttccagcgtggcgtcggcgcgggtcaggccgcggtcccacatgtattgcagcaggttggtgcaccagttgacgccgttctcgatgccgcgcgggaagttggtcgacgcggaggcgctttgcgggccggtcggcatcagcaggttcgggaagccgtgcacgagcatgccgaggaaggtcgacggcgcctgcttccatttgtcggcgaggcgttcgccgccgatgcccctgatgtcgatcagatcgtaggcgccggtgatggcgtcgaagccggtggcgtagacgatgatatcgaactcgtagtcgcgcgccgtggtgcgcaggccggtctcggtgatccgcaccagcggcgtctcgctgagatcgacgagatggacgttgtcgcggttgtaggcctcgaaataccgcgtctccagcggcaggcgctgcaccccaaatccgtgatcccgcgggatcagtttttcggcgaccttgggatcgttcacgcgctgccggatgcggcctgcgatatattccgacagctcggcgttggcggcttcatccatgaagatctcgcggaagttcgccagccagatgccgaagccgggctcgtcatagagcttgtcccaggtcttgagccgctcctcgcggctgacctcgtagaagccgcgcttgtcggggccgtgcacaaagctgcccggtgtcagtgcgcaggcggcaaaaatctcgtcatagcgcgcgcggatgtcggccatttcagcgtccgatatctcgctgttgttgagcggcgcgctccagttcggccggcgctggaacacggtgagttggcctaccttgtcggcgatttcgccgatcaactggatgccggtggcgccggtgccgatcacggcgaccttcttagccgttagatcgaccggctcgtgcggccagtaataggtatggaacgagcgacccttgaagtcctcgatcccgggcacgcgcggcatggtcggcgccgacaatagcccgatcgcgagcaccacgaagcggcaggtcagttcgcggccgtcaccgagcctgagttgccagagatcgcgcgtctcgtcgaactgcatggcctcgaccttgcaattgaactgcatgtgccggcgcaggtcgaacttgtcggcgacgtagttgaggtagcgcagattctcgggctggccggagaagcgctccttccagtgccactcgtcgagcagctcgcgcgagaacgagaagccgtaggtgtagctctccgagtcgaaacgacagccgggatagcggttccagtaccaggtgccgccgagatcgggcgcggcttccagcacggtggcatcgatgccgagatcggcgagccgcttgatctggtagatgccggcgacgccggcgccgaccacgatcacctcgtaatgggttttcgcctctcccgtcatgctccgctccaaaattcttcttgatctgttgggctggattacagacccttttgccggatcaggcaaccgggcgcggcgcgcgcgacttgcgttgagacgctgcgagcgccacatcgatcactgcattgcaatgcgcggaaatccggacgagcgacatggacgacaatctcaccggcgtctgggacggcagctacgttcagcctggcggcatggtcacgttcctggcgacgctgatcgatgccggcggcgcgctcggcggcagcgtgaccgagccttgcgtcgcaccgggctgcccgatcagcactcacgatgcttcgctgtccggtcaccgctccggcagcgcggtcacattcgtcaagcgctacgagccggccggttacggctacggcaccgtgcactatgaaggcgcggtcaatgccgacgcgaccgagatcgacggccgctggagcatccacggcacggcgttttcgggacggtttttgatggtgcgtgcgacggggccggcgcaggcggtgacgaccgaagacgagaccagggagccggtgcgctagcgcgtattgggacgccaaatgcgcgggcccggcgggcgagggaatgctcacgcgatttcggaatattggaaatctatccctgatttgcccgacgtgtcaaggtgtcgtatcggacggcggcagccgccggctcctttgcatggggttgttttcgatattttggccccgcgcatctgcggcgaacggctcggcgcggctgcgatccgacctccccgcaagcgagagagggagcgcagcgctgtcgctattcgacctgatctcatcacacgttaacgcgcgtatgctctgctcggtctcccatcagatgcctgacaacaattcccaccgcctccccgaccagctccgcgccgatctccgtctggtgttcgtcggcaccgcggccagcacgcgctcagccgaggtcgggcactactacgcgcatcccggcaaccggttctggcgcgcgctgcacgaggccggcatcacgccgcggcactatcggccggatgagttcgcggcgctgctatcgctcggcatcggcttcaccgatctctccaagaccggcgccggaatggatcacgagatcgcgcgacagtcgttcgatgttgtgggcttcagagcgaagatcgagacctatcgcccgaggaccatcgcgttcaccagcaagaaggcggcgagcctgttttacgacaggccgaccagcgcgcttgcgctcgggcggcagccatcaacgagcggcttccctgacgtgttcgtgctgccgtcaccatcaggagcggcgtccgggcattggagtttgcagccgtggcgcgagctcgccgagtggatcacgtagacgaatttttcgtcattccccggtgcgcaattgcgcacctgagggcgcgctactcggcgcgagcccggaatccattgggccgcacagttagtggataaatggattccgggctctcgctccgcgagccccggaatgacaaggccaagaatcgaacctcacctactccttcaacgtgatcgcgagcccgctgaggtcgacattggccatcaggccgatctgcttgccgctcagctcgagcaccgcgccgttctggttggtcagcaggatgccgcgcacgccggcgccgagcgcaacgcccatgccggccgcggcgtagacgccggcgatgtcctgggcgcggcggatattgcgcacccggccctgcaacgtggtctgggagccgccgaacacgaggccgtagtccagcccgccggcggtgagcccgtaggtctgccccttgaaggtcaacacgcccttgccggcggagccgccgaagatccagccgcccttgaagatgacgagcgtcacggcgccctcgtcggccagcgcagcggacgatccggtgagcagcgccagcgcgaacagcacggcgcgggcggcggatgacagtctcatgggggttctccggacgaagtgaggcgagatgcgaatcgcggcaatccagccgacgggcaggcacccttgaaacgcctgcgaaacatgcgggattgcgcttgttcctgatcaggcgaagtctatcatcgcccgcgcagccgcgcgacgctggcgcatgcacgccgaccgctttgccggatcgctgaggagtttgcgcaacagaggccccgcaccgatgcacgatttcaccccattttccggcctcgccggcggcgcgctgatcggcctcgccgcggcgctgctgatgctgctgaccgggcgaatcgcaggggttaccggcatcgtcggcggcctgctccaacccgataccgccgaccgcggctggcgcgtcgcgttcatcgcaggactgatcgcagcgcccctgattgcggccttgttcggcgcgccgctgccgcggccggcgatgaacggcagcctcgtcgtgatcgcgatcgcgggcgtgctggtcgggttcggcacccgcatgggcaatggctgcacctcgggccacggcgtctgcggcttcgcgcggctgtccggccgctcgatcatcgcgacgttcatcttcatgacggcggcgatcgcaaccgtcgcaatcgtcagacacggaatcggaggctagcgatgcaggttctcgcaagcttcctttgcggcctgatcttcggcgcgggccttttgatctccggcatgaccgatccgcagaaggtgctcggcttcctcgacctgttcggcgcctgggatgcgacgctcgccttcgtgatggcgggcgcggtcgcggtcgcggcgtcaggctttgcgctcgcgcggcggcgcgctgcgccggcgttctcgccacgctttgtctggcctgaccgcaacgacatcgatgcgccgctggttggcggcgcaatcctgttcggcatcggctggggcctcgccggcatctgccccggccccgcgctggtcaatctcgccggcctctcgctgccgatcgtggcgttcgtcgcagcgatgctggccggcatgatcggccagaatctgttcggcaagactttgtggcgctcgcgcacgatggcgccgcgcgccgccgaaccttcctctcttccatctcgtgcagacgggtgacctcatgacaacgatcaagcactttcctcctccgcccggcatccaggcgccgccgctttcgttcggcgcccgcgtcggcgatctcctgttcatctcgggcatccccggcttcgacgccaaccgcgagctgcctgacggcttcgaggcgcaattcgccaacgtcgtcaccaatttcaagcgggtgctgaccgaggcgggcgcgacgatgcgcgatctcgtcaaagtcaacgtgctgctgacccgcgccagtgacgtcgccacgatgaacgcgctctatgccggcgcgttcggccccgcgccctatcccgcacgcaccacttgcgtcgtggtggcgctgcccaatccgaagatgctgatcgagatcgagggcgtggcgtcggtgaagacatagccgcccatccaccgccgtcgtcctggcgaaagccaggacccattaccccaaatgtcggttgttgcgcgacgctggggccgcgatcccgcttgcgatcaaatgcggtggttatgggtcccggctttcgccaggacgacgacgtggagatgcccgcgcctgtatgcgtgcactttccacacagcatcggccgctagaacaacgacccctgcccgtcatcttcccgcggcgccgtcttgcgcactgccaccttcttcgccgccggcgcgtcttccgcggcgatctcctccgcggtcatcggcagcagcaattgcgcgtcgtcgttggcgacggcgttgacgcgcatcgtcacccggtgccaggcgaactcgccgacatctggccccttcagcagcggcatcacgtcatcgacatcgttgggcaggcagtcgagccagcgtgcgaattgctcgggccggatcgtgacgggcacgcggtgatgcagctcggcgagatcggggctcgccggcgcagtgacgatcgccaccgtgtcctgctcctcgccgttcggccccatccaggtctcggccagcgccgcgaaggcgaccggatggccatcgcggcggtggatgaagaacggccgcttgcggccgccggcatcctgccattcgtaatagccgtcggccgggatcagcgcacggcgccgcttgatcgcgttcttgaaggcgggcttctcccgcaccgtctcggagcgcgcgttgatcaagagcgagaatgtgcgggggtccttgacccaggacgggatcaggccccagcgcatcaattggaaatgccggccgccgttttgcagcagcaccaccgggatcggctgggtcggcgcaacattgtaccgcggcggaaaattcggctgctcgatatagccgaacatttcgcgcaaagccgccggcggcgaggtaatgacaaagcgtccgcacatatcccgtccagagtggtatctgtttattcagccttaacttggaccgttaaagactgcgaccaatgacctcaacggccgccatagcgggctcttccccgcgaccgacgtaccccgacgaggcgcgggcggctttgttgcgcgccgccaacatcaatccccgcaccgggcttgcgaccgactacctcaatcacttcaacgaagccatcatgttgctggagatggtgccggacctgccggaatgcgccgacgatttcctggaatggcagccgctgtcctatgccgagcatttcaccgcgtccaacttcaaggcgcgtgacctggcgatcgagtcctacgagaccgcggatgccgggatccgggccgaattcgaccagctgaccgacagcatgaccaggatcctgaccgaggtcggcgcggcgatgcggcaattgcagcaggacaagagccgggtcgcgctcgccgagcaggccatcgtctgggtcaagccgctggtgatgcagaccgccggtgtcatcaacggcgccgcagaggccgatgtcgacagcatcatggcgggcgcctgagatatcgggcatggttgtccgcgaaactggtgctgccctttgagctctgccgaacccccgatccgcccacagcttgccgtatcaggcgtgattttccgcgacggccgtgtgctgctggtccgccgcgcccgctcgcccggcaagggcttctattcgctgcccggcggccgggtcgagttcggcgagacactgcacaccgccctgcaccgggagatcgacgaggagaccggcctgagggtcgatatcctgggtctcgccggctggcgcgaggtgctgccgaccggccccggcaccgggcactatatgatcatgaccttcgcggcgcgctgggcctcgcgcgagcccgtgctgaacgacgagcacgacgatttcagatggctggtgccggaggcgatcggcgacctcaaggtcaccggcggcctgcacgaggtcattgcggccgcccagcggctggtttgagacctgttttgcgggcttcggagagctctgccgccttgcctcgggcgcattgagggggcataccacggcgattctggaactcctgatgatcagagcccttctcgccgttgtgatcctgatgtcggcatgccttgcgacgcccgcccgggcgcaggatgcggccgcgccgttcgatggcgatttgcagcggctggccgagatcctcggcgccctgcactatctgcgcggcatctgcggctccaacgagggcgccaaatggcgcaacgagatgcaggcgctgatcgatgccgaaaccccctcgggcgaccgccgggcgcgcatggtggcgggcttcaatcgcggctacaacggcttccagcagacctaccggacctgcacgccggcagcttccgtcgcgatccgccgctacatcgaggaaggctcgaaaatctcgcgcgacctgacggcccgctatgccaactgaacgcgcgatcttcttcgacctcgacggcaccctgaccgacccgaagcccggcatcaccggctcgatccagtacgcactggcaaagctcggccggccggttccctcgcaggacgaattgacctggtgcatcgggccgccgctgcgggcgagctttgccatgctgctcggcggcgaggagctcgccgaccgcgccgtcgagctctaccgcgagcgattcggcgatgtcgggctgttcgagaacagcgtgtatcccgatatcgccgaggtgctggccgagctgcgcgggcggcccggccggatcttcgtggcgacctcgaagccgcatgtgttcgcgagccggatcgtggcgcattttggcctcagcggttatttcgaccacgtgttcggctcggaactcgacggaacccgggtcaacaaggtcgacctgctcgcgtatgcgctggagcaaaccggggccgatcctgcgcgggccttgatgatcggcgaccgcagccacgatgtgatcggcgcgaatcgcaacggcatccgtgcggtcggcgtcacctatggctacggcacgccgcaagaactgaccgaggccggcgccagccatctctgcgcctcgccgcgcgcggtgctggaccatatccacagctcatttggctgatcgcggcggggatgtccgaaattcccctttaaatgcggtggcggccgttaaccttttcgaaagatgtgggctaggcggtacccgcatgcgtgatacatctcgccggtcgcagtggttcgctcctcggaccgcgcgcattcattttgcagagtttcatgcgccatccagcgtctttcccccttcaccacgaagacccgcgtcccgaccacgagcagaagcaggccgcgctgagttatctgaacgaggcgtgggcggaagcgcgtcacgagggcgtcgacggcgactgcctggcgcaggcgagcctgttcgcggcgctcgccgagctcgtcaacacctatggcgaggacgcggtggcgaagttcgccgagggcctcgccgcgcgcgtgcgcaacggcgagttctcgctggcgcttgccaggcagtaatcgacgacagcgttagggtttcaacgtctcgaggaaccggaccggttcacctagcgacggcgtcgtgacttcgccctgccacatcacctgcttgccgcgcacgaaggtgccgaccggccagccctgcacgcgcacgccgtcatagggtgtccagccggcgcgcgaagcgatccatttgttggtgatggtctcgctgcgcttgagatcgacgacggtgaagtcggcatcgtaccccgccgcgatgcggcccttgcaggcgatgttgaacagccgcgccggaccggcactggtgaggtcgacgaaccgctgtagcgacagccgcccggcattgacgtgatccagcatcagcggcaccagcgtctgcacgccggtcatgcccgaaggcgaagccggataggtcttctgcttctcctccagcgtgtgcggcgcgtggtccgagccgagcacgtcgatgatgccctgctcgacgccgtaccagatgccggcgcggtgatctgccgcgcgcaccggcgggttcatctgcgccagcgtgccgagccgctcatagcattcgggtgccgccatcgtcaggtgatgcggcgtcgcctcgcaggaggcgacatccttgtggtcgcgcagatagaggatctcttccttggtcgagatgtgcagcacatggatgcgcttgccggtctcgcgcgcgagattgaccagccgctcggtcgccatcagcgccgcggtctcgtcgcgccacaccgggtgcgagcgcggatcgccctcgatgcgcagcggcttgcgctcgttgaggcggtattcgtcctcggcgtgaaacgcggcgcggcgccggatcaccttgaatatccgccgcaggctttcgtcgtcctcgaccagcagcgcgccggtggaggagccgatgaacaccttgacgccagcgcagcccggcgcgcgttcgagctcgggcaggtcctgcacgttctcgcgggtgccgccgatgaagaacgcgaagtcgcaatgcatgcgatgatggccgcgcttgatcttgtcggtgaacgcttcttcagtcaccgtcagcgggttggtgttcggcatctcgaacacggcggtgaccccgcccatcacggcgctgcgcgagccggtctcgagatcttccttctgcgtcaaaccgggctcgcggaaatgcacctgggtgtccatgacgccgggcaggatgtgcaagcccttgcagtcgatcacctcgccggccgaggcctggctgagcgagccgatcgcggcgatgcggccgcccgcgataccgatatcgcgcacgccctcgccgtcctgattgaccacggtgccggattttagaatggtgtcaaaacgctgattcatcggtcctcggcgcccgctttccacagtcgcgcgggccttgttcggcgcactctagcgccttagcttggcaggggatatccgcgacgaccgcgtttcccaaggaacttggaaaaagagccaattttgcgaatgaaagcagcgtttcttccagatcggggcgtgatcaaggtctctggcgaggacgcccgcaacttcctcaacgggctcatcacgaccgacgtcgagcagctggccccggggcaggcccggttcggtgcgctgctgacgccgcagggcaagatcatcgtcgacttcctgatcaccgagatacccacagggcacggcggcggcttcctgatcgacgcgccgcgtgcgctcgccaaggggctcgccgacaagctcggcttctacaagctgcgcgccaaggtcgtggtggaaaacctctccgacagcctcggcgtgctggcggcctgggatggcgagccggcggcgacccccgatctcgcattcgccgatccgcgcaacgcagcgctaggctggcgcatcctgatcccggaagacctcaagcagaagctcgccgatctgatcggcgccgatctcgtcgactccagcgcctatgaggcgcaccggatcgccaccggcgtgccgcgcggcgggctcgacttcatgtatggcgacgccttcccgcacgagaccaatatggatcacctgcacggcgtcgatttcgacaagggctgctatgtcggccaggaagtggtgtcgcgcatgcagcaccgcggcacagcacgcacccgcacggtgaagatcatcctcgatggcccctcgccggagtccggcgcaacgatcctcgccggcgacaagcaggtcggcaccatcggctcgaccgccggcgagaaaggcctggcgctggtgcgcatcgatcgcgtcgccgacgcgctcgacgccggccttccgctgactgcgggcgggctgtcgctgcatctcgccgagccggacgtcgtccgcatcccacccaagcagaccgtcgcatgagccgtaccgcgcaactgcatcccgacggcaagacgcgttgcccgtggccgggcgaggacgcgttctacgtcgcctatcacgacaatgaatggggcgtgccggaatatgacgaccgcgcactctacgaaaagctgatcctcgacggctttcaggccggcctgtcctggatcacgatcctgcgcaagcgcgacaatttccgtaaagcgttcgacgatttccagcccgagaagatcgcgcgctacaccgacaagaaggtgcacgcgctgatgaacgacgccggcatcgtccgcaaccgcgccaagatcgaaggcgcagtggcgagtgccaagggctatctggagatcatggacaagggccccggcttctccaaattcctgtgggacttcgtcgacggcaagccgaaagtcaaccagttcaagaccacggcgagcgtaccggcttcgacgccggtctcgatcaaggtctccaaggagctcggcgcgcgcggcttcaaattcgtcggcccgaccatcgtgtacgccttcatgcaggcgaccggcatggtcaacgatcacctcgtcacctgcttctgccacgagacctgcagcggcaagctgcgcacgccgcggctcaagaagaaatgacggcgcgcaaatcgacggagacaacccgcgcctggcagcggatgttgtcgggacgccggctggacctgctcgacccgtcgccgctcgatatcgagatcgtcgacatcgcgcatgggctggcgcgggttgcgcgctggaacggccagacctcgggtgcgcacatcttctcggtggcccagcacacgctgctggtcgaagcagtgatgcgccagcagattccgcgcgtcgacatcagccatcggctcgcggcgctgctgcatgacgcaccggaatatgtcatcggcgacatgatctcgccgttcaaggcggtgctcgcgggcgaatacaaggccgtggagaagcggctgctgtcggcgatccatatccgcttcggcctgcctgcggtgctggcggacgagatcacccaacagatcaaggccgccgatcgcggcgccgcctatctcgaggcgacgcatctggcgggattttcgcaagccgaagccaaacggctgttcggccgcgatccggaattgcccgaagcgaccgagcgcgactatctgacaccgtggaccgcagcgcgggccgaaaagcagttcctcgagcgcttcaacgcattgcacgcctcgtaggcgcggcatcgcgagccgtgccgcggttgcgccgcaaaatgccgatggacatggcgcctttgcccatcggggagcagccgttataatcgggctcacctaacgcccaaggaccaccatgcttcacgtctgctcgctcgctgcgctctccgacacggttcgtgccaccggcgcaagccatgtgctgaccgtgatggccaatgtcgatcaggtgcagcggccgccctcggtgcttccggccaaccatctgaaggtatcgatggacgacatcgtcgaacagatggacggcttcgttgcgccgaacgagacccatatcgagcgcgtgctgagcttcgtgcgcggctgggatcgccgcgcaccgatggtggtgcattgctacgccggcatcagccgctcgaccgcgagcgcattcgctacggtctgcgcgctcaatccgcaccgggacgaaatgtccatcgcccggctgatccgcgaggcctcgccgatcgcggcgcccaaccgcctgatcgtcagcctcgccgacaaggcgctggggcgtgacggccggatgctgcgcgcgctcgatgcgatgggtcccggcagcatgagcgtcgaaggccggccgttccacatcgatctggaatagcacggcctgcgcggcccgatcgcttgaacttccagtcctctcaactgcactactaggttgcgacgggcggccggctggccgatggttcggcgcgtcctaccggaggcccaatgttcgattcgccgttcgatttcctgaccctcgtcatcgccgtcgttgcgatcattttctcgcgcaaggcgctgggccagatcgcggtgctgcagcgccggctggatgcgatcgaggcggccggcacagccgccgcgcggacagtcgtaccgccgccgctggcgccgctcgaggcgttcgagcagacgctttcgacggcgcctccgatcgcgccgccgccacttcccgaggcgatcgcgagcgagccggaggcgcatgcggaggcagccacggacgctgcaagcgccgccccgccgccgctgcccgaaccgccggccccgccgcagccggcgcccggtttcgaggagacgctgggcacgcgctgggtggtgtggatcggcggcctgacgctcgcgctcggcggcttcttcatggtgcgctattcgatcgaggccggcctgctcggccccggcgtgcgcacgatgctcggcgggttgtttgcgctggcgctgctcggcgccggcgaatggacacggcgcaaggagagcatctccaacatcgcggcgctgccgatcgccaacattccggcgatcctcaccgcggccggtaccgccgtggcctttgccaccgtctacgccgcctacgcgctgtacgacttcctcgcgccggcaaccgccttcatcctgctcggcatggtcgcgctcggcacgcttgcggccgcgctgctgcacgggccggcgctcgcaggactcggcatcgtcggcgcgttcgtcacgccgctcctggtctcatcagacaagcccgacttctggtcgctctatgtctatctcgcgatcgtcacggcggcggcgttcggcctcgcgcgtatccggctgtggcgctggctcgcggtcacgaccatcgccttcgcgctgctatggaccttcccctgcctgcaatgcggcgaggagatgatcgcaccccacgtcttccacgtgatcgcgggcttcgtgctggcggctctgctagtggtctgcggcttcatgttcggccccgacggcgatggcgaggagatcgagccgatttcctccgcctcgctcgccgcctatctgttcggcgcgatgctgatcgtgctcaacagcgcgcacgcggacaccgcgatgatcggcttcggcctgctgacggccggaagccttgtcgtggcctggcgcgcccccgccgcgactggcgtgatcgccgccgcgtcggcgttcgtcttcatcgtgttcggcgaatgggcggtgcgccgcaatgtcgacatgctggtgctgcccggtggcgcgatgccgggcatcggcccgtccgcgaccgacggctcggcctcgctgcatctcgtcacggcagcgctgttcgcggctgccttcggcatcgccggcttcctcgcgcaactgcgttttgccaacacgaaggtcacggtgacctgggccgccgcggcggtgttcacgccgatcgcgctcttggtcgcgctctatgcgcggatcgcacatctcgatcgttcgatcccgttcgcggtcctggccgtgctgctggccgcagcctacgccgctgcgaccgaagcattgacccggcgcggcgaacggccggagttgtcttcgtcgatcgcgctctcggcgaccggcgccctcgcctcgctggcgcttgcgctgaccttcgcactcgacaagggctggctcaccatcgcgctggcgctggtgtcgatgggcacggcgtggctgtcggtgcagcggccgatccggttcctgcgctggcttgccgcgatcctcgccgccatcgtcgtgctgcgcatcggctacgagccgcggatcgccggcgatgccgtcggcaccacgccgatcttcaactggctgctgtggggctatggcgttccggcgctgtcgttctgggccggcagtcatttcctgcgccgcaacggcgacgacgtgccgctgcggatggtcgagtcggcggcgatcctgttcacggtgctgctcgccttcatggagatccgccacgcggtcaatggcggcgacatctattacaccagcgcgggactgaccgaggtcgcgttgcaggtcggcgtggcgctcgcgatggcgatcgggctggagcggctgcggctgcgcagcggcagcatcgtgcacaatgtcgccgcggtgctgctcaccgtcttcgccgggcttgccggtctgttcgggctgctggggctggagaacccgatgctgtggtggcaggacgtcggcggcagtttcatcaacctgctgctgctcggctatgcgctgccggccgtgctggcgctgctgctgtcctacgcggtggcgggccatcgtccggctgcatacgccaacacgatcgcagcgggcgcgctggtgcttgcgctcgcttacgtcacgttcgaaatccgcaggctctatcacggaccggtgctgacgcgcggcgagaccacgggcgcggagcaatacagctattcgatcgcctggctggcattcggcgttgcgctgctcggcatcggcatcgtcgtcaattcgcagcgggcgcggctggcatccgccgcagtgatcgggctgacgatcctgaaagccttcctggtcgacatgtcgacgctcaccggagtctaccgggcgctgtcgttcatgtgcctcggcatcgtgctggtcgcgattggctggctgtatcagcggatcctgttccgcaggcgggcggctctgcctgcgccacaggcggagagctagaccatgatccggaaaagtgcgaagcggttttccgaaaagatcatgctcgaacaacgagctaaagcgccatgacgattcaacccaatcgcatcgcgctttaggttgcagcagcgaacattggctatcgatcgacggattccgcaaccaggcgaatccggaacaccggctttctgccctcgtcgagcagttccatgtgccattcgctgttctgcttcatgttgcgcgaaatgctgccgaggaaattgccgcagaccttggtcatctcggcccaggccacgtcgcggctctcgaactcggtcgcgtgatcggatccaccggcgtaatcgccgtcactgatccggaaaaaatactgcgccatatgactactcaaatcggtgtctccaccatccgcctcgcggcaatgaacgctagctattgagtagctatcaaggcgtggcgaccgccatccgtatgactacggctcggagcatattcccgctagcgcgcagatgagacgtcagggcattttcgagtgaagccggtcccgcacttgatgcgggatggataccggttcgcgtgaagaaaacgcgtcaaaacaagaatctagagcctcgttccgacttgatcggaacggataggccctagtcggtggagcggcgcaattccggcgcgctctcgaccttggcgggctcggccttgaccggctccagcttcgcgcttccgacctgtggtgtctcgacgcgcgacacttcggtcggtgtggcatcggcggatcgggtgcgcgggtgcagcgtgcgcggacgcgccgccgcgcgcgccatcagcatctgctggccgccctggtgatggaaatcgcaataggcgaagcccatgccggagaccgagccgcggaacgagcggtcgtcctgcttgtcgagattgaagcacggttcgaacggaatgcccttcagggaggcgcaaacgctctgaccgcggatttgcagcgtattgccgggcagccgcacgtggcggatcgggccggagccggagaactggatcgagcctgccgcgccgagatcgtcgaggatacggccggcgccgcgggtgccatcgaaacaggtgaacgcaaacaccttgccggcgacgaacctgcgggcctcatcggcgttcatgctgcctgcgaacgccggcacgaccattgccccggccgtaacggcccccaacaccaaacgcgcaagcatgagctactccacttacgagcgcgggcacccgctccttgttgagcatgatccccgctaccgacgcttctcggcgtctgcgcgaggaaacccggccccccgggatcatgccgcaagcctctttacccgctgcttaccataccaacagtggcaacattggagcagcttggttggtaaagtctgaacgtcctcagactatttttaccacgatgcggccgcggacctcgccggcgaggattttcgcgccatagggcacgacctcgtccaaggcgatttcatgtgtgatatcagccagtttcgccttgtccagatcgtgggccaggcgctgccaggcggtcctcctgagctcgattgggcacatcacggaatcgataccgagaaggcacacaccccgcaaaatgaagggcgcgaccgacgacggcaggtccatgccggccgccaggccgcaggccgcgatggcgccgccatactttgtcatcgaaagcagattggcgagcgtggtcgatccgacgctgtcgacgccgccggcccagcgctccttcgcgagcggcttcggcgcacctgacagctcggcgcggtcgatcacctcggtggcgccgagccccttgagataatcggcctccgacatccggccggtcgacgcgatgacgtggtagccgagcttggagagcacggcgatcgcgaccgagccgacgccgccggccgcccctgttaccacgatcgggccgctcttcggggtcaggccatgcttctccagcgccagcaccgacagcatcgcggtatagccggcagtgccgaccgccatcgcatcgcgggccgagataccgtcaggcagccggaccagccagtcgcccttgacgcgggccttttcggcgtaggcgccgagatgggtctcgcccatgccccagccgttgcagaggaccttgtcgcccgccttccaatcgggatgactggattgctcgaccgtgccggcgaaatcgatgccggcgatcatcggaaaacggcgcaccaccggcgccttgccggtcagcgcgaggccgtccttgtagttcagcgtcgaccattcgacgcggacggtgacgtcgccgtccatcaattccgcgtcgtcgaattgggtcagtgcggcggtggtacccttgtccgccttgtcgatcctgattgccttgaacgtcgccacgatgagcactccccgtatcttggtttcgggggagtgtttaacccatcaggcaggctgcgcaaccgggcgtgcgacgggagcctcgacgatcggcaggttgatcagggctgacagcacgccgaacagcaccgacagccaccagatcggggtgtaggaaccgaactgctcgaacacgacaccaccgagccagacaccgaggaagccgccgacctgatggctgacgaaggcgaagccgtagagggtggagaaccagcgggtgccgaacatcagcgccaccagcgccgaggttgggggcacgctcgacagccacagcagcccggagaccgcgccgaacgcgatggccgagaacggcgtcaccgggaaggagatgaaggcgaccgtcgccagcgcgcgtgaaaaatagatcaccgagagcaaatagcgcttcggaaagaagttctgcagccagccgacgctgagcgagccgacgatgttgaacaggccgatcgcggcgaccacccaaccgcctgtcgtcgccggaatgccgcggtccgccagataggcgggcagatggatggtgatgaaggcgagctgaaagccgcaggtgaagaagccgagcaccagcagcacgtaggagcgatggccgaacgcctccgccagcgccgtcctgaacgattgctgatcggcgggcgccacatccttcgtcgccgcaggcggcgtcgcgagcgcgagcgagagcggcaggatcagcagcatcagcgcgctgaacaccacgagcgcggtctgccagccgaaattgtcgatcagggcgacgccgaacggcgcaaacaggaactggccgaacgagcctgcggcggtgccggcgcccagcgcgatgccgcgcttttccggcggcaacagcttgctgaacgctgccagcaccagattaaacgacgagcccgacaggccgaaaccgatcagcacgccggcgctgatgtcgagcgacaatgagctggtcgagtagcgcatcagcagcaggccggcggcgtacagcagcgcaccgacgatcatgacgcgcagcagcccgaagcggtcggcaatggcgcctgcgatcggctggccgaggccccacagcaggttctgcagcgcgatggcaaggccgaacacgtcgcggccccaggcaaactcgcggcccatcggctgcacgaagaagccaaggctggagcgcggtccgaagctcagcagcgcgatcgcacagccgcacacgatgatcacaagcggcgtgcgccaggtgccggacgccggtcggagatctcctgccgtaacagccatgtcgtcttcccccggatctgccgcccggggaaccggccccgccgaacgttaccaggagttaatgcatatgcatgaaaaccccaagaggggcgggagaaaaatattcgcctgcaaggctgccctgcagaatccgagaggatgacgagcgtcattccggggcacatcgcacccggaacaggaagccgaccgcgctaccgcttggcgctggcctgctcggccgagctccgggcggcctcggcgagctgcgccgatatcttggcggtctcggcagcgctgccccagctcggcgcatcgctgccgtcgccccaggcgcgcgggcgatagaaggtgtggacgccgaacttgtacgtcttcttcatttcgctgacccaggacggccgcacccaataggcgtggtagtgggtcgagcggtcgacttccggcagccacaatttgccgtcgagcatcgccttcgcgatcttcttcgcacggtcccacatgtcgggctcgcggacgacatcagggatgttgtcgcaggcgaaggtgaactgacaggcgtagtgacggttcttgttctggtagaccacgccgcacaccgtctccggatatttgccggagaaggcgcggttcagcaccacctgcgcgaccgcgatctggccgcgcaccgcttcgccgcgcgcctcgaagtagacggcttccgacaggcacttctccgacttggcgcgcgacttcgtgtcgaacaggccgagccgttccgccggcgtcttggtgtgctggtcgtcgacgttgacctcgcccttcggtgcgatgctctcgcccatctcgccggccttgaccggaccgtcggcatcgaccggcagtgacgccatcaccttcatgtcgggatcgggctgagcggccggctgcacgacgaccggcgcctcaccgggttgccagcgctcgagattttccggcgtgccgagcgacgagccgaagaacaggctggcggtcttgaatgcaaacgggtcgcgctcgtgcgccgcatcggcaggcgccgccgcaggtttcccaggcgcaggcttcaggtcgtcgagcgggttggcctcgagcgacatcgacacgtcggattgctgcggcgacggcttggcatattgcggcagcggcggcgcgcgcagcgcctcctgcaattccggatcgagcggtgcgttgtcggcaagtgcgccgccgctcgtcgcagccgcggtcttcatgcccctgaccgacgaattcgatgtcgcgggatcctcgttcgaaggagccgcgcttgcaggctccgcgggttcgacctgatccggccgcctgacgacgagacgatcgcccttcaaggtgcgatcgaccttgggaaaatcggatgcctgatagcgcggcggcggcgtggtgatcggattgcgagtgacagcgccggtgacgtcggcgctggagtccagcctcgcgagcaggatttgcgggtcctgcggcgcggaggttccgatcggacggccgaagctgtaggtcgcgacctggatggagccgaccgcggacgcgaagacgcgcttctgccagcgctcggcaacgccgggctgccgggccaggagcgaggcaatatcctgatatccgatctcggtcggcatcagtgcgaagatgcaaagaccgagaccgaagagcgcgagacgggcgcccttcggctggttacgcgacacaaacatcgtacgctcacgcaacgcttactgagtgcaatcgaacgcggtacatccgcgcaattcgaccttttccgttgctaatctgtttaggttgccgcggagttaatcggcgttgcaagcgcgctacactcaagcgatcgcgtgcgcagcgcgcgccgtatcactcgcattggtaaatgcgcggcgcatgaaagtcgtaaacaacggatcaacggagatggtgaacgagacgttacccgtccctcagccgtcattgcgaggagcggcagcgacgaagaaatccattctttccgcacaaccggcacgatggattgcttcgctccgctcgcaatgacggtggctattgagggcgctaaacaaagaggccgggacgtggtcccggcctctgcattatctgaacccgatcgatcgctcacgcctggctggcgatctccttgccgagcgcggcctgcgcggcggcgaggcgcgcgatcggcacgcgatagggcgagcacgagacgtagtcgagcccgacctcgtggcagaacgcgaccgaggcgggatcgccgccgtgctcgccgcagatcccgaccttgaggctcggccgggtcttgcggccacgcgtgacgccgatcttgaccagctcgccgacaccgtcgcgatcgaccgagatgaacggatcgatcgcgagaatgcccttggcgacataggtgccgaggaagctcgcggcgtcgtcgcggctgatgccgtaggtggtctgcgtcaggtcgttggtgccgaacgagaagaactccgcggtctcggccacctggccggccatcaggcaggcgcgcggcagctcgatcatggtgccgacctggtaggtcagcttgacgccggtttccttcatcaccgcacctgcggtggcatcgatccgcgccttgaccagatcgaactcggccttggtcgcgatcagcggcaccatcacctcgaggccgaccggcttgccggtgcgcttgccggcctcgacggccgcctcgaagatcgcgcgcgcctgcatctccgcaatctccggataggcgatcgcgagacggcagccgcggaagccgagcatcgggttgaactcggacagttcgcgggcgcggtcggcgagcttgcgcggatcggtgttcatggcgcgcgccacttcctcgatctcggcctgggtatgcggcaggaactcgtgcagcggcgggtcgagcaagcggatcgtgaccggcaggcccttcatgatctcgaacagctcgacgaagtcggcgcgctgcatcggcaacagcttcgacagcgcggcgcggcgcgactgctcgtcctcggagaggatcatctcgcgcacggtgcggatacgggtctcctcgaagaacatgtgctcggtgcggcagaggccgatgccttcggcgccgaacttcaccgcggtgcgcgcgtcatcgggcgtgtcgccgttgacgcggacgccgagcttgcggacctcgtcggcccaacccatcaacgtgccgaactcgccggacagttccggctcgatcatcggcatgcggccggccagcacctggccgaccgagccgtcgatggtgatgacatcgccggtcttgaaggtgcgcgaaccgatgctcatggtgccgcggccgtagtcgacacggatggtgccgcagccggagacgcagggcttgcccatgccgcgcgcgaccaccgccgcgtgcgaggtcatgccgccgcgggtggtgaggatgccttccgcggcgtgcatgccgtggatgtcttccgggctggtctcgatgcggaccaaaatcaccttacgcccgtcggcctgcagcttggcggcttcatccgacgagaacacgatctcgcccgaggccgcaccgggcgatgccggcaggccggtcgcgatcacgtcgcgcttggcggcgggatcgatggtcgggtgcagcagctggtcgagcgaagcgggatcgatccgcgtcaccgcgtccttgcgcgagatcaggccctcattggcgagctcgaccgcgatgcgcagcgcagccttggcggtacgcttgccgccgcgggtctgcagcatccacagcttgccctgctcgaccgtgaactccatgtcctgcatgtcgcggtagtgcttctcgagcagcgtgtagatccgcgtcagctccttgaacgcgtgcggcatcgcggcttccatcgacagcttgtcggagccgctctcctgacgcgcctcttcggtgatgtcctgcggcgtgcggatgccggcgacgacgtcctcgccctgggcgttgatcaggaactcgccgtagagcttgctctcgccggtcgacgggttgcgcgtgaacgcaacgccggtcgccgaggtctcgcccatgttgccgaacaccatcgcctgcacgttgaccgcggtgccccacgactccggaatgtcgtgcagcttgcgataggtcaccgcgcgggcgttcatccaggatgagaacacggcgccgatcgcgccccacagctggtcgtgcggatcctgcgggaactcgtggccggtctccttggccaccgcctccttgtacttgccgaccagctcgacccagtcgtcgccggtgaggtcggtgtcgagcgaatagccctggccgtccttgaaggtgtcgaggatatcctcgaaatgatgatgctcgaagccgagcaccacgtccgaatacatcgtgatgaaacggcggtagctgtcataggcgaagcggcggtcgccggagagttcggcgagcgcttcgacagtgcggtcgttgaggccgagattgagcacggtgtccatcatgcccggcatcgaggcgcgcgcccccgagcgcaccgagaccagcagcgggttcttggcgtcgccgaaggtcttgccggtcagcttgccgacatagtcgagcgccttctcaacctgtgctttcaattccttcggatacgtcttgtcgtgatcgtagaagtaggtgcagaccgaggtcggtatggtgaaaccgggaggcaccgggaggccgagattggccatttccgccaggttggcgcccttgccgccgagcaagtcgcgcagggtcgcctggccctcggctttgccgtcgccgaacgtatagacccacttgccggccttgatcgcaaccggggcagccttcttcggcgcagccaccgccttcgccggcgccttgctggcgggctttgcggccggtttggcggcggctttcggcgccgccttcagagcgctcttcttcagcgccttgcgcgccggcgcggccttgcgggcggcggccgagggctttgatttcgctgctgttttgtcagcagttttcgcagcaggtttcttggacttcgcgacggctttggccatgtcagacaacaatccggaaggaggggtcgaagatgcgcgccttacaccattttggggggttccgcgcaagccgcgaaaccccgctttcccgctacaggtgcagccagcgcagcaggcccatccccacgagcccgacgaagatcaggtagatcgcgacgatatagttgaggagccgcggcatgatcaggatcaggacgcctgcagccagagcgacgatagcaggcagatgcccagcagtgatggtcattgaagttttctccggcagtttttggaggtgcgaatcgagcggcagtttatccgccgaggaggttccccacatcaagacgtctggcatagcaacaggttcccgcaactcacgaaaattgccccaaattgccgcgtatgtggcggcgacttttccggaacatcaccacgtcagctgcattggctcgccatgcgcatcggcgaaggccggcgcgccgcaagagaatggagcgagccatgcgaaacaggatacttgccgttgcagcggtcgctgctgcgatcacggtgccggctgttgccgcacaggcccagaccgttggcgttgtccgcggaggcccgccggttgcagtcgaggatgacgaaggcattgcgatcgagcagcgcccggcattccgcgaatacatcgtgcgcgagcgcgtaccgaactacaccgttacggatcgggtcgtggtcggcaccgtgctgccggacgccggcgtgacctattacgacgtgccgcaacggttcggcgcgacgccctatcgctacaccgtcgtgaatggtgagaccgttctggtcgagccgcgctcgcgacggatcgttcaggtggtcgagtaggcctgcgtcaactcggtagcctgaacgacagtccggtcggtagcctgaacgacagtccgggcgccgcgcaagcggatgtgcgcgcagatcgaccggaccagaaagccccgcccggccttccccaccgggcggggcttttccgtcgtgttgcgatgaactctggaagcgtgatgggtgagctggatcaacggcggaggttcagctctcctttgggagaggtcggcgcgtagcgccgggtgaagggttgcggtgcctcgttagagcagcggcccctcacccgatttgcttcgcaaatcgacctctccccacggggagaggtgaagcaagtgcgtggtcgaaccaattcgatccaactcatcttcctcggcttacgatttcaggatcgagagcagcgtcgaggtcgacttgtagctcttgaccgcggcgtcctggaaatccttcgtccagttggccgcctgccgctcctctgcactcatcgaggaatatttcttgaggatgccgagtgagaactggcgcggatcgccggccgactggctctgcttcagcgcgtcgagcacggcaagacgggtccgcgtgttgagttcctgcttggccgcgaagatctcctcgccggaaaacttcttgtcctggttcagcgagatcgccgacagcgagcggttgtccagcgaggacaaatcggcaagctgtccggtcttgcgcctgggatcgtagaccagctccttgccgctcttcgccgcctcgctcttctgccggtcgaggaaggcgcgcacgtcgctcgccacgctggagaagtcgcgcgcattgccggtcgtgggcggggcggtcccggccagcgcggcggcgatcggatcgcccgtgatcccacttggcgccttgttgggatcctgctgcgtcgcctgatagcctttcagcaccgcagcgcgttggctggcccaggtcgcggtggccttctcctcgtcgctggcgccatcgagatagtcgagcgccgccttgtagctgacgctgtagtcgccggtcaggcgcgtggtcgcaagcgacggcgccagggccttgtcgaagcgctgcttcagttcggtcgcggcgaccgcctgctcgtccggcgtgaacttgccgccattgttggtcgaaatcgcaaacagcgagcggcggtccagcgtcgagagatcgatcgtggtcttgccgtcgacgatcggcttcttcacccccgcgaccgtatagagccgatcgagcgtcgtgcgcgcatcgctggtgacggtcgcgaaatccggcagcgccttggcgagccgcgcgcgggcggcgtccgacagcgtgaggttggttgcagcccccgaagtcagggaggccgaaagatcgccggcggtgccgtcacccgacagggtcgccgccagcgagggtgtcgcggcggcccgcgcataggccgagccatattgggcgtagggattgggcgaggtgccgatcgaggtcatcggggaggtccctgcattggcgcgaggggcgacttcttaagaaatcgttgatccgccaggaccttcgcagggcatggttaacaaattgcaaattgtgtcgaaatatttccaaagatggctagttgcgcttccgggcaatgacgcggtgaatgacctttccggaggacgcgctgacgacctctgtatcgagcagcagttcagccgccgccagttcagtgcgcaccagcgccgcatcgaaggcggcatagagccgcccatgcgcatcgcgcgcgtcgtcgccttctgtaacacgccagctcagatagagcacgccgccgggcttcacgagttcgagcatgcggcggaccgacggcgcgatcagcgcgtggtcgaggtgcatgatcacggtctcgcacagcacattgtcgaagctacaggccgcgatgccggaaagctccggcagttcggcacgcgcaaagcgcagcgccggatagcgggcgcgagcttccgcaagcaggccctcggaggcatcaaagccctccgccggaaagccgttggcattcagccacgccacctcgcggccgctgccgcagccgatatcggcggtcgcgccgcccttgatgaagaattgcccgacgatctcctgcagatcgcgaggggccggctggtcgtgccagtcctgcgcaaacgccgccgcctccttgtcgtaagcggcgagcgttgcgcgatccatcggtcagccctcgatcctggagaaatccgccaccgcgcgcgtcgcggcacggatctcgttgagcagcttcagacggttttcgcgcaccttcggatcgtcatcgttgaccttgaccttgtcgaagaacgcatcgaccgcaggccgcagcttcgccatcgcgctcatcgcggcggcgaagtcttccttggcgaccgcggcggaggcctcggccttcacctgatcgatcgctttcgcgagcgccttctcttcatccagcttgtagagcgcagcgtccggcgcaccgtcgaacgtgcgcttgtccttcttctcctcgatgctgaggatgttgctggcgcgcttggtgccggcgagcaggttcttgccgtcgtcactgtcgaggaatttgccgagcgcttccacgcggcgaacgacgagcagcagatcgtcctgaccgccaagcgagaacacggcatcgacgagatcatgccgcgcgccctggtcgcggagctggaccttcaggcggtcggcgaagaaagcgagcagatcgttcggcaacgtctcggcatcggcctcgaccgacagtccgcgcaaggccgatttggccgtcttcaggatcggcaggcgcaacgtgttctcgacgatcagcctgattgcgcccagcgccgcgcggcgcaacgcgtacggatccttcgatcccgtcggcttctcatcgattgcccagaatccagccagcgtgtcgaacttgtccgccagcgccactgcaatgctcaccggatcggtcggcacgcgatcggtcggcccctgcggcttccagtgctcctcgctcgcggcggcaacggacgcatcctcaccctgcgccagcgcgtagtatttgcccatcaggccctgaagctcggggaattcgccgaccacttcggtcagcaaatccgccttggcgagacgcgcggcgcgttttgtcttctcgacatcggcgccgaccagcggcgcgatctcggctgccaacgcctcgatgcgcttgatgcgctccgcctgcgtcccgagcttctcgtggaacacgatctgctcgaatttcggcagccggtcctcgagtttcgtcttcagatcagtctcgtagaagaacttcgcatccgacagccgcgggcggatcacgcgctcattgccggcgacgatggtcttgccgccgtcgggcgcctcgatgttggcggtcagcacgaacttgttggtcagcttccccgtcttgggatccctgaccacgaagcacttctggttgttgcggatggtggcgcggatcacttcgtccgggatgaccaagaattccttctcgaacgatcccatcatcacaacgggccattcgacgagaccggagacctcatcgaccagcacctggtcctcgaccagttcgaggccctgcgcgaacgccagctccttggcgtcctcgacgatgatgtccttgcgcgcctgcggatcgaggatgactttggcggccttcagcttggcctcgtagtcctcgaagcggcgcaccgggatcgcacccggcgccatgaagcgatggccgtaggtggtctgcccggcctcgatgccgtcgaccgagaatttcacgacatcgggctcctcggtctccagaccgaaggtcgcaatgatcgaatgcagcggccggacccaggacagcgagcctgacttggcggagcgcgcgccccagcgcatcgatttcggccaggggaaggtgcggatgatcaccggcaggatttcggcgatgacgtcgatcgcggcacggcccggcttctcgatcagcgcgatgtagaagtcgcccttcgcatctttctggatctttgcttcatccagcgacttcagaccggtcgctttcagaaagccctgcaccgccccatcgggggcgccgatcttcgggccgcgacgctcagacttcaggtccggctggcgcgcgggaatcccgtgcacggtcagcgccaggcgacgcggggtggcgaatgccttggcgccctcatagacgaggccttcggcgacgagcttgtcggtcaccatgcggcgcagatcgtcggccgccttggcctgcatgcgcgcgggaatttcttcggagaacagttcgaggagaagatcgggcatcagaccgccctgcccgtttcagtgtggatccaagcttcgccgcaggccttcgccaggtcgcgcacacgcccgatatagctctgccgctcggtcaccgagatgacgccgcgggcgtcgagcaggttgaacacgtggctcgccttgatgcactggtcgtaggccggcaaggccatcagatgttccttttgattgccaccgtcacgccagccggcggcgagatatttgcggcaggcctcttccgccatcctgaactgctcgaacagcatcgcggtgtcggcgtattcgaaattgtgccgcgaatattcctgctcggcctgcaggaagacgtcgccataggtgaccttctcggcgccttcgcggccgttgaagttgaggtcgtagacgcggtcgacgccctgcacatacatcgcgagccgctcgagcccgtaggtgagttcgcccgcgaccggcgcacattcgacgccggcgacctgctggaagtaagtgaactgcgaaacttccatgccgtcgcaccagcactcccagccgaggccccaggcgcccagcgtcgggctctcccaatcgtcctcgacgaagcggatgtcgtggatcgccgaatcgatcccgatcgcggccagcgacttcaggtacagctcctgaaggttcggcggcgacggcttcatgatcacctggaactggtagtagtgctgcatccggttgggattctcgccgtagcggccgtccttcggccgccgcgagggctgcacataggccgcgttccagggttttgggcccagcgcgcgcaaggtggtcgcgggatggaaggtgccggcgcccatctccatgtcgtagggctgcaggatgacgcaaccctgctcggcccagaaccgctggagggccaggatgaagccctggaacgaacgttccgggcgcatgtggtcaggcagggcgtccatcgttggaatcgatctcgcgagggggtgtgaaaacgcgcgggaccgtatcggcggcggccaatggaatcaaggcgatgccggaaaatccggcaccgccaatctgcggaatttgaagctgctagcccgggcgatacgccccggtcacggggtcgcggcgcagggtcttgatttcgctcgcacgcgaggcctcggccacgcgggacaatcgcgcctcttccagttcctggttgatccggacggccgtcttgtatgcccagcggaccacggccaggccacccaggacgcctgcgaatgcaatcagcggcggcatcggtcgatccttgtcgttcacgtctgtcaggccccaataccctcattgtcgcgcaaggcggcctgcgccgcaatcgcggttttggggctaaatggcgcgctcaaatccgcgtgttcagagcccgaatctggcccaaatcgcccgcgtctcgaccgccgagatcaggtcgtccggcaaactcgcgaagccgtccagcgccgccagcgagcccgccccgggcgcccgccggccgagcaggccggacagcatgccgctggcgggtgcgatcaccggggtcagcaccttctcgccatagcgggcccgcaaggtcgcgcggagatcgccaatgccgtcggcaagcccgagcccaaccgcggtctcgcccgcccagtactcgccggtgaacagctcgtcgtcgggccccttcaggcggctgccgcggctctgcttcaccaggttgatgaaggtcgcatggatctcgcgctggatcgtcttcagccgggcgacgtcgtcggggttttcgggcaggaacggatcgagcatcgccttgtggctgccggccgtatacagccgccgctcgaccccgatcttcttgatcgcctcctggaagccgaagctgccgccgaccacgccgatcgagccgaggatcgaggacggatcgcaatagatctcgtcgcccgcgcaggcgatcatgtagccgccggaggccgcgacgtcctcggcgaacaccagcaccggcagtttcttctcggctgccagttggcggatgcgcagatagatctggcgcgactgcaccggcgagccgcccggcgaattgatcaccagcgccaccgccttggcattccgcgtaccaaaggcgcgctccagcatcttggcgacgccggcgagcgtcatgccgggccgcagcggcgtcaccgcgcctatcacgcccgacagccgcaccaccggcaccacggccgtgccgcgccggaaacgtgcgggcaacattccttgcacgcgttcgagcagtcccgaacgtccgccggaatggccgcggcgatcacttatttgttcactcatgccgttacctcgaattaaccactttttatcacgccactgtcattggtttccgtggaacgcgttttgcattttgtcattggggaagcaacgcgcgggcggagaggaattcatgaagatctatctgctgattgtgctgatcggtacgctcctgacggcgatccggttcacatcgacgccggaacgccagtcggaaacggcttcgcagtgatttagtgccagtgacgcgggcagtaccgcggcccgtcagcgccgcgccagcggcaattctccctttccagccaagatctcctgcacccatttgttgggcacgcctgccccatcattgagcaacagcgcggcatgcagccgcgtcggcgcccggccgcccttggtggcccgcaccaggattcggatcgccggcgacgtcgcgtcagcatgaaccggcagcagctcgaggctgccgaagccgcggtccagcgccgccagcacgtcggcaatcccgtccgcgcgccagatcatcgcaagctgcccgttcgacctgagaagtcgccgcgcggcatgaacccagttcgccagcgtggtcgcggtcgcgacgtgggcacgctcgcgtacgccgtccggcgaggcgcggtgccgggagggatcgttgaacggcgggttcatcagcacgacatccgcgctgtcgggcgcaaggccggccgcggcaaaggccggcgcgtccgcttcgacatcgaggatgaccacctcggccataatcgcgttggcaccggcattattccgggcaagctcggccattgccgggtcgatctcgaccaggacgaggtcgatccccctcacccgccgtgccaccgcgagccctgccgcgccgacgccggcgccgagatcgacgacgcggtcacctgaccgggccggggttgctgcggcgagcaggatcgcgtcatggccggcacggtgaccgcctttcggctgccgcaggcgcaactgcccaccgaggaatccgtcttcggtgatctcggcggccggaaactccttctttgacgcgttttctttacgcgaaccggggtccatctcgcttggaaacgctctaatcatcggcccgcaattcgtggccgaggccggcatcggtcagcagctggcgggcctcgtggttgtcgtcctcatgcaccaggatccgccgcggcagcacgccgagcgagccctcgatgatgctcatgttctggtccagcaccagatgatggatgttagcgctgtcgagcagcgccccgatggcggagaccagcaccacgtcattggtccgtaccaattcccgcaaaacccactctcctatcggcccggttgtgcggccaatgcgtcacatgtcaacaacttcgtggccttgccgcaaaccttcgcagtttctattgttatagctgagcatagtgcgaattcggcaaaattggagaccagcgtggcggttattgtacccttcgaaagcccgtccaatgcttcgatcgacgggctggtgggacttgtcgccgccgacatggagcgcgtcaacgcgactatcatttcgcgaaccggctccgaggtcaccatgatccccgaggtcgccaaccatttgatctcctccgggggcaagcggttgcgcccgatgctgacgctcgcgatggcccagctctcggactacaccggcgacggccatatcaagctcgccgccgcggtcgagttcatgcacaccgcgaccctgctgcacgacgacgtggtcgacgaaagcgagctgcgccgcggcaaattgtccgcgcggatgctgtggggcaatgaggccagcgtgctggtcggcgacttcctgctcggccaggcgttccgcatgatggtcgaggtcggctcgctgcgcgcgctcgacatcctctcggccgccgccgccaccatcgccgagggcgaggtgatgcagctcgccgccgccaagaacaccgcgaccaccgaggacgaatatctcgccgtgatccgaggcaagaccgcggagctgttcgcggccgcctgcgaggtcggtccggtgatcgccaaccggccgaaggcggagcagaccgcctgccgctcggtcggcatgaatctcggcatcgccttccagctcgtcgacgacgtgctcgactatggcggcaaatccgcaaaactcggcaagaatgtcggcgacgatttccgcgagggcaagatcacgctgccggtggtgctcgcgttccgccgcggcaacgacaccgagcgccagttctggatccgcgcgctggagcgcggcgagatcggcgcgagcgatctcgaccacgcgatcgggctgatgaccaagcaccgcgccctcgaggacacgatcagccgcgcccagcactatggcgcgatggcggtcgacgcgctggcgctattcccgccctcgccgatgaagaccgcgctggaacaggtcgtcgcgttctgcctggcaagatcgcactgaccgcggcacatcaacggtgtcgtcccggcgaaggccgggacccatagccacagggttgagttgtcgaagaaggctgcggccccagcgtcgcgcgacaatgagtattggtggttatgggtcccggccttcgccgggaggacggcgagtccatggcaccgtcaggcaactcagtcgcaacgccgcgcccgctcaagccacgtcgaccttcatgcgcaacacccgttgcgacacggcctcgtcgaactcgccgcagagcttggcggtgacgacggtcgcgaccgcgttgccgatgacattggtggtcgcaaccgcaatcgacatgaagcgatagacgccgaacagcaccgccagtccttcgagcggcagcactccggttgcagtgaccgttgccgcgaacacgacgaatgtgccgccggagaccgtcgccgcgcccttcgaggtgatgagcatcagcgcgaggatgccgagctgctggctgaagtcgagcggcacgttgtaggcgttggcgaggaacaggacgcccatggacatatagatcgacgttccgtcgagattgaacgcatagccggtcggcaacacaagaccggcacattgccgcgagcaaccgagctgcggcagcttttccagcagccgcggcagcacgctttccgacgacgccgtgcccagcacgatgaatatctcgtcccggatgtagcgcaggaaacggaacaggttgatcccgaacagcgcgcaaaccgttcccagcaccgcgacaatgaacagcgccaccacggcatagaaactgagcacgaggtagatcagggacaacagcactgccgttccgctcgatcccaccgcgaatgcgacggcgccgaaggttccgatcggcgcgaacgacatgatgatgtgaatgaactcgaacagcacctcggacatgcggttcagcccggcttctatcggctggcgcttgtccgatctcaggcgcagcagcgccgcgccaaagatgatggcgatggcgaggacttgcagcaattcgccgcgggtgaacgcgccgaggaaattgtcggggaagatgttgaggatgaaatccagcgcgccttgcggctttcccggagccgccggcggcttcacgccggcgccggccgtcgcggtcgcgatgcccttgccgacgcccaaaagattgccggcaacgagtccgaacgcgagcgcaatcgtcgatacgatctcgaaatagatcatcgcaaccaggccgaccttgccgacccgcttgaagtctccggccgacacgattccggctgcaacgcacaggaacaccagcggcgccaccgcggtcttgatcagacgaaggaagatgtcgccgagtatctcgagttcgatcgccagagacgggaacaggaagccgacggccgcgccgaggatcatggcgatgatcacctgaaagccgaggttcctccaaagcggttgcttcgaaatcggcgcaggcgtcgacgtttggagcccgagcgaggcggcggccgtagacatggatttcctccgaatgcgcgttggtcgcgtctattgatgaacgggcgatgccggactggcgcgcgtcagcgcgccgcgctggccagcacgcggtcgaccatctcgggcgcaaggccgagatagttgcggggcgatgtgagccgctcgatcgtcgcccgatcgatgcgcgaggagattctcggatcggccgaaagcgcgtcggcgagcgatatgttctgctcgttggcgcgacggcaggcgtcgtagacgacgtcgtgggcgtcctggcgcccgagctgcggcgcaaggcccatcatcacggcttccgccacgatgagaccgcggctgatgtcgagattcgtcgccatccgcgcttcatcgacgatcaggcccccgagcgcgaacttggcctggtgcaaggcgccggccgtcaggacgaagctttcggggatcgccatccattcggcatgccacggtccggtcgcgcgctcgaagtcctggatcgtggcatcgagcatcaggccggcatgctggcgcacgcccttggccgccgccagcatgagctccgacgagatcggattgcgcttctgcggcatggtggaggacgcaccgcggcccttcacaaacggctcgtagacttcggcgaattcggtcgaggtcatcatcatgatgtcgagggcgatcttgccgagcgagccggtcacgaggccgaggaagttcacggcttccgcgagggcgtcgcgcgccacgtgccaggtcgaaaccggcacccccagcccgagttcttcgcagagcgcctgctggacatcgaggcctcggctgccaagcgaggccagcgtcccggcggcgccggcgaattggccgaccagcacgcgtggccgcagttgcgcgagccgttcggcgtggcgatcgaacatcgcaagccagatcgcgcatttgtagccgaacgtgaccggcagggcctgttgcaggtgggtgcggccggccatcgtcgtgtcgcgatgccgcttggacagacctgcgagaatcctgcgcagctccgcgatgtcctgctcgatgatgtcaaggccgtcgcgcacctggaggatcacggcgctgtccatgatgtcctgcgtggtcgcgccccagtgcacgtagcggccggcgtcgccgcattgctttgccatctgatgcacgagcggcaggatcggatagccgacgatgtcggtttcctggcgcagcagatcgaaatcgagcgccgcaacgtcggtccgctcagcgatctcgtcggccgcctcggagggaatgacgccacaccgcgcctccgccttcgcgagcgcgatctcgacctcggcgtagcgggaaatcagcgcgtagtccgagaagatctcgcgcatgcgcggcgtaccgaatgcgtcacgaaacaggatcgagtcgagaacagtcgtggcggtcggaatggcggcgtgcatgagggcctcccaaaggcttttttatgtccggacataatcttgtattttatgtccggacataatgtcaagggcgtgctaccctcggaccgtcggattcggactgggggaacgttccaggatggctgagacccgctacgcgcaggtggcgcgcgatctcgcagaaggcattggaaacgggcggtttcccgtgggctcggtgctgccgaaggagctcgaactgtgcgagcaatacggcgcgagtcgtcacaccgtgcgggctgcgatccgggagttgcaggacctcggtctggtgtcgcgcaagaagaaggcagggaccagggtcgaggcggcgtcgccgtcgcgcggctaccaccaatcgctcgcctcggtcgaggacctcgtccagttcggcatcgaacacacccgcgtcgtccaggagatcaaggatatcgttgccgacaaggctttggcgcgcgacctcggttgcgcggccggcagcaaatggctccgcatctccagcctgcgcatgagcgcgtcatccgggtcgacgccgatcggctggaccgacgtgtatgtcgatcctgcctatgccgagctgcgcgacatcgtacgcgaccacccgcacgcactgatcagcgatttgatcgagcagcgatatggccggcgcatcgccgaaatccgccaggacgtgcaggccgtccagctgaacccggcctcggcgaaggcgctgggagagaattcaggcgccgcggcgctgcgtatcctccggcgctatctggatcaggcgggcgacaccgtcgaaatatccgtgaccgtccatccggcggaccggttcacattctcgatgcggctgcgccgcgatcgctcgaggtgaacgcggagcttctcgccagacgaggccgacactactccttcaccggcacccagatctcgagcccgccgacgccggtcgatgcatcgaacctctcgtcgtagcgctcgaagttcggcgcgtccgcgaccttcatgccggattgcggcagccagcgattccagatcgtgttgacggtgcggcggatggtcgagatgtggtcggcgtgggtgaacaccacgtatttctgcgccgggatccggacccgcgcgaactcgcgcggcagatcggagaaatcggcgacctcgacgcccgcgatgtagtcgaaattgccggcatcgtcgccgttgcagcagaccccgtaggcgccatggccgacctggcgcggaatatgcgcgcattgctggtggaagccgctccactggttcggaatgccggccgtgctgtcattggcgtggttgtagcgctcgccgacgccagcgacgagaaaggccttgccggtcgcgatgcgcggcggatcgaggtgatcgagggcggtcgagatcatggtgatcggctcctggagcttgagcgtcgtcaggcacgtcgtcgcgcgcaccgtctccggggtgacgccgaaatggtcgcgaaacgcgcgggtgaatgcttcgtgggagccgtaatccgcatccagcgccagcgtgagaatgtcgggcgcaccggccgcaagctcgcgcgcggcctcgctgaggcggcgcgcccgcacgtagcgcatcaccgagaacccggtcgcttccgcgaacgcccgcaccagatggaagcgcgagaccccggcgacggcagcgatgtcgtcgagcgtcagcgacctgttgagatggccttcgatgtaccagagtgccttctgggctggattcatggacgacggctttcctgaaaagctcgggcatcatgcacggccgccgcgcgcggcgtttgacagtccttgctgcgcggcggcgaagccgagatttcgctctgcgaaattctaccgcaaagccgtcactggcaacagcgttgcaatcgtgcatactcgcagttgcatcgatccgacggctcatcaagctgcccgaaaatcaagactgcacgagccgcggccagcatgtcagggaggacaatgatgcaccaccaccgcttgagctatgccaactgcgtcaaatctgcagtgcttgcggggcttttgacgatcgccgtcgcaagcgccgccaacgcacaaaagaaatacgatccgggcgcaaccgacaccgagatcaaggtcggcaacatcatgccctattcgggcccggcgtcggcctacgccaccatcggcaagaccgaggcggcctatttcaacaagctcaacagcgagggcggcatcaacggccgcaaggtcaatttcatctcctacgacgacgcctactcgccgccgaagatggtcgagcaggcccgcaagctggtcgagagcgacgaggtgctcctgatcttcaatccgctaggcacgccgggcaacaccgcgatccagaaatacatgaacgccaagaaggtgccgcagctgttcgtctccaccggcgccgccaagtggaacgatccgaagaattttccgtggaccatgggctggcagccgagctaccaggtcgaagcgcgcatctatgccaaatacatcctgcagaaatatcccggcaagaccatcggcgtgctgtatcagaacgatgatttcggcaaggactatctgatcggcctgcacgacgggctgggcgaccaggccaagaagctgatcatcgtcgaatcctcctacgagacctcgtcgccgacggtagattcgcagatcgtgcagatcaagggcgccaaccccgacatcttcgtcaacatcgcgacgccgaaattcgcggcacaggcgatcaagaaggctgccgagctggactggcatccggtgcacttcctcaccaacgtctcggtgtcgatcggcggcgtgatgaagccggccggctacgaggcgagccaggacatcctgtcgacccagtatctgaaggatcccgcggatcacgagtggaagagcgatccggccatgaacgagtggcgcgccttcatgaccaagtggtatccggagggcgaccagaacgacgcctcgaccgtgttcggctacggcgtcgccaaggggctggagcaggtgctgcggcaatgcggcgacaacctcacccgcgagaacctgatgaaacaggcggcgagcctcaacttcgagatcggcatctacctgcccggcaccaggatcaagaccggaccggacgactacgcaccgatcgagcagttgcagatgatgcgcttcaagggcgagagctgggagcggttcggcccgatcatgagcggcgagaagagctcataaggactttccgccaccactttgagcttcatgatgcccggcaacgcgccgggcatccacgtcttcgacacgattcacgcgcaagatttttcgcaggcaggatttgcgatggccggcacccgggcgatcaacccggcgccgtagcgatgctgaagtgtccggccaccgcgacccgaaggcacatcctgcgatcggaaggacaacaacaatgaaaatcaccgacgtccgcgcccaccatatccgcattccctacgacgccggccccgcgagcttccgccagggcgcttccgccatctcggcgctcgacatggtgctggtcgaggtctcgaccgatgccggcctgaccggctggggcgatgcattcgcctatgtctgcccgaagacgagctgcaccgcggtcgccgagatgatcgcgccgcaggcacgcggcctcgaggtgcccgatgccgccgggattcccgccgcgatggagcagatccagcgcaatctgcatcttttcggccgctacggcatcacgatgtttgcgatctcggcgctcgacatcgcgctgtgggatctcgccggcaaggtgaagggcgtgccgctgcatcagctgatcggcggcgcgaagcgcagtacgattccagcctatgcgagcctgatgcggatcggcaatccggcgcagatcgccgccgaatgcaagaaggcgatcaagcttggctatgccgcgatcaagctgcacgagaccacggtgcctgcggtctctgccgcgcgcgaggcgatcggccccggcgtgccgctgatggtcgacatgaactgcccgctggacgggccggcggcaattcaattcgcgcgcgactgcaagcaggccgcgccgatgttcctggaggagccggtctggccgcctgaggatttcgcgacgctcgccgaggtgcgcagggagggccggctcgatatcgcggccggcgagaacgcctgcaccgtgcatcaattccggcagatgatgaccgcgggcgcggtcagccacgcgcagccgtcggtgatcaaggtcggcggcgtcaccgaattcctgcgggtcgccgtgctggccgacgagttcggcgtccaggtgattccgcactcgccctatttcgggccgggcttcctcgccacgctgcatctgatggcgatccgcgacgccgggctgatcgaggtgttcttcatgaagcgccccgcctgcctgtggggcgagcggatcgccgtcgacgcccacggccatgtcgccgtgccgcagggccccgggctcggctacgagccggatcgcgacgtgatggagaaatatcgggtggcgtgagagcgccgcgacggcggtgtgccccctcttccgcttgcgggggagggctggggtgggggctctcttcacgagtcattccgtggagagagcccccacccgtatcgcatctaacgatgcgatacggcctccccgcaggcgggagaggcgaagagagttcgcggatcgaagtctgctacttcgtcccgtcctttgccgcaggcgcggcatccttcgccggcggcgcgtccgctttcttcttcagatcctcggtcagcttgagctgcaccgcctgcaagtcggtgacgagcttctgcaagcttgccaccgcattctgcaagctcacgatctgccggttggcggcgtcgagcttctgctgatgatccgtggtgagcttgctgatcgtcttctgcaggaaatcgacgttgctctgcaggcagctggtgcgccgctccatcgtcttctcgacggtgcagatctcgatgccgggaacgtcctgcgcatgcgcggttccgacgacgccgagcgcaagcggcacgagcaggacaagagcgaaacgagcgatcatcggcatccccaatcacatgcgtcattcacagttttgtgcgcgcgacgctgaaagccaggcagacataccacactgaaaccgcattcgagcggtgtgcttcacccattacggggactactcgtggggacgggggccttcggaacttgtttggttcgaccccttttggctcgaccttgggcagtggagacagatcgcatggcaacgcgcgaaaagcggctggcgcaattcgatggcaatggcgaaccttcgccggaacaacgcgtggaagtgctttgtgaggatcacagcggaacgtatcagctgccgttcgcctgccgcttcgtcgacggccagtggcgcaatgacacgacaggtggtgcgctggaagtcaacgtcatcgcctggcgtaagccgcgcgagaagcaaccgggcatggcctgagcctgcaagccgccgctcctgcacatgatccttccggtcatgtgcatgcgctgtttcaaaacgcgacgcgcatgcgacgtgctttaagatttggaacgcgaacggaacgaaccgcgtccgaatcactgattgagcagcgtactccgttgttcacggctagatgtggtcatcaacccaagacggcgcaccacatacagaagcatgatgatcggccgcagccagcggccgacgacaagggttaattcctccgcagacgacatttgcgatccctcctctgcgatccgccttggcgatcatttccacggcgtgatcggcggcacggtctcggttgccggcggcacatccaccgtcttgaaatcggcggggctgacgatctcgaggtattccatgtccttcgagtaatcgaacaggtagtgggtgatgccgggacgctgatggatgacgtcgccggcctcgaccagcgtctccttgtcctcgtacatgaagcgggcccagcccttggtcatgatgacgatctgaaaatcgcacaggtgcttgtgccagccggtgccctgttccggcggcatgtcgggattggccttgaccagatggcagatcacctgcccgccggttgcatccgcaatgccaagatcgcgatacaggaagaagtcgcgcagacctccgcccttgaactcggtgtcaccgggtttgacgtgggagaatttgctgacgacggcgtgctggttcatttcaagcctccacggttctcgttttcgcgagatcgcggcggctcagcgtccaaattttcggcagcgtcgcatcgtcgcggtcacagctcgaatattgctatgcgaaatccttgccagcccgatcgcgctgcggcgatcggtcccgccatgcgccgatctcgcggcggaagcatttggcctgcggcgctaatttgcgttcggcgcgcgccgtgctcgatcgcccgcagcgcccgatggccgacgcggacggcacgtcgattgagcaagtcttgcctggagcttgagccgccggcgcaggcaggccgggtgcgcggcctgcctaatattcgacctcgagctcctcgacgtcggcaggctccgccttcgcagcctcgatccattcctgcatctcgggcatcgccatgatggtgctggcatagcctgcgagaccggaatcgagcttcacgtcataggtcatgaagcgggtcacgacgggcgcatacatcgcatccgccatggtgcggcgctcgccgaacaggaacggcccgcccgataggctaaggcaatcgcgccagatggcgcagacgcgctcgatatcggcctgcgcccgcgaccagatcttgaagccggggaaatggcccttgagattgaccggcagcgaggaccgcagcgtggtgaagccggaatggatttcccccgagatcgagcggcaatgcgcgcgctggatgcggtcgtccggcaacagcccggcctgcggcatgatctcgttgagatactcgccgatcgccagcgtatcccagaccgtcgcgccctcgtggcgcaggcagggcaccaggatcgacgacgacagcagcagcagttcggcccgcgccgaggggtcatcgggggcggtgaccacctcctcgaactccagcccggcgaatttcgccagcagccagccgcgcagcgaccaggacgagtaattcttgctgctgatggtgagtgtcgccttcgccatgtcagttcctcacgcccgaaaacctgcctcgctgccggacgccgcgcgccggtccaaccgccgcgcccccggaaccggtcgtttttcgagcaagccacgtgccaatttcccgggcagctggcccgcctctggcctcgatattgcttggcagaccaggccaccgggtggatgcgtatgatgtcgatgctgtaccaggcctatcagaaccatatggacctcacggcgccgtggcggaccggtgccgcggcggcactgcgctatctcaatctggtgccgcgaggcacctcgcagcggacgttcggccggctcgctgccgcgctcgagctgatctcccgctccaccctgacctatgcccgccccgactacgccatcggcagcgtgacctccggcaacagggagtaccaggtgaccgaggaggtcgcctatgcgacgccgttcggctcactcttacatttcaagaaggtggacggaccggagcagccgcggctgctgctggtggcgccgatgtccggacatttcgcaacgttgctgcgcggcacggtgaagacgctgctgcaggaccacgacgtctacatcaccgattggcacaatccgcgcgatatcccgcgcaaggagggccgcttcgggctcgaggactataccgaccatctgatcgactttctcggccagctcggcccgcgcgcgcatatggtggcgatctgccagccctcggtgtcggcgctggcggcggccgcgatcatgtcggaggacaatcatccggcgcggccggcatcgttgaccctgatggccggaccgatcgacacgcggatccagccgaccaaggtgaaccagttcgccaagagcaagccgatcgaatggttcgaggacaatctgatcaactacgtgccgatgcagtgcaagggcgcgctgcgccaggtctatcccggcttcgtgcagctcacggcgttcgtctcgatgaatctcgagcgccacatcaagcagcacatcgatctcgccgaccatctcgccaagggcgagaccgacaaggccgaggtgatcaagaccttctacgacgagtatttcgccgtgatggacctgccggccgaattctacatcgagacggtgcgcgacgtgttccaggagcatctgctgccgcagggcatgctgatgcatcgcggccgcgcggtgaacccggcggcgatccggcgcatgggcctgatgacggtggaaggcgagaaggacgacatctgctcgatcggccagacgctcgccgcccaggacctctgcaccggcgtgcgcacctatcgcaaggtgcaccacatgcaggccggcgtcggccattacggcgtgttctccggcaagcgctggaacaacgagatctacccgctgctgcgcgatttcgtgcatgtgaattcgtgagggcgtaacgacactccctccccgtcattgcgagcgaagcgaagcaatccatcgccccgcatatgcggtgccatggattgcttcgtcgctgcgctcctcgcaatgacggtggaaggctagtcacgcctcttcccgagctatagtctcccggtccacgacgaccccgctctcgaagaatcgtccagggagaaactccatgcgatcagcctccgcctttcgtgccctcacgctcgccgtcatcggcgccctcgcctttgcgtcggccgcgtcggccgccgaagtccatgtcatgatctcgggcgggctgactgcggcctacaaggcgctggtgccggagttcgagcgcaagaccggcaacaaggtggtgaccgccttcgggccgtcgatgggcacgaccacgaacgccattccggtgcggctcgagcgcggcgagccggccgacgtgctgatcatggtcggctatgcgctcggtgacttgatcaagcagggcaaggtggtggccgacagccgcgtcgacctcgtgaagtcgccgatcgggatcgcggtcaaatcaggcgcgccgaggcccgacatcagttcggccgacagcgtcaagcaggcgctgctggcggcgaaatcggtcgcctattccgacagcgccagcggcgtctatgtctcgaccgagatgttcgcaaaactcggcatcgccgaccagatgaaggacaaggcgcggatgatcccggcgaccccggtcggcgagatcgtcgccaggggcgaggccgagatcggcctgcagcagatctccgagttgaagccggtcagcggcatcgacatcgtcggcccgttgccggagccgctgcagaagatcacggtgttttccgccgggatcgcgtcggtttcaaaagagcccgatgccggcaaggcgctgatcagcttcctcgcctcaccggatgctcgcgatgcgctggtcaacagcgggctcgatccgattgccgcgggtgccacgcattaaaaccggccggcacgacggcgcagaattatgcagcatgcccggatgccgccacgccggaggcgcggctcacttcacctcggtacggaccggcgaacccttcagcccgttattgtcataggccttgcgcagcgtgccattggcgatcgcgtcggtcatgaacttcgtggcgaacgccgcggccagcggatggtcgagcggcaccgcgaccgcggtgacggtctgcttgaaggtctcgtccagcacgcgcgcacccgggatcttgctggccatcgcgttgagctgatcgcgcgacagcgcgaaggcatcgatcccgccgcccttcaggagattgaagatctcgtcataggtctgatagcccgtgacctttgcgtgcttgagatgcgcgatcgcgccgcgcatcgtcgtggtggcgttgacggcggcgaccttgacgccgtcctggtccagcgcggcgaaactggtgatcgtcgagcccggcttgacgatgtaggtggcgtcggcaacctcatagatcggaccgaacgtcatcttggtctcgcgctcggcatccttgggcaggaaggtgatgtcccaggcgttgttcgccgccgcgtcggtgatctggccggagttctggtgcacgacatagtcgatgggcacgccgagctgcgccgccatcgccttgccgagatcgacgggaacaccggcatagccgttctccgtcctggtgcaccagaacgcgccgcccgccggactgattgcgatcgcgacccggagctttccggtcggcgcgatctcgtctttcaaggcatcggcatgagctgaagcggccatcgtcatcactcccagaacgaggccggccagacgcagcagtcgaaacgacatcggacctcctccacgccgggtcttgcgcccggccggttattgtccggcgtcttgtagctgagtgttgcaacagcgaccagcggccagccccgcattgacggagggctcgccgcggcgtgacgaatggcttgtcagccggcctgcgaggcgggggtacggatctcgcgcggcaggatgatcgcggctgcgatcgccagcaggcacagcgctgcgaacgcgcgcagcatcatcgagaagccgccctggtcgtacagccaggccaccaggccgacggaggcaccggccgcggtgaagccgacgaaatagcgcaccgcataagcgcgcgagcgccattcctcggtggtgtatttgccgaccatcgcatcatttaccgtgacctggccgaacgcacccatcacgatgccgatcgagaccacgatcagcggcaggttggacaggctcgccgccagatagaggaacggcgccagcatgaacgacagcggcagcgccaccgtcttcagcgaatgcctgtcgagcagcttgccgatcgtgtactgggtcatcgcgccgaacacatagaccccggccgcgatcacgccgagcagcgcagggctcttcgtcagatcggcaagccgttcggcgaacaatttcggcagcgccaccgtcaccgcgttgaacgtggtcgagatcgcgatcacgacgatcagcagcgacagcaccacgcgccacatgtcttccttggcgacgcgcacctgggctgcggcctgcctggagcccttgcggtcctcatgcaccaccgtcatcgcgaaggcgatgccgatcagcacggtgaccgtgccgggcacgatgaaggcccagcgccagccgagatactggccgatcacgccggtgaccagcgccgacgaggcgacgccgagattgccccagacgccgttgatgcccatctgggcgccgagcttctcggcataggacacgatcatcgcggtgccgaccggatggtagatcgaggcgaagatgccgatcgcaagcagcgcggcgccgagttgcagcggcgtctgcacgaagccgaccgagatcatcgacgccccgatgccgacgaagaagatcaccatcatatggcggcggctccagcgatcgccgagccagccggtgatcagcgagccggcgccgaaggcgatgaagcccggcgtcgcgtagggcagcagctccgaataggccatgccgagcgccgggcccatgatgataaccgcagcggcgaagatcagcatcgcatagtgatcgatgaaatggccggcgttgacgaagctgatcacccggctcggactgttgctccggccgttccctggactgttcatgcggcgtctctcacgcgattcttcaattgcctggaaataggttataggtgcttgtcctgacgggatgtcgccaatgactatcgctgaaccgccaatcagagccctccaccaggaccggcgcgtcaccggcgacggcgtgcacatggtagcgcgcagctaccagaagggtgtccggctcgatgcccacatgcaccgcgaggcccagctggtctatgccgccagcggcaccatgcaggtgacgacgccgaagggccgttggctggtgccgccggaccgcgcggtctgggtgcccgccctgctcccgcacgcgatcgacgtgctcgccgacatcgagatgcgcacactgtatttcgaccaggcctggcttgcgcgcgagaagcgtagcggcagcctcgaccacgaattcgtggtgcgggtgtcgccgctggtgcaccaggcgatcctcgcgctgttcgacgccgcatgcgggcgcgagcgcaccgacctcctgatcaggctggtgatgctggagctgcaccaggccgaggactccgcgaccttcatcccgctgccgcaggagccgcgttgccgtcgcgccgccgatatcgtgctggccgatccgaccagggaccacgagatcgatgcgctggcgcgcacggtcggcacctcggcgcggacactgtcgcggctgttcgcggcggagacgcaactgtccttcaagagctggtgccagcgcgcccgcatcgcggccgcgatcgagcggctgtcgaccgacgccaacgtttcggtcaagcaggtcgcctccgacctcggctatgccagcgtgccggcattctcccacgcgttccgccaggttaccggcaagacaccgaccgcgttcgcggagaaaacgtgaacggggtttgtcaccgcgcgcagcgacgacgatttataccgctgtcgcggtgcgacatatttccgtacgatccatgcgcttgattgcgttcctgccgaccttaaatcccgtgtaaggtcgggcttcactggacacgacccgctggatacgacccgtaaatggccaacgctttcttctccgacctgctctcgacgatctccgaacgcggccgcgtcctgctcggccgcgccagcccggccaacgacaagcaggatgcgtccgagctgctggaattgtgcgaggcgctgctgtccggccgcggcgaagcctccggcaccgcgatggcgcgcgaagtgctcgaccgctaccaccacctcgatgccgccggccgcctgtcgttcttccagacgctggcgcgcgatttcggccccgatcacgccaggctggcgcaggcgatcgacgcctggcgcgccaaggccaatggcgaggatgccagcgacctgcatttcgcctccgaaccgcgccgccaggagttgatccgccggctcaaccgcgcgccgggcggcaccggcgagttggtgtcgatccgttccgacctactttcactgatgaagggcaacaaggacctcgccgcgctcgatcgcgacgtcgtgcacctgctctcgtcctggttcaacaggggattcctcgtgctgcgcaggatagactggtcgtcgccggccaatattctggagaagatcatccgctatgaggccgtgcacgagatccgcgactgggacgatctgcgccgccgcatcgatccggtcgatcgccgctgctacgcattcttccaccccgcgctggccgacgagccgctgatcttcgtcgaggtcgcgctgaccgaagcgatccctggcgcgatcgcgccgctgctcgcggaagagcgcgagccggtgccggccgagaaggcccgcaccgcggtattctattcgatctccaatacccagcgcggcctcggcggcatctcgttcggcagcttcctgatcaaacaggtggtcgaggaactgcgccgcgaactgccgaagctcgacaccttcgtgacgctgtcgccggtgccgggcttcatgcagtgggtcaagcaggccgacgacgtgccgctgtcagatgaggaccgccaactactggaaagcctcggcaagcccggctggcccgacaatgccgagctcgcgacgcaactgcgcaccgtgctggagccgctcgccgcctactactttctgaaggcacgcacgccgaagggacggctgatcgattcggtcgcccgcttccatctcggcaacggcgcgcggctggagcggatcaactggctcggcgacctctcgcccaagggcctgcgcgaatccgccggcgtcatggtcaactacctctaccggctcgacgacatcgagaagaaccacgaggcctatgccaacaatggcgaggtgatcgcctcgagcgcggtgaagaagctgctgaagggcgaaggccggcggctgctggatatgcggctgtcgtagtcggcaaccgctctccgtccactattgctcctcacgcgattgccgagcgcggccgcagtcccgccggcagatgcgcctcgagccagccgacgatcgcgcgttcgttgcgatggtagagcaggcccgcagcgatcaccgcaatgccgatcagcgacagcgagaacggaaaccacagcgagtccttgaagacgacgtcggcgagatgtccgagatagaggcagatgccgaacgcgccgaacaccgcataggcgcgccgcatcaggatcacggcgatcacgatgaggccgacattgagcagacagtagaccgctttgcccagctcggtcgagcttgaggacgcggtgatgccgccccagaacgccatcaggccgaacagatgcagccagaacgcgaagtcgccgttgcggctgcgatagtcgacgatccaggccaccgcgagcacggccaatccgaaccagaccgacacgcggcgccgcgtctcgaaatcggcataggtcgtgccgctgaaccatggcgccagatccatcgacatgaaccacagcgcgaccgcgatgatcgcgacgatggaggcgaagcgatagtagcgcagcgcgacgacgccggcggcaacggtcgcgatctccatgaagatccagctgcccttcacccagatatagaagtcctgcacagttccgggcttgccgaattggccccaccagccgagttcgtcctggatgccgtagacggcgagcggcgccatcgagaccgcgatcgcgatcaacaggccgcctggcacccgcagattcctgccgtaccagaggtgatgaccggcgacgccgaacgcaacggcataggcgatcgcgcaggccgtgagcgcccggccgcccatctgggtgaacgccagggtcgagaacaggcccatggcgccgatcacgatcagggcgccggcgtaccagagcacgtgggcggcatcgaacctggcagccgggctggcctcgccggccgcgccctgcccctcctggctggccaggaaggcgagcagccggtccagatcagccacgctgatcaccccggcatttgcggcttcccgaagattcttcgctgaatatgtcatgcggctgttcctcatggccggttccggcgcgttcccactcgccggaaaagacgcctctcccgcatgagtatactgcatcgtgagcaacgttcaatattttattgagcgttgctcaaattatgtttgcgacccaagccggctggactggctggatctgcaccggttaatcggccagcgccttcatctccttgtagagatccgatttgccctcgaagccgatgccgggaagctcgggcatcacgatgtggccaccctcgacgcggacgccgtccgggaagccgccatagggctggaacaggtcgggatagctctcattgccgccgaggccgaggccggccgcgatgttgagcgacatctggtggccgccatgcgggatgcagcggctcggcgaccagccatgggtcttcagcaccgcgagcgtgcgctgatattcgcacagcccgtaggacagtgcgcagtcgaattgcagccagtcgcggtccggccgcatgccgccgtagcggatcaggttgcgcgcatcctggtggctgaacaggttctcgccggtcgccatcgcgccgggatagaactcggccaaagcggcctgcaacgcgtaatcgagcggatcgccggcctcctcgtaccagaacagcggatactcgcgcagcatcttggcgtaggcgatcgcggtctccagatcgaagcggccattggcgtcgaccgcgagctgcgcgtcgcggccgatctcgttgagcaccgcctcgatgcgcgcgcggtcctcagtgagcggcgcgccgccgatcttcatcttcacgacgttgtagccgcggtcgagatagccacgcatctccttgcgcagcgcgccgagatccttgcccggatagtaatagccgccggccgcatagacgaagacgcgcggattggcggtgagaccgtggcgctcggcgagcagccggaacagcggcttgcccgcgatcttcgccaccgcgtcccacaccgccatgtcgatggtgccgaccgcgaccgagcgctcgccatggccgcccggcttctcgttcgaaatcagcgtcgaccagaccttgtccggatcgagattgtcaccggcggcatcgagcagcgctttgggatcggcttccttgaggcgcggtgcaaagcgctcgcggatcagcccgccctgcccgtagcgaccgttggaattgaagccgtagccgaccacccgcctgccgtcgcgcaccacatcggtgaccacggcgacgaggctcgaggtcatcttggtgaagtcgatataggcgttgcggatcggcgaggagatcggtttcgtcacctcgcggacgtcgacgatgcggacggacatgggggagctctttgagttgcgtctaccggcttctccgccgtcattgcgagcgaagcgaagcaatccatgtctccactgatgcggatgcagtggattgcttcgtcgcttcgctcctcgcaatgacggtggttagagttcgctcaggacttcgccttgtccctgaaatacggctcgaccggcccgtgcaccttgatggtcagcggattgccgtaacggtccttggcgttccccgcggtgacccgcacccagccctcgctgatgcagtattcctcgacattggtcttctcggcgcccttgaaacggatgccgacgtcacgcgccaggatgtccgcgttgtaatacgggctgttcggatcgaccgagaggcggtcggggaattggtcgttggtgttgtcgtcgctcatagcagcgcctcgatttccttcttcaatccttcgggccgggcggtcggcgcatgccgcgccacgaccttgccggcgcgatcgaccaggaacttggtgaagttccatttgatcgccggcccgagcagccccgacttctcacgtttcagatgttcgtacaatggatgcgcgcccgagccgttgacgtcgatcttggcgaacatcggaaacgtcaccgcatagttggtctcgcagaacgtggcgatctgcttcgcatcgccgggctcctgcgcgccgaactggttgcagggaaagccgagcaccgcaaagccgcgcggcgagaggcccgcgtgcagctcctgcaggcccttgtattgcggcgtgaacccgcaggcgcttgcagtgttgacgatcagcagcacctgcccctcgaactgccgcaagggcatgtcctcgccggcgagcgacttggcggtgaaatcgtagaccgtcgccatgttagaccaccggatcaattggagaggacggcgtgccggcggcctcgatcgcctcgcccgcggcgagacagagatcctcgcgataacgcgcggccaccagctgcacgccgaccggaatccgcccgacgagccccgtggagacgacgagccccggaaggcccatgaacgggattgcgatctgcggcagctgcgcgtgccacacccgcgcgaacgacgcctcgtccttgcggtcgagatgatccgggaacggcagctcgccggacaccggcatcagcagcaccggatatttgtcgaggaaggcaaaccattcgcgcgtcagcgtggcgcggcgggtcagcgcctgcgacaggtcgaacggatgcacccttgagcggacgccgtgcaggcaggccagcgcgccgggatcgccctcgcgttcggcaaacgcaagctgcgcctcgtagccgtcgccgagccagagccgggtctggatctcggccgcctcgcgcaaggacggcgtgttggcaacttcctcgacgatccagccggccgcttgcaagcgcttgccggcatcggcgaccgcggcaacgacttccggcaccgggtcgaggccatcgggattggggcacatcgcaacgcgcttctcgcggcgcgggccctcgagcggcaccggcgcataccagggatcgcgatagtcgggcgcagacatcgccgcgagcgagacgcgcagatcattcaccgtgcgcgccagcgggcccgacaccgcgctgatctgcgggccgatcggacgctccggcaacgccgcgttgaaggccgggatacggcccaggctcggccgcaggccgtgcacgccacaggcataggccggatagcggatcgagcccgcgatatcggtgccatgggcgatgtggccgatgccggccgcgaccgccgagcccgcgccgcccgacgagccgcccggggtgatgccgggatcgcgcgggttcttggtgtcgccgtggatgaggttggtggtgaaccagcgataggacaccgccgggcaattggtgcggccgagcagcaccgcgccggccttgcgcagattggcgaccaccgggttgtcggccctggcgatcaggtcgcgctgcgccttcaggccgttggtggtggcgtagccttcctggtcgacattgaccttgatcgtgacaggcacgccggcaagcggcccgaccgcctcaccgcgcgcaattgccgcatcgatcgcgaccgcctgcgccagcacgtcgtccggccggtgatcgaccaccgcgttgatgacagggttgaccgcatcgagccgggcgagcccggcctcggcggcctccttcgccgagacccgcttcgatttgatgaggccggcgagctcggttgccgacagacgccaaagatcctgcatgtgctactccgtgtgacggaggcgttttagccccacccgaagggcaagaccagcggcgcgccgcccgatgtttcagcggacatgcgcgatgtaataggcaaggtcgccgatctgctccttggtcaccgtctgcatcacgtccgccatggtggcgtcgtagccgtggcggctgttgtccttgtattcggccagcgtcttggcgaggtagtcctcgcgctgattggcgatccgggggacgttatccttgccggagaaatcggtgttgtggcagctgttgcagcggttctgctgcgccaacgcctggccgcgcgccatccgcgcggcgtcgccggcgtcagcaggcggcacaggcttcggcaaagtggcgatgaaatccgagaaggcgcgcaaatcgtcgtcggtcatcggcttcgccatctcgttcatcgggtcgaataccctgagcttctcgcggaacatgaacagctggatcagcgcatagggcgcctgctggccgccgagcgagggcgtgttctcggtttccgacgtgccgcgctcgccatggcaggcaaagcacgccgcagcgcgctcctggatggtctcggcatttgcggagaagctgagcgcggtgagcgccgcggccattgcgagcttgcgcatcggtccatccttgcaacagttcaaaaagaaaatcgggggcagcgcatgctgcccccgatccatgacttcaacttactggttggcgaccttcggcttgccgtaggtgatgcgatagaccgcgccgttccagtcgtcggagaccagcagcgagccgtccttcagcagcatcacgtcgaccggtcggccgacatacttgttgtcctcgaggaagccggtcatgaacggctcgaccgacttcacggtgccgtccttgttgagtctcacgacgacgacgtcgccgccctgcttctgcgacttgttccaggagccgtggcgcgccacgaagatcacgttcttgtaggtcttcgggaacatgcttccagtgtagaagcgcatgccgagcgatgcggtatgcgggcccatcaggccgaccggcggcgtatagtccttgcagttcttgccccagccgagctcctggtcgatgatgttgccctggtagcagtacggcgcgccgaaatcctcgcccgccttggtgacgcggttgagctcgtcttccggcaccgtctccgacagccagtcgcggccgttgtcggtgaagtacatctgcttggtctcgggattccagtcgaagccgaccgagttgcggacgccgagcgcatagacctcggcgccggagccgtcgagattgatgcggcggatttgaccgtggtcggcgtcatgcagcacgttgttaccgggctggccgaccgggacatagagcttgttgtcgggaccgatggcgatgaacttccagccatgcgcctcgtccttcggcagcttgtcgtagatcacggtcggcttcggcgggttgtccagattgtcctcgatcttgtcgatcttggagacctgcgagagctcggcgatgtagagcgtgccgtccttgaaggcgacgccgttcggacgatagaggccggaggcgatcaccttgaccgagcgcttgccgtccttgttgacgatcgcatagaccttgtcgacgagccggctgccgacgaacacggtgcccttgtcgccgagcgccagcgagcgcgcattggccatccctgcggcgtagacctcgacattgaagccggccggcaccttgagcttggcgagcggcagcttgtcgggcgcagacggcagcggcggcggcgccaccggtgccagcttggcggcggcttcattgtcgggacgcccgatcaagggcgagcccggcggcagcggctgggcggccggagctgcacctgcggccggcgcggcggccggctgctgcgccgcagcagagagcgtaaaggcgcccagcatggcccccgccagcagcaggctgcgcggtgcgaacgagtgttttttcatgatgatctcccctggctggaagcctttgttcatcgcgccattgatgtcgatcggcgcattaggctttccgttcatagtcttgcgaatttgtccggacaattgcaatcggaaacatgccgacatcggccaacgcatggttgtggcgcggcaacggcttgcgtcagtgccttgtcatcgagtggtccgggcgatcgaggatcgcctcggtgaatggaaactccagcacgatctcgccctcgtcgtcggtcacctcgatcacggcgctgagcagcgcaccgtcggccccctcggtcttgagcagttcgcgaatcatcgcccgcgccatttcccacgcccgatccgggtcgcgcaggatttcgccgtcggggtcggagatcagctcgtcgccgatacgggtattgaagaaataacgtggcatcggctgaactcggctcggttagtcgcttcccgcgacgggaggcacggggtggtcatcaggaccttcggaggatcgcgtcgtcccgtttcttagtccaagatcaccattcaccgtgtggcgaacaacaggaaaaaggtctgatgccaccgggttttgacgggaaaggcgcgcacaaatttgtgagtgggccggacttgccttccgcagtgcagcatggctctgcccgggatgcctagcgaaaaatttaagtggcgaacttttccaaccacagtagtttatcttcagggcggaacgttcgtccggtcgcaacaaggagagccaaatggcctggaaagcaccgaagatcgtcgaagtgtcggtcggcatggaaatcaacatgtatatgtgcgccacccgcaagtaagcggcagcgccctatacacgtttagcgttttagcgcaggtggacatccgggcgtaacgcgctcccgagcacgggggtgcgtttcaaatccggggtccacctcgtaacgtttctggatctgagaaaagctctccaggggacggatcatgcttcgtgtcgtcgtcctgggtgccgcggcgggtggcggcgttccgcagtggaattgcggctgtgccgtctgccgcacggcgcgcggcgaccatcccgaattgcagagcacgcaagcctcgatcgccgtcagcggcgacggcgcgcactggtttctcgtcaacgcctcacccgacctgcgccagcaattgatcgcgacgccgcagctgcatccgaagcccggtgcgctgcgccacagcccgatcgccggcgtcatcctcaccaatggcgagatcgatgcggtcgcaggcctgctgtcgatgcgcgagggctcgccatttgcgatctacgcccatgagcgcgtgctcgcgatcctgcgctcgaacagcatcttcaacgtgctgagcgagaagaacgtcacccgcctgccgattgcggtcgaccaggccttcgagccggccctgcccgatggatcgccgtcggggctcgaagtgctgccgttcgaggttcccggcaagggcgcatggtatctcgaaggcaaggcgcacccggcgggcgccgacggcgtcggcgatacgctgggcctgcgtattgcggacaagcgcagcggcaaatacttctatttcctggccgcctgcgcgcgggtcaccgacgggctgaagtcgcggctcaagggcgcgcccctggtgtttttcgacggcacggtttggcgcgacgacgagctgatcgcggcgggcctcggcaccaagaccggccaaagcatgggacatattgcgatgtccggcgatcacggtgcgatcgcaagcctcgccggtctcgacatcggacgaaaagtgtttttgcatatcaacaattccaacccggcgctgcttgggacctcggccgaacgcaaggcggccgagcacgcggggtggcaggtacctgcggacggaacggagatcgtgctgtgaatgtcgtgcccagctctggaatgaccgcgctctcgatcggcaagggcatcacgctcgacactgccgaggagatggaggcgacgctgcgcacgatcggcgcgacgcgctatcacagcctgcatccgttccaccgcctgttgcacggcggcaagctgaacaagggccaggtccaggcctgggcgctcaaccgctattactatcagagcacgatcccgctgaaggacgcgatggtgatgacgcgctttcgcgatcgcatgacgcgggtcgagtggcgccaccgcatcgaggatcatgatggcgatctcggcagcgagggcggcatcgagcgctggctgaagctgaccgaaggcctcggcctcgacaccgcctatgtcgagtccaccgaaggcatcctgccggcgacgcgctttgccgtggaggcctatgtgcatttctgccgcgaccgcacgccgctggaggcgatcgcctcctcgctcaccgaattgttcgcgccgaacctgcatgaggagcgcatctcggggatgctgaagcattacgacttcgtcaatcccgacatcatgagctatttcagccgccgcctgacccaggcgccgcgcgacgccggctttgcgctcgactacgtcaagcagcacgccaggacgccggccgagcgcgaggcggtgtgcaatgcgctgatcttcaagaccaacgtgctctgggtgcagctcgacgcgctgtatcacgcctatgtcgagggccagattccgcccggcgccttcgtgccgaagacaggttagggactcaggtcatggccagccgcaacatcagcgtcagcgagaccagccggccgaaactgccgcgccatgccaagctgaaattcgacgagacgcggcaggtctgggtgatcctcgcgccggagcgcgtcctggccccggacgagatcgcggtcgaggtgctgcatctgtgcgacggcgtgcgcagtgtcgccgacatggtggatcagctcgccgagaaatatgccgcccctcgcgaggcgatcgcgaccgacgtgatcgcgatgctgcaggacctggcggacaagggctttctcaccgaagcgcgcgagagcacagcatgagtgacacgctcgccgacagcaagacgacgacggcaggcccaaccgacgggctggcggtgctcgagcaaacgcgctcggcggccgagacctacggcatcccgctcgcggtgctgctcgagatcacccaccgctgcccgctgcaatgcccgtattgctccaacccggtggagctcgaccgcggctcgaccgagctcacgaccgaggaatggaagaaggtgctgagcgagctcgccgaactcggcgtgctgcaggtccatttctccggcggcgagccgaccgcgcgcaaggacatcgtcgagctggtgcagcacgcgaccgatgtcgggctctattccaacctgatcacctcggccgtgctgctgaccagggacaagctgtcggcgctggccgatgccggcctcagccatgtgcagatcagttttcagggtaatgagcccttggttgccgatcgcgtcgcgggcctgaaggacgcgcacaggaagaagctcgaagttgcgaaatggacgcgcgagctcgacatgccgctcacggtgaacgccgtgatgcaccggcagaacctgcatcagctgcccgatatcatccagatggcgctcgatctcgacgccgaccggctcgaagtcgccaacgtgcagtattacggctgggcgctgaagaaccgcgccgcgctgatgccgacgatcgcgcagatcgaggagaccagccgcatcgtcgaggacgcgcaggcgcgcctgaagggcacgctcgcgatcgactatgtcgtgccggactattacgcgctgcggccgaagaagtgcatgggcggctggggccgccagttcttcaacatctcgccggccggcaaggtgctgccgtgccacgccgccgagagcatcaccgggatcgaattcgagtccgtgcgctcgaaccattcgatcgcctggatctggcagaactccgaggccttcaaccgctatcgcggcaccggctggatgccggagccctgccagagctgcgagttccgcgaggtcgattacggcggctgccgttgccaggcctttgcgctgaccggagatgccgggaataccgacccggcctgcgcgctgtcgccgcggcaccaggagatcttcaagcaggccgagcaggactccgccggcgcgcagaaccgtttcctctaccgcaacttcgccggcggcacgctggagccggaccaacatcagcacgaacgccagggaaaatctcatggcgcctgacgccgatgccggcaaggctgccaggcgtgccgatcccttcgctccgctgacatcggaatggctcgatgtcggcgacggccacaatctgcacgtcgagagcgtcgggcgcgaaggcggcgtccccgcggtctatctgcatggcggcccgggcagcggctgccagccggaccatcgccggctgttcgatcccgagcgctttcacgccgtgctgttcgaccagcgcggctgcggccgcagccggccgaagggcagccgcgaccacaacacgacgcagcatttgatcgccgacatggagaagatccgcgagcgcttcggcttcgcgcgctggatggtggccggcggctcctggggcgcgacgctggcgctggcttatgcagaggcccatcccgagcgggtcagcggcctcgcactgcgcgcgacctttctcggcacggccgaggagctggaagacgtcttcctgcgcgccttgccgcgcttctatcccggcctctccgaggacttcctcaacttcctgcccgagcatgagcgcgcgacgccggttgccgcctattatcgtcgcatcctcgatcccgacgcggccgtgcatgcgccggccgcacgcgcctggcacgacaccgaacgcacgttgtcggagcacacgccgaagcagacgcggctcgacctggcaaaggcatcaggcgccctgccctcgacgccgttcatggaggcgcactacttcgccaacgattgcttcatgcggccgcaccagctgatggatgaggccggcaagctcgccggcattcccggcatcctggtacagggccgctacgacctgctatgcccacccgcgacctcgcacgcactcgccgcgcgctggccgggcagcgaagtccgcatcgtcgatggcgccggccacatcctctacgatcccggcatccgcaatgcggtgatgaaggcgatcgcggatttggcggcaagaagctagggcagagacgagtcggcaagcttgccttggccatccgatccggcgcggcgacagctcgaagccgttgcgaatcagtggcctcacaaaatgttccgctgttacccgaacgaatggtcgaaaagagttccgcgtccgagggagcctatcgccgctgcgcgcgttctgttccaggaacaatgaatgacaggaacatgggtttgagtgggatcgccttcgctgacttaagcctcggaggcgagggttatgttcaatagtgaacactcctagctgcggcgggcgacgtgcgctggcagcagccttgtgcctctgccgtctcgtgcagaacgatgagtattaagccttttatcaaacgcgcgccatggatcacacacgcaatcgcatttcgaccggcaacgctggcctcgactatgtccttcgtggaggcttgccacgcaaccgcttgtaccttgtcgagggaacgcccggttcaggcaaaacgacgcttgcgctcgaatttctccaagacgggcaatccaagaacgagcgcgtactctacatcacattgtcggaaaccaaggaagagctccaggtcgtcgcggactcccacggttggaatctgagcagaattgatatttttgaactgagcgccgcggacgaagtcctcggcccgggcagagatcagtcgatactccatagctgggagatcgagcttggagaaacgatcaagctcatcaaggcgcaggtcgagaagatcaagccgacaagggtcgtgttcgacagtctctccgaaatgcggctgctcgcccaggatccactccggtatcggcggcagcttctcgttctcaagcaatttttctccggtctcagtacgaccgtcttgctggtggacgacttcaccgggtcaggcggaaattcggacaatcacttgcacagcctttgccatggcgtcattaccctatcccggctgacgctggactttggcgcagcacggcgaaggcttcaggttcaaaaactccgaggcgtggatttcatcgccggattccacgactttgtcattcggcgtggcggcttggatatctttcctcgactggtcgcagccgagcatgaaatcgaatactcgaacgaatgtgttcgtagcggcataccggaacttgacgcgctgctgaatggcggtcctgcgcgcggcacaggagttctcatcaccggaccttccggcgccggaaaaaccactctcgggctgcaatatcttgctgccgcttgcgagagaggagagaaggtgacggtctatcaattcgacgagcgcatcgacacccttctggcgcgcgcggaagcaatgggcctcaaccttcgggcgtgcatcgataaggggcagcttgtcgttcggcagatcgaccctgcggagatttcgccgggcgagttcgccgccaacgttatcaaggaagttcaacaacgctccatcaagatcctcatgatcgacagcctcagcggctacgtcgccgccatgccgcaggagcagcagctcattctgcaacttcacgaactgctgtcctacctgagccagtccggcgtcctgacactgatgattaatccccaaagcggcttctttggaaatatgcagacaaatggtctggatgtttcgtatctggcagacacggtcatccttctccggttcttcgaggctgcaggacgtatccggaaggccatctccgtcgtcaaaaacaggtcgggaaggcacgaagatacgatccgcgagatgcgcatcgacgatcggggcgtaagggtcggcgagcctctgtcggagttcacgggcatcttgaccggagcaccgcattacacgggcgtagccaatcctctcatggaagatcgcggttcaggtgcataggacagtagccgagggccatcgcgtcctgatcatcgccccttatggccgcgatgcggagagcgtatcggggctactgctgtctcagggctacgataccaagatttgcggcacgttcgccgaactcgcgccactcgtcgatgcgcatgcgggcgtcattctgatgaccgaggaagcactcggcggagatacgtcggcgctgcaatccgccttgactgcccaaccggcgtggtcggacattccattcattctgctgttcggccgacgagcaggatgcgagcgtccgaacgaagcggtccgccgcaagctgccgccaagcgcgacgaatgtggtcttgctcgagaggccactcagcagcgaatccctgctgagtacgatcgcctcggctatgcgggcgcggcagcggcaatttctgatgcgcgatcaactcgcggagctggacacgcagcgggcgagcttgagaacgcttctcgacaacctaccggtcggggtcgtgtttcttgacaagaccggaactgaactgctctcgaatccggcattcagacgtttttccaagtccggcaaaagccccgctttcgaccctgcagcggaacatgaatggctagcgcaggacatcgacggctctccgctctcgcgaagccgttttccgagcgcgcgtgcactgcagggcgaacatgtgaccggggtcgaatttctctacacgggctcggcagagggaccagtctggacccgcatcagcagcgtgccaatcgtgagacacgacggcgcgatcacgggcgcgataagcgtcgtcgtcgacatcaacgagcaaaagctcgcgcagcaaaggttggcgaaggccgcagagacgctcgagttgcaggtagccgaacgtaccgcggagctcgagaaggccttgtccgatctccgcagggagacggcagagcggtcgcgggcggaatctgcactgatccaagcccagaaaatggaagctgtcggtcagctcaccgggggcattgcgcacgatttcaacaacatgctcaccggcgtcatcggcgccatcgatttgatgaaacgacgcattgcatccaatcggctcgacgacttgaatcgcttcatggacgcggcgagcacatcggcgcaccgtgctgccaatctgacatcacgacttctcgctttctcgcgccggcaatctctcgacagcaaaccgaccgatatcaatgctctcgtccggtcgctttcggacctgctgcatcacactgtggacgagaacatctcgatcgccatccaaaccaacgaggaggtgcccgccgccatagtggatgccaatcagctcgagaacgccatccttaacctcgccatcaacgcgcgcgacgcgatgcctcacggaggcaagcttaccgtcgagacgtctgtagttgacctcgacgcgacatatacgaggtctcgaccaggtatttcgcccggccgctacgtggtcgtggcagtttcggacaccggagtcggaatgacgccggacctgatcgaaaaggcctttgatcccttcttcacgacaaagcctgtggggcaaggtaccggtctcggtctatcgatggtctacgggttcgcacggcagtcaaacggccaggtccggatccattcgacaccgggccaaggcacctccgcgaagatctacctgccggctgcggatcaaagcgcgatcgagaccaccgtccatcatgaagcgtctccgcaaggagccggtcagcctgttctgcttgtcgaagacgacccttcggttcgtcttctcatcggcgaactgctatcggagttgggttaccgaacgatcgaagcacctgattccgactccgcaatcaagctgctggaaagcggtcgtccgatagacatgatgatttccgatgttggactgcccggcatgaacggccggcaacttgccgaagtcgctcgcaagcatcacccgcaagtgccgatcctcttcgtcacgggctatgccgcaaacgccgccattcgagctggcttcctcggaacaaacatggcgatgataagcaagccctttcagatcgaagaactagcggtaaagataggtgagatgctgtcctagagagcgctttagctgatggacgaggccggcaagctcgccggcattcccggcatcctggtgcagggccgctacgatctgctgtgcccgcccgcaacctcgcatgcactcgccgcgcgctggctgggcagcgaagtccgcatcgtcgatggcgccggccacatcctctacgaccccggcatccgcaacgccgtgatgaaggcgatcgccgatctggcgacaagacaatgaccagggcacactcataagccggagcgcccgcaaggcgacgcgaaagcaaacgctgcatcacatcgcgagcggcttttcatcaacgcggcggcagggacgctgatccgctccgagaaatcggcccacgccgtcggctgcctgtgcggccggattgatcagggagcgtagccgcaattcatcgaacggcaggttcgtgttgatccggcccgaatgatacagatagctgtcgatatcgatagctttcagatgcgacagctgcacctcgcgctcttcgtagcgcaccgtgtaatcattgcgcgaacgatagtcgaaatcgcgcacgccggtgaaccgcacgcggtcgccgtcgatgaacgcccgcggcatgacggccacttccgggcgccaatgacgatcatgtgacgggggaatggcgatccaccatccgacgacgccgaaaaacagcgcggccaccactgcggacatgctgcgccgccgcgacagccacagcgcccagaaagccgatgatcgcaatcagccggtcggcgattcgaatcagaaatccggcaagtgcactcattgacgtccttggcgtcggggcgcttacatcgcggcggacagcgcgagcgtacacgcattgaacttcacttgtcagacccgctctggtagcattgatgccggcgtgacggtccgcaaatggcgaccgtccagatgcgatactgtcacaggcggcgctcactgctggattccatccgcgaggtatctgcgatggttgccctgtccttgcgagcctttcgtgccacgcttccgcttctagccctcggtctggcgcccgcggtctgcgcccagggcactccaccggcgcccatcagcacgacgttatttcaaaatgtacgcatcttcgacggcaagggcggttcgctctcggcgccgtctgacgtccttgtgagaggcaacgtcatcgagaaaatctcggcgacgccgatcaccgccgagcccggcagcaccgtgatcgccggcagcgggcggacgctgatgcctggcctgatcgacaaccattggcatgcgatgctgatccggaccaatcccgctcaggcgatgggcgacgtcggcttcaacaacatcgccgccggtgtcgaggcgaccgacacattgatgcggggcttcacgacgatccgcgacctcggcggcccgaccttcggcctgaaggacgccatcgaccaaggattgatcgccggaccgcgcatctatccctccggcgcgatgatcaccgtgaccagtggacacggcgatttccgccaattatccgatctgccgcggacgatcggcggcatgctgacgcgcatggaacaggtcggaggcagcatgatcgccgacagcccggacgaagtccgcgtgcgcgtccgcgagcaactcatgcagggcgcttcccagatcaaactgacggccggcggcggcgtctcctcgcccttcagtccgatcgacgtgtcgaccttcacggaggcggagctgcacgccgcggtcgaggcggccgagaactgggggacttacgtcacggtgcatgccttcacccccgcggcgatccaacggtcgatcgcagccggggtgcaatgcatcgagcacggcttcctgatggacgaggcgaccgcgaagctgattgcggacaagggcgtgtggctgagcacgcagccgcttcccgaagaaatgcgaaccggcctggcggccggatcggtgcagcgggcaaaggccgatgaagtctggcccggcatcgccaggacctaccaactggcaaggaagtataagatcaagacggcgtggggcaccgacgttttgttctccggggcattggccaagcggcagggcgcgatcctcgcttcgctcacccgctggtacacgcccggcgaagtgctggtcatggcgacgtcgaccaacgccgaattgctggctttgtccggcaagcgcaatccgtatcccggcaagctcggggtcgtcgagcagggcgcgctggccgatcttctgctggtcgacggcaatccgctcgaaaatatcgatctggtcgccgaccccgccaggaacttcaaggtgatcatgaaggacggcaagatctacaagaacgagagttgagacggtgggcgccaccgagcgtgtcgcgccacatccgagggccgacctcctcggagaagccggcaaggccccggcccggttcgccgagacggtgggcaggatagcagtcgccccctgattgacgcggatgtcccggccgccgacgtcgtcgaagccaggttgaactgctcgcgcatccggcgcccggaccggcggccgacgccgttgcctatgccggcagcacgatcacctccgtcttgacgagcgttcgcgaatagagggcgagcatgtccgggctgagcaagccagtacggatgccaggacatatggagcatggatcgctgcgatagaagccgcgtctgcggcggatgcaacccgtacactgtcaacggtaatgcccatggcctatgccggcttcctctcgcgccacagccacccggcgagggcaaccgcagccagcatgccgacggactgagcgacgataaaagcggcaacgccgccgggcgctattccggcaaaggtgtcggaaagcgagcgcgcgattgtcaccgccggattcgcgaacgaggtcgaggctgtgaaccaataggccgacgtgatgtacaggccgacggcatacggaatcgcccccggtgccctggcggcgcaaccgaatatggtcaggagcaagccaaaggtggcaaccgcttcagcgagccattgcccgctgccggaacgctgcgtcatcgagagttgcagcaccggcagttcaaacatgaggtgagccacccatactcccgcgacggctccaacgatctgagcagcgatgtaggcaaccgcaattggccaacgcagttcgctccgaatcgagagcgcgagacttacggcaggattgaagtgcgcgcctgagaccggtccgaagaccaatatgagcacagcgagaattgcgccggttgggatggtattgcaaagcagcgcgagcgcaacattcccgcccgcgagcttctgggccatgatcccggagccgacgacggcagccaggagaagcgccgtgccaagcaattccgcgaccagacggcgcgccagcgtcggcatcaatgcgcttccgtggccttggccgtcgagccttccatttgcccgatctctcggagcttgccctgcaagctgagcgcgtcgatggatcgcagaggcagcgcggtaaagacggcaattcgctgattgagcatgcgataggcatcctcgaatgcgaccgcgatttcggccggcgtccccttcgcctcagccggatcaggaatgccccagtgggctgttgcaggatgtccgggccagaccgggcatgcttcagccgccgcgctatcgcagaccgtgaacacgaagtcgaactggggctcgccggccttggcgaactcgtcccatgatttcgagcggtagcccgacgtatcgtagcccatgttttcgagaagatggatggcgtgcggattgacccggcccttgggctggctgccggcgctgtaggcgcggaaatgacctgcgcccaccttgttcaagatcgcttccgcaatgatcgagcgcgccgagtttccggtgcagaggaacagaacgttgtatgggcgatcagccacggcgcaccgtcacgtcgcgcagcacgcggaagaacctggcgctgcctgcggggcgcagcaggccgattgcttgccatgcgcgacgcgcgccgtgttctctccggtgccatcaccatagaccgtgctctcgccggtcgtgtgaaaggtttcccaggcgatgcctgcgggatcgtcgatccacgacttctcggacttggcgtagcaacaggccgcctcgccctgctcgatgatgttgccccccgcctgactcaagcggtcgtagacctcgtgaagctcctcttggctctcaacctgaatgccgagatgatccaggccgggctcgcggcctctggccgaaatggcgaaattcacgcgaggatcatcgagcatccactttgcgtaatccgtcttgagaaccgttggttgggcagcgaacaaggcagagtagaagcctacggactgtgaaagatcgctcacggtgacgtggacatgaaggcgcttcatggagtgtcctttcaggctgggattttcgtgcgcttgcgcgccggtttgcattcggcggcggcaggcgcacagggcgcgccgccacagcagttttcagtcaggaagccaaggagcgcgttcatctgctcgaactgcgcggcatagatcatcgagcggccttcgcggcgaacgctgacaagacccgccgcgcgcagccggtcaaagtgaaatgtcagcgtattgggcgcaagatcgagagcgccggcgactgcgcccgctggcatgccctccggtccggcttgcacgagcagccggaatatatcgaggcgattgtcctgcgcgagtgccgccaaggcggcaacagcatcggtctttttcatacttcagtatttatcgaaataaagtccgctgtcaataacatttcagcattcattgaaatatcgagggcaagccctttgccggattgcgaagccgggatggaatgatccgaaggaccgccgcgcagtgttgctggtgcccgcccgcgacctcgcacgcgctcgtcgcgcgcccggcgaggcagcgaagtccgcatcgtcgatggcgcaagccacatcctcgacgaccccggcatccgcaacgcggtgatgaagtcgatcgcggatctggcggcgagacaatgaccagggcgcccggcatgttctcaaaccgaacttggctccgctgaaagttgacgtattggccagttggcatcctcgtcaggatggagatgcccagcacaaatggctgcgggagtggttagtcagcgtcctttagatgcattgaagtccgcttctgacccatttcggaactcgcaacttcttgagtgaaatttggtcagaccgcagaacactctttgactcacatcaaaaatggcttggcgcggcatgttaatcggcaacatggggcggcgttattcgacttcatggagaccagtaaatggctacacaaagcaatatccacttctttacaaattgggccaaagagcgtctcgacgaaatggacgcaacggtgacctcgcttgagggcaaggctgccgaggtgcaggccgatgtccgcgacaaagcgaagaaggttcttgctgatctgcgctcgcagcgtgatgacttccgtgacaccatgaagaagcagtcggaagctaacgaggccgcgtggatccagacaaaagcaaagcttgaggctgactggggcttgttccaggccgaggtcaagaaatatgtcgaaagcttcggcaagcaaatcgagcaccagcaggcgacgttcaagcttcaagccgatgcccaattgaaagcgtggcgcgaagtagccgagaagcttggccgcgatgccaagaaattcgcctctgagcgtcgggacgatatcgacgccgccgttaagcgcatgaacgcagatgcagtcgaggcggagaaaaaactagagaagttgaatcaggcgggaacccagtcatggtccgcactcatggcggccttgacggaaacgcgcacggccttcgatcgcgccaatgaggctgcgcgggaggcgttcaagcgagctgcttgatggagcacccggttagactcggagagaccgctgccaggcggtctttttttgttcgacggggatcaagaattgacattctcggcgtgtgtcgacgggcgaacgcgaccggaccgcctgggactggcagcgttatgtcgcctcttggcccgtggctgacctcagcccagagcgcggcgatgtccgcttccgagaggtgacccgaccaagggcatgccggctgccgggggcagcctttgacccaaagcggcggtagcccctctccgcgccattgcacacggttgtcttgacagcctgaacgagcgtttgcctgaaatagattcgctttcggcttgctccaagtgccgcagttccatgttatcgcgatcatacaagccgagcctgacgtgcagcacgcacaaagccgagtattggcgtttgaaacctgggttcgacttggctcaactcggattgctggcgcattttcaatggtccctaacggttcgcaaagcggtataagtgaacataatcgccccgagtacaggagctgactgcacgagaaaggtgatcatgatggatgctctccaccacccgacttttcgctctcccgcagcacaaatgctcaacgctcaaaaagcctgccgccttctgttcgagactgcgccgattagtctcctcgtgcttactccagagttgcggatcatcgatgccaacgactcgtatcttgccgacgtcgcgatggagcgcgatgccctcgcgagcatgtcgatgttcgaagtcttccctgatagcccgcacgatcttagggctgatggtgtgcgcaaccttcaagcgtcttttgacgcggtgatgcataccggccgcgcggacgtgatgcccctgcagcggtatgacattaaaccgcaaaggcggccatgggaggttcgctactggcatccgaagaattgggcgatgatagacgagggaggttctgttctcgccttggtacaccacgtgagagatgtaaccagagagatcctcgcgcagagggagatgagttcacgcgcctcaataggcgatctcttgcgacgagccgatgttgcaatacaggatagccgagaaataatgtcgttggcgaggaaagatcgcgaggtgagcaaagcgcttactcggcaggttctaaggcagaaaccgtacccttaatggcgtagccgtcatctgtaatgctatttattataagtccttgcctacttccgcttctggggcccataaccgaaattcgccctgagcatcggaacgtcggcttgttgatgtgaagcggacccaatctccccgatcgagatggctgcctttgccccatagcggccacgacgttgacccgacaaatagcgccctcgatgcttgtgcaacgagcacgcagcgcttcggcctgctgtccggatttcgccgtgacaccagggtgagccgcacgcgttcaagccggcacagtctagccgacgggattctcggagagctactggcggtgcctcgaccggcggccgacgccgtcgcctatgccggcagcacgatcaccttcgtcttgacgggcgttcgcgcatagagatcgatcatgtcctggctgaggaggccggtgcagccgctcgtaatgccgttcccgatcgtttcgggggcgctggtgctataaatcgtgtaaagcgtgtacaccccgttttggtagaggtagagcacgcgcgcgccgagtggattgtcgaggcctcccggcatgccgcgcgcatatttgccggcctccggctggcgcgcgatcatctccttgggcggcgtccaggtcggccattcggccttgcgcccgacgtaagcctctccgctccatcggaacccatcgcggccgacattggcgccatagcgggtcgcgtttccctcgccttcgatgcggtagacatagtatttgccgggatcgacgatgatcgtaccgggcgcctcaccgctgtcgtacttcactgtcttgcgaaaatatttcggatcgaccttgctgacatcgaccgcagggatcgggaatttctcgtcgggcacgggcccgtagagcttctccgcctcggcgaggctcatgtagtcggatgcgcaaccggctacgctcagtgcggcgagaccggcagcagagccggctagaaacgcccggcggttgagaagccgcgaccgaggcccgggcaaagcaccctcgtccatcgcgtcggcgtcggcatttccacggtccgtcaacatgatttcggattttcccttgtcccgtcgtacgcccggataagactttggcataccgcaggaaggtggagaaaaagttcttcgtcagccggggtcgaaaatctccttgacgcctaggccggatccattcccttggacttgagcacggcggaaccggtcggaccggtgaggagctcgatcagcgatctggcggctgccggatccttgctcgtggatccgatgccgaccgcgaagacgatcacgctgttcaaatcaccgggcagagggccgaccacctgagcccccggaaccgcggcaatttccgaggcctgtgcgacgcccatttcgacttcgcccttggcgacgagttcgcccgcttcggcgcccggcaccaggaccgtcttggatttcatctgctcggcgatgccgagacgatcgatgaccttggcgaaatagacgccactggcaccgcccttcgctggatcggcgtaggagatcgatttggcggcgagaagcgcagtcttcagttgctccaccgtgccgatgtcgggcttgggcgcaccggtacgaaccccgacggcgacataagagcggcccacgttgacgatgctgccctcggcaaccttgccctgggtcaagagaccgtcgagggccgcgcgcgacaggatcatcacatctgcggtttcgcccgcctcgatccgcttcttcagatcggcgatcgtgctgtagacgacgattagcttgttgccgctgccgctctcgaacttcgggatcagttcgccgagtgtgggggtgagcgcgaccgtgctcatgaccttgacgtcggccgcatgcgcggcgggtgctgccgcttccagagttaacaggaacgccgccgtgagggcggcccgccgtgagaaaaaccgtcccatcatggcttgcttgcctcccggttggctgcatcccaggcatgagcctaagcgggacagcgtcgcccgcgcggcctggaccggttcgccggccataccggcagccatgcaagatttctgaataatagaagtgtactgttgatttgcccgacgtgtcaagtcgccgggtcgaaccccggcaacctgtcgctcctttgcatggggttgttttcgatatttttgcagtgccacttcaaaccaggttcaggtccttcggcttgatgccggtgaagatgcgctcgaggctcgcctgctgcaggccgtagacgtgctggatcaggccggcgaagaacgccttgtaatcggtcagcacaggaaagtcgcggttctggaacagcgtcgcctgggcgacctggacctgctcgccggccatccggccgccattgatgccgccgcccatcacccagtagacgctgccatggccatgatcggtgccgcggtcgccattctcgcggaaggtgcggccgaactcggagatcacgaccacgacggtgtcgcgccacatctgagggccgatctcttcggagaagccggcaaggccccggcccagttcgccgagacggtcggcgagatagccggtcgcggcgccctggttgacgtgggtgtcccagccgccgacgtcgacgaagccgaggttgaactgctcgcgcatcaggcggccgatccgccgcgccgacagttcgaagccgcgcggcgacaccgcgccgcggttcgccgccatcatctcctcggagaccgacttgtagacgtcgtcgcggacgcgaaaaccttcggacaccgagttggcgaggtcgcccttgccgtacatgtccctgatcagccgcgcctggcggtcgtcgacacccggcttgctgacgctggcgatgccgatgttcgggatctggttctggccgcggaagatcagcggcagctggtcggtgaaggagatcggcttcacccgcgtcagctcggtcgcgagccggctcatgaagccggagcgatagtcgcggctgccgccgaccgcctggccgagttcgatcgtgtcctgggtttcgaaatggctgcgcgaaaggtcgtcgctggtgccggcaaacggcacgaacgcgatctcgcgcttggcccacagcggatagatcgaatcgcgcagcgccggatgcagtccccatccggcgtcgagcgccagcgcggcgttgggattgcccgcatcgggccgcgccaccgcaagcgtcgggcgcgaggcgtagtagaactcgctgccgaccggcaccaccacgttggcggcgtcgtaggcgccgcgcaggaacaccaccagcatgcgcgcgtcggtggccggcgccgcccagacccggccggccagggtgagcgaggtggaagcggcgaaggccttgatcagttcgcggcggttcatcgtcgaacctccctttcagtgcatgaactcgggtgacgacagaaacagcgtgttccagtcctgcggtgagaccgcctggtcgagcgcggcgagcgtggtcgggctcagcgtctgcctgatgttgctgaaatagagcccgttcatcacgagcggaaacgccggctggtcgacggcattgggctcgttcggcttgaacagtccggccgatcccgagccgatcgcgcgcgcgatctcgaaacgcagcatcatctgcccgggaccgttccaggccgccgacagcatcgaatagccgtcgggcgtctcgtgattgaacagaccttcggacaggcgattgagccagccctggatcggcaacgtattgaggatcaccttgttgtcgtaggcgagccgcaccgacgacatcacgtagagcatcgggtccttgaacttggcgccgcccttcaggctcgcggtgaattccggcgcatgaaccagcgtcgacatcacggccgcgatatcgccgtcggtcttctggaaggtctgcgccatctgctgcaccagcgccggcggcggattgtcggacacgaaataggtcgccagctgctttgcgatgtgcgtggcggtcgcgggatgatggcagagaatgtcgagggcctcatcgacctcggcgaggccgcggcccttgatctgatggcccaagaaagccttgtcgccgaaatcgtggcgcgccggattgaactcgaaggcaccttcgcgaaccagctgcgactgctgctcgggcttcagcttcggatcctccgacttgaagtcgatgccgacgccggtgaggatccgcgccagcgcctcgacatcggcctgggtgtagcctgagccgacgcccatggtatgcagctccatgatctcgcgggcgtagttctcgttgaggtgaccggccgcgttatcggcgttgtcgaggtatcgcagcatcaccggatgatgcagcgtcgccgacagcaggttgcggaacttgccgagcgcgttggcgcggatcgcgcggtcctcgtagtcgccgaccaagacgcggatgttggccttgtactggtgaacgttgaagtggttgaaccagaaccaggtcaggcgttcgcgcaattgatccggagcataaagcgcgcgcaggatggtgcgggccgcggcctgcctggcgcggtcgttcatggcctgctgatagacctgttgcgccgccttcttctgctccggatcggctacctggttggcggatttgccttgctggtcgaacgaggccgcgatgtcgaacgggaagcgatgcacgtccggcatcgcctcgatctgcttctggacggcgtccggcaatacggtgccagccggatgcagttgctcctgcaaccagcgctcggtgccgacctctcgcagatgcgccgcgctggacgcgttgacgccccaggtcaggcgatcgagcagcgcgatgtcctgcgcggcaagctcggccgcccgtgccggctggtgatatgccaccagcgcggcgatcgtgccgatcatcagtttcgcgactgtccgcgatccgagtgtggccgtggtgctcatcaaaggctgacctgctcggctcatggtgtcacgccctcagtgtttgcatttgccgggagggcacgccggcgcggcgcgggctggtgccgcgggccttggcggcggcgctgccatccgcggcggcggtgctgcgcgttgcgcctgcatcgccggccgcgg

SEQ ID NO: 37 - DNA, 88380 bp, Bradyrhizobium enterica
gagcacgatcagcacgaacaggatgctggtgagatagaaggtcgcgatcagcgccgccaggttgaccagcgagccgaggccgtaggcaccgaccgtgaaggccatcgcgccgaacgcgccgagcggcgcgacgcggacgatcatccggatgatgccgaagaacatcttggacgccttgtcgatcgcctcggcgatcggctcgccgggcttgcccatcaaggcgatggcgaaccccgacaggatcgagatcagcagcacctgcaagaggtcgccgcgcgccagcgctccgaagaaagagtcggggatgatcgccatcagatgggcgacgatgccctgctccttcgcctgggtcacgtaagtggaaacggccttcggatcgatcgtcgagggatcgatgttgaagccgcggccgggctgcagcagctcgccgatcaaaaggccgaccgcgagcgcgacggtcgacaccgcctcgaaatagatcagcgccttcagcccgacccggccgacgcgcttgaggtcgcccatcgaggagatgccgtgcaccacggtgcagaagatcaccggcgcgatcatcatcttgatcagcgcgatgaagccgtcgccgagcggcttcaactgcttgccgaggccgggatagaaatgcccgatcaagacgcccgcgaagatcgcgatcagcacctggatgtagaggatcttgtaccagggctgatgacggggatgggcaaccggcttgatcgcgtctgtggtcatgagatgtcccgggaggctaggatttgacacaacgagtggtgccatcttggcggagcaacacgcaagcgacaatgcccattcgcgccgccgccaacacacacgaatctgtcatagactgcggccggctcgcacccggaggctgaggatggaattcaccgcactgtttctcgccatcaccatcgccatgctggtggcctggcgtggtccgcgtcccctggcgatcggcctgttcgcggtgatcctggtcgcctgcgtcgcgaccctgctgcatcacgccaccgaccgtctcaccttgtcgttctgaggccggcaatgaccgacacaagggccgtgaccctgaatgcgctcgcgctctatgccctctcgctgctgctgactgctgcttttgcggcgcagctgatgctgcgcgagctgccctgcccgctgtgtttgctgcagcgcatccttttcgcgctgctggcgatcgggccgatcctgaacatccgcttcggaccacggccgagccattatgccttgtcgctgctggcggctgtcgtcggcgcctcggtctcgacccggcaggtgctgctgcatatcctccccggcgatgccggctacggctcggcgctgctcggctatcattattacacgtgggcgctgatcgccttcatcgcagcgatcgtgctgctcgccgccatgctgctgttcgaccgccagttcgaacaccgcgcggcacaagccaccgtgcccgacggattcgcactgggcgccgtctggctcgtgatcgggttgacggcgctgaacgcggtctcgaccctgctcgagtgcggctttggcgcctgcgccgacaatccggtcgtctatgagttgctgaagtagctgctcagggacgcttcggaatattcaacccgcgttccacggccgggcgcttcagaccgcgctccagccacgcggcgacgctcttgaaccggtcgaactcgacgagctcgcgcgcgccgtagaagccgatcagattgcgcacccagccgagcatcgagatgtcggcgatggtgtattcatcgtccatgaaccattgccgtccgtcgagatggctctccatcaccccgagcagacgcgcggactccgcgacgtagcgctgcaacggccgcttgtcctcataatccttgccggcgaatttgtggaagaagccgacctggccgaacatcgggccgatgccgccgatctggaaatgcacccactggatcgcctggtagcggcgcgctgcatccgccggcagcaacttgccggtcttctcggcaagatattgcaggatggcgccggactcgaacagcggcaacggcttgccgccggggccattgggatcgaggatcgccgggatcttgccgttcggattcagcgacaggaactcgggcgtcttctggtcgtccgtgttgaaatcgatcaggtggacctcgtagggcagcccgatctcctcgagcatgatcgagaccttcacgccgttcggcgtcggaagcgaatagagctgcaggcggtccggatgctgggcgggccagcgttttgtgacgggaaaagctgtgaggtcggtcatgtcagacattctttgcagggttgttgttgggtggctaatgtacggagctcattgaaagccgcaaggtctgcaaccagtcatgaaggatcaacagacaacgctcggcctttccgacgacgagctcgcggatcatccgaccgtgttcgcggccgatgcgctggccggtcaagttgtcgtcgtatccggcggcgccggcggcatcggccgcgcgatcgtctggctgttcgcccggctcggcgcacatgtcgtcgtcgcaggacgcaatgccgacaagctcgatgccctcgtcgatcatctcggccgtcgcggcctgaaggcatccgcgcacgtcgccgacatcagggatgccgacgcggtcggtgcgatgttcgacgcgctgtgggctgcgcatggccgcatcgatcatgtcgtcaacagcgccggcggccagttcccgcaggccgcgatcgatgtctcgatcaagggctggaatgcggtcatcaacaccaacctcaacggcacctggtacatgatgcaggccgcggcgcagcgctggcgcgaccgcaagcatcaaggcagcatcgtcaacatcgtcgtggtcacgacgcacggcctctacggcatcgcgcactcgatcgcggcacgctccggcgtgatcgggctgtcgcgcgcgctcgcggtcgaatgggcgccgctgaacgtccgcatcaactgcatcgcgcccggcgcgatcgagaccgatggctggaacgtgtacagcgaggcggcgcgcgccgcctatccgcgctccaacccgatgatgcgcccgggcacgccctgggacatcgcggaagccgccgtctatctcgccgcgccctccggcaagttcatcaccggcgagacgctgaccgtcgacggcggcggccagcattggggcgagacctggaccaccggcaagccggactatttcaaagccggcgagtaacgcaaacataccggtcgccgcctccgcatttacttcccgtcgtcgaagctgacgatgacggcggcattcgcgatcaggatcgggtcgttgccgagatcggagggaatttcgaggccgcccgcaatcgccctcacggtcttggtgccatagggcagttccttggcgacggcttcggtatcgaccgcttcgggattcggcacggcgatcgtgacatcgacgaacatgtcgttggcggtcttgccgagcatgcggaagaagccgaggctggaatggcggatcgcatccgagaccgcccgcttggcggccttggtggcgtcgcggccgtgaacgtcgacgcccatgcccatttcggtgatacagcgcacgcgtgtcatgaaactttcctgttgtcgttggcgtgagagagcttcactccttcgccctccgcgcaggcggcgtcaagccgggtccctggtctcacttgcgccgttgtgagcgccgcgcgcgagcagccatgccgcgagaccggcaaggatcgccgccgcaaccaccatgacgctggccgcaccccagccccatgccgacaccacagacccaaccgcgatcggaccggtgacctggccgaaattgctgccggtcatcaacagtcccatcatgaccggaaccatcgccgccgaacccgctgccgccggtgcggtcgcgagcaaggtcgccgggatcaggccgccggtcgcggagaacagcaggcacagaaagaacgccccccacccgccgagcaggggcaggaagatgccgagcgcagacgcgcccatcaccagggccgctaccgcgatcagcaacgggcggctcacgccgcgcgccagcagattgccggcggcgagattgccgacgacgttggccgccgctgccaacgcactgagcccgccggcgctctggcttgagacgccgagccgcgcagtgagcaggatcggcagaaagctgaacagcgcaaagaacatcaggctgtagagcgcaaacagcaccatcagcagtgccggagtacggcgacgcgccagcgccgtggcctcctgcatcaggccggcacgcgccgggccgctccgcgacgcgacttcagggacgaagacgctggcgagaacgaacagcaacgcgacaaacgcggcactggcccaccagatcgcgcgccagccaccgaagatcggcccggcaaccagcgccagcgcgatcccgaacggcatcacgcaactccacaccgccatggtgacgtcgcgcgcaccgacatcgacggcacgatcgagcaacgcgggggccgcgaccatcaccagcaggaagccgagcccttccagcatgcgcgacgccagcagcgccacaagtgacggcgcgagcgcgccggagaccgcaccgagcgtgatggcggcgaggccgcacagcatcacccggcgcgcgccgaccgctgcgatcacgacgcctgccggcacgctgccggccagcccgagcaccgcaaagatgccgccgaccgagccgaccgcggcgaggtcgacgccgaggttctgctgcaacatcgacgcggcgatcggcaccttgccgacctgcagcgcggcaccgatcccgcaccccatcacgatcgcgaccgtcgcccatcgcttcgcctcgctttgccgcgccacggccgtctcgatcgtcatgcgtccacccaccctgctcacctcacgacaaatagcgtttccggaccatcaacaggagtgatatgttttgcattcatttgatcgatttcatagatcatgctcgataacctcacactcgatcagatccgggtcttcgtcaccatcgccgagaccggcagttttcgcgccgctgcggcgaagctggcgcgggtgcagtccgcggtcagccacgccatcgccaacctcgaggccgagctcggcatcatgctgttcgaccgctccggccatcgcccggtgctgacggccgaaggcaaggcgctgctcggcaatgcgcgcgatctcctgctccgggtcgacgcgatgcgggcgcgggcgcacggccttggcgacggggtggaatcggaactcgctgttgtcgtcgacacgctgtttccgatcgccgctgtcggcgcggcgctgacggagatgcgggcggcctatccatcggtgagcgtgcggctcgcggtcgaaccgatgggcggtccgatcgccgccctcaccgaacggcgcagcgcgctcgccgtcacggtcggggaggattttcgcgatccccgcctcgcgctcgacgcgatctgctccgtgcagatcatcgctgtcgcctccgcaagccatccgctcgcgcgccgcggccacaagagcgtcgccgacctcgccgatcatctgcagatcgtgctgtcggacccgacgccgttgtcggaaggccgcaacttcggcgtcctctcgccgcagatttgcagggtcagcaaccaggacaccaagcacgccatgatcatggccgggctcggctggggccggctgccgatctggcaggtggcgcgcgacttgagcgaacgccgcctggtgagggtcgagaccggcgcactcggacgcaacgcatcgcttgcaatggaggcctatctcgcgcgccggctcgacgagccgctcggccccgccgcacgcgtgtttgcagatgcgctgacgcggatcgccgcgcatggcggcaagcccgcgagcaaagcgaagccgcgcaagcggcgctgaattttcagccgtcatcattttccgttgttgacatcgacatcggcgaggcgtatgtcccgcaaccttcgcgagcaccaccgttcgcgatcaaacatgagccagatgatgcactacggatttgaaagatcccgccaactgtcgaacggcctgcggccgatcggtagcgcgtgcccggctcatcggagcgacctcgcataatgcgaggtcgacagtccgcctaaacggaccctcccgagccaagtgctccggagggtttttttgttgtccgcagcacggctcattcgaattgcccggcgcaagccggaacgggagacccggatcccggggctcgcgcggagacgcgcgtgcccaagtgcgcggggcctgccggagggaacgaggcgatgagccggacaccgatggcagagcggactccgaggagttcgcaatcggcggcgcatcgacagcgccgcgacgaaatttttcaaaacggtttgccgcatcactgcggctcaaccgacgctggtggtgaagatgtcggatacttcgctccactggaaagagcgggttcgaatcccgcctgtgacacacgcaccgggatgcggccaggcaaaggtccgcgtgcggcccggcgcagtctctcgtccgcaaggcgagcggctgtgttgtcgtcactgacaccgatatcgccagttccccagcgtacctatcgacgaccggcgcagatgcgccggtcaggcggtggtgaagatgactgttacttcgtgggaaggcgctacggcgccgagcgggttcgaggcccgcacgccgaaaggcggttcgcccgcaagggcagcaacagcatcgcttgttccccgccgaccccttccacgccccgtggtgaagatcgctgttacatcgtctgtgaaacgagaggtcgcgggttcgaatcccgcccggtgtcatgtgcaccggtagctcagtggtagagcgcttcccgactggcagggtaagctgccgaacggggtctcagcaatcgcctgttcccgggtcgtggtccgccaatgcaggtggtgaagagtgctgttacttcggatcgcaaggcagaaggttcgattccttccggatgatacatccgtggctcgatggaagagcgtgcgacgccctaaaagggcagtccagcctcgccagttccccggctccactttccaatccatactcccccagaaaggaggccatcatggccacgatcaacaagatcatgcgcgccttcacccgcgagggcgcgcgcagcaagcgcttcacgcccgagatggagctgcggcgcgcgctgctgaactgcctcctgtgggagaaccagttctacgaggacggcgtcgcgatcgccgatcgcatcaaggcgctggtgccgctggtcgcgcccgagcggacggccgaactcgccatcgctgcgcgcgagaccatgaagctgaggcacgcgccgctgctcgtggtccgcgagatggcgcggcatccgacccatcgcggcctcgttgccgatacgctggctcgcgtgatccagcggcccgacgagatgaccgagctgcttgcgatctactgggcggatgcgctcggcccgcagcagcagcgcaagcgtcagcccgtctcggcgcagatcaagaagggcctggcgcgggcgctgaccaagttcgacgcctaccagctcgcgaagtacgatcgcgacggcgcggtgcggatcaaggacgtgctgttcctggtccacgccaagccgaaggatgccgcgcaggagaaggtgtggaagcagctcgtcgacggcgagctggcctcgcccgacacctgggaggtttcgctctcgtccggcaaggacaagcgtggaaccttcgagcgcctgatcgccaagaaccggctcggcgggctggcgctgctccgcaacctgcgcctgatgcagaaggctgaggtgccgcgccgaaccatcgcggaggcgatcgacgcaatgcggacggaccgcatcctgccctaccgcttcatcacggtggcgcggtatgcgccggacttcgagccggagctcgaggcagcgatgctgaagtcggtcaaggactacgcgcggctcgatggccgcacgcggctcctgatcgacgtgtcgggatcgatgttctcgccgctctcggcccagtccgagatgacgcgggcggaggcggcttgcgggcttgcgatcctcgcccgcgaagtctgcgacgaggtggagatcttcacgttcagcaatgaggtcgtgaagctgccgccgcgccgcggcttcgcgctgcgcgatgcgatcatcggctcgcagccgcatggcgggacgtatctcggcaaggcggtgacggagatcgaccgcaagggcgatcgcctgatcgtcttcaccgacgagcagagccacgaccaggtgcccgccccgaagggacgcggatacatggtcaacgtggcgtcctaccagcacggcgtcggacacggcccgtggacgcgggtcgacggcttctccgaggccgtcatcgcctggatcgcggcgtcggaacagacgatgcactgacgcctgctcgacaacaatgggcccggacgcgcatgcgcccgggccttttttttggtgcgacggacgagcgctccgctcgcgcagcgcacgagcggcggcaacgtcattcacaatgtcgcgagcggccgcgccggctccacgccgtttggctccaattcatcttcgcgaaccgaccatgcacgcgaccgatcccggtctcgcagggagccgtgcaccatgccgattagccgccggcgggcgctgacgcttgcctcgttttttgtaacgagcccgttgcttggcagggaaagccgcgccgaatcgttgccggtcccgggcgcggccagcttcgacatggcgaccttctccgccacttcaggcggcgacgccgacgcggccttcgccaaggcgctggcctcaatcgccaaagcggcagcggacgccagcaaggcggggccggttcatatcgtgctcaacctggaaaagaacgccagctaccgaatcaagcggccgcttgcgttccggcagttgcacggcttcgagctcaacggcaatggcgcacagctgatcaacacggcgcgcagcggcaccctgacgatctccggctgcaaccgcctcaccgtccgcgatctcaccatcgactacgacccgctgcccttcacgcaagggacgatcaccgcgttcgacaagcaggcgatcgagatcacggtcaaggtcgatcccggctatcccgatgatgccgcgctgctcgccactttcaccgatggcttcttcaaggtgatggatcgccacaaccgggcgctgaagaccggtgccagggatttcctctcaccggcccatgccacgcgcgtcagcgacggcctgatcaaggtgcgcctgcactggagcgcgaacgatcgctttcccagccaactgccgatcgcagtcggtgacgtcgtcaccgtcgcgaatggcggcgcgaacgccatcgccgtggactccagcgttgcgacgagcctgatcgacctgaagcttctggcctcgccgggcatgggcattgtcgagagcggcggcgaaggctccatgatgctgcagaaggtctccgtcgttccgggaccccggccgaagggcgcaacaaccgaccgcctgatctcgaccaactccgatggttcgcacttcaccgcggtcgcgaacggtccgaccatcgaggactgcagtttcgccaacacctccgacgatgccatcaacgtgcacggcttctactactacgtcgtggcgaagaccgcgccgcggcggttcctgctcagccccaaatgggacgtcggccttgtggccggcgacgatatcgagagctgcgatcacgcgacgtttggttcactcggacgcagcaaggtcgcgcaattgaccaagcgtcacgcgccggagctgaaggccaagatcgccccgctctggaagaacaggagcccgaccacgcagccggacctgatctacgacgtcgtcctgcaacaggacctgccgctcaaggtcggcgatgccatcacctcgctgacgcatatcggatccggcgccaccgtgctgcgttgcaatttccacgcctgcggccgcgtgctgatgaaggcgccgaacgccatcgtcgagaattgccagttcaccttctcgaccggcgtcgcgctgcaggcagggagcgacatcggcttctggtcggagtccggattcgccgacaacctcgtgttccgcaacaaccgcttcagccattgcgtcaacggcgccaatgaactgaccagcggcagcggaacgctcggcacgatctatgtcggcatggtgccgccggaaggagcaacgggtttccagaacaatttccagaaccggcgcgtcatcatcgagggcaatcacatcgacgattcctacatctacgcgatcttcgtcagcaatgccgacggcgccaggatcgccggcaatgcgatcggccagacatttgtgcgcggcaatttgtttggggccggcgagttcttccatatcaagcccgacagcgcgatcttcgtcggccgcgccaggaatatcgagatcagcaacaacgtcgtcgctcgcgggcacatcacgacgattgccgtcgcgatcgatccgagctgcgacaagcacacggtgcacctcgccggcaacaggctggcctgagcgcgcgacgctctccaatcagggcgtcatcccgagcgcccgccacattgcgcggatgatccggaacgagcgggcatcgccgaccaacccgcgatgcatccggttcatcgcataggcaaacgtcatgcgcgcgtcggtatcgatgagcacgaacgcgccgccgccgccggaccagaacagcgtgttcggattgggcggcaccaggctgaggatcgggctcggcaaaccgtagccgaggccgaagcggacggagatgccgcgcatcaccaggtcagggccatcgatctgcacctccagcgccctgcggcagcccgcttccgacatgatacgttggccattcgcaactccgccggtcgcgaggatggtctggatcgcggcgatcgaacgcgcgttgccgtggccgttcaccgccgggatctcggcgccgcgccaggcgcgggtgcgggtcgatggcacgtcggtacgggtgtcgctgaaggtgatcttctggatcgtcgtcatctcgacgccggtcgcggccgatgacggcaggaacggcacgaggtcggcaacacgatgatcctccgatgccggcaggccgatccagaaatccacgttcaaaggcgacgcgatctcctcgcgaaacaccgtgccgagcgtcctgccggtgatgcgcctgatcacctcgccgatcaggaaaccgaaggtgtagacgtgataaccggatgcggtgcctggctcccacagcggcgcctgcgcggccagcgtcgaggtcgccttgtcccagtcataaaaatcctcgccgctgatcgcgggatgccagcccgagaggcccgccgaatggctcatcagttgcgccacggtgatgccgaccttgccgttcgcggcgaactccggccagtagcgcgcaacgggtgctgcaaagtcgagctcgccgcgatcggcgagccacaacgcggtcagcgcggtcatggtcttggtgatcgaatagacgttgacgatgctgtcgcgcgtccacggccgccgacacgcttcgtcggcgaaaccgccccacagatcgaccaccgtctcgccgtcgatcgtggcgcagaacgacgcgccgagctcctcaccatcggcgaaattggcctcgaacgcttcacgcgccgccgaaaaccgcgcgtcggcgaatccgtctatcgtcgcaactgcgatggctgtgctccccgctccatccccaggctttgagggaggcgggacatgcgcggtgagaggggcgcctgacaattcttgaactgaactgtttcgtccccatttatctgagtagagatctcccccttcagcccggcgctaaccctgcttctgcaacaccgtgatgtgcagacggcggcggatctccatgccctggcgccgatacagtgcgatcgccgaggcgttgctggtgaagacgtgcaggaacggaatttcgccgcgcgccacgatctggcggccgaccgccgacagcaacgcctgcgcatagccccggccgcgatggtccggatgcacgcagacggcggtcatctcggtatagtttcccgacttcatccgttcgccggtcattgcgaccagttcgccgccgacgcggatgccgaagaaattgccgagctcatgcgtccgcgcgctgaacggtccgggttttgtcagtgccgtcagcgccatcatcgcggaaacgtcgccttcgccgagcctgacgatctcgacgccggacagagaaaagtccgccggcgcaccgatcatctgctcaccggtctcggccagcagcaccttgaactccgacggcacggcgagcggatcgggcgtgaacagcaccgcgatgtccggtcccgacaacagcgcgccgagcgcggcaaaactctgcggtgacatgtcgaccatgtcggcaaatggcgcgatcgcgagcgggaagcgccttgcagcggtgtcgctttccgccagctcgcgctgccgtgtggtcagcgcgctccagatcggacgatcaagcggatggcgtggcggaacttcggacatgcggcgcttcgctcctgatttttccaaagaagagcaagaagcgccggcaaaatccagcacggcgtgacgtgattgcggctcacaatcacgccagctggcaaaacccggctacgccaccttcaggcaaagctcggtgccgcccttcagcggcagcgtgatcgacacgaagccgttgtggggatcgcggacgaactccagaaaatccgcctcggcattgtcgttcatgacgtagccgccgacgcgaagctggggagctacgatctcgatcacctggcgtgccagtgtcggtcccttgtcgccgggccagccgtcgatcaggatgaagtcgacggggccgccgagatcgcgcagcgtcttccgtgcatcgccctcgcggatctcggcgtaatccgccaggccggcctccgccaagttgcgcttcgcggccgcgaccttggccggcacgatctccgagccgatcacggtgccgccgccattgtcgcgcaacgccgcggcgaaatagagcgtcgacatgccgaccgaggtcgcaaactcggcgacgcgcctggcgccgaggccgcggcacagcaggtagatcagctcgccctgctccgggtggatcgagaaaccctgctcggcataatcgtgtggatcgcggctgctgctctgcatcgggttgcctctcaccggcgcccggcgcgtggcctgcaggcgctcgatgacggccatgacgcgggcatcggtaatcgcgctgtgcggttcagcattgtacatgaagggcttcctttgcgattgcgtcattgctgcaggatttcagccgcagcgcggtccaggatctttgcgatccgccgcgcctcggcggcatcgcagccgcgcttctgacgcagcgcgctcttcagcgcatgacgggcgcggtgaatatcgtcggacgcttcaccgtcgagatcgctgacgccggcgaaggcttcgcgcacctcctccatgcggcggccgatccgcgacagcgcttcgagaatggtatcggcggtggcacggttctcggcgagatgcgccttgccttgctcggtgatgctgtagagcttgcgcgccgcatcctgggtgacgctggcgtggccgatctcttcgaggaaggtcagcgccggatagatcacgcccgggctcgggctgtagaagccgtccgaccgctcctcgatcttcttgatcagctcatagccgtgcgccggctgctcgccgagcaacgccaggatcacgagttgcaggtcctgcgatgagagtcggcgcgatcccggaaagtcgccgccgccaccccgcccgaagaagccgtggccgccccggccaaagcgatggccgcccctgccgtgccgtcccatgaagaagccaaatccgaagccctcgtggtcccggtcgcgaaacatcgatcgtctcattgtctttttccttactgaaaacatatcttacgatatatctacagataggacggcgacaacccacgttttcgtgaggccgtgaggatacagcggggatcggaacgagcctgggatcgtcggccctcactgggcttgtcgaccgacgcgcggcgggcttaaggctttgaaccctccggtccgttcgactcatgcgccccaaaaccttcgaaacccattgcctgcgcctgcccgccgccaccaaggtggtgcaatgggagggcacgtcagtgttcaaggtcggcggcaagatgttcgcgctggccggcggcttcatcgagcggtccggcggcttcatgttcaagacctcgcacatggcctatcagctcttgatcgagcagcagctcgcacggccggcgccttatctggcgcgcggcaaatgggtccagctgctcggcaacgatgccctgcccgacgccgagctcaagacctatctcgatcaggcccatgcgctgatcgcggccaagctgacgcggaaatcgcgcaaggcgctcgggctcgactgatcggcgcggctcagccgccgagtggcttgctggaatcgccgaacagcaattttggaaacagctccttgaaggcgaacttgtcgtcgcccttggcgcgctcgaagcgcagcacgacgtcgaaccggctgccctcccatttggtcggcggcgtgcccttgctgaccgggatcagcggcaggatgtcggagatgatcgccttgtgctcccagcacaacagcacgacgcccttcgacgcgagtatcgccttcatcagcgccggctcgtcacccttgccgaatccttggttcggcgtcaggccgcgacgcgctgcgagcgccgagatcgtctcggccggacggctcgacggcggctgattgggctcgtttccgggtgtcgcggcatagatcgcgtcaggcttggcataatcgccgccggtgaggtcggtgccgaacaaggctgtccacgccccggcgcgctgccagccgcggagcaccagcgactcggtgtcggacgccccatccgcggtgaagccaggccccggccaggactcgccgggcttctcggcatgacggatgatgaagagcgtgagcgcgtccatggcggcctctcggagaagttgcgtgaatggttacgacttcagtgaggttgaccctatccccgatcaggcctccgcttcatgaacggcgtcacaatttgcgaaaaccggatcgaccagcgacgcgctggcgctgagggacatgaacgacacgaggatgaacttctgctcgatcatgctccgctcgaaatgaccgacgcaagccacggcgaccatcaggcgtgcggaccgcggtcaggccctggagctcggcccccggcggcgagcgcgagcctggcaagatagtgcgcccaacccttgctatggctcgcgcactgctccgcgttgggcaagccactatgggtcatgcgcaacagcgtgccgttgtcctgcgccatcaggtcgatctcgatcaggctggatcccggtgggacctccgcgcctccctcccagccaaagctgtaggcgagacgatgcaccggcacgacctcgcggaacgcgccgcgtgccgcctttgtgcgatcgccggcgacgcccttgagcagatagagcccgcccggatgcaactcggtctcggcttccagccccatccagctcacgatcttctgcggatcggtcaggaaggcgaataccgtcgcgggcggcgctgcgatctgcatctcgcgttgaacgatgaaagcttcggtcatcgaactctcctccatggacgatcggatgtagcgataacgcgtgacaagtctggtacgtcaacgccatgatggagtgatgcatttgccctcgacgctgagctggctggtcgacgccgccgccgagaccgcgggcgccaaccgattgctggcagacctcggcagccatcttatcacggatggcttgccgcttgccggcggtgtcctgacgctcgaggttccgcatccccttattgccaggcgcacctggctgtggcgcgccgacaacggcgaggtcatcgaggcgctcggattcgcgccggaacaaccgtttgcaatgcccgatatgatcggatccgccgatgccggccgacgttggctcggcagtctcgcgcccggcccgatccacgaggacatgattggaacgcggccggacggcccgaccctcggctggatcggaacacgcgccttcacgcctgcggagacggatcgattgcgcgaggcggcgcgcttcacggccgcgccgctcgccgcgctcgcggcgcgtgccacgctgaccgcggcgctggaggcctatctcgggcggcgcagcgcggcgcgcgtcctggcatcgccgttgcggcgcaacaccggcgaaaccatccgcgcggcgctgctgtttgccgatctgcgcggcttcaccgcgctctccgaaagccatccgcccgccgaggtgatcgccgcgctcgacgcctggttcgaccgcatcgccggcgcgatccacgccttcggcggcgaggtgctgaagttcatcggcgacgggctgctcgcgatctttccggtcacgacgggcgctcgcagcgcgtgcgaggcggcgttgcgtgcggtgtcggcggcgcgcgtcggcatggcgcatctcgataccgagcggcgcaagcagggtttgccggcactgtccttcggcgcggcgctgcatctcggcgaggtgcattggggcaatatcggcgccgccgatcgcctcgacttcaccgcgatcggcgccgcggtcaatctggtcagccggctggaaggcctgtgcaagccgctgcagcagaccgtgctggtctcggacgccgtcgccgccgagaccgagatgccgctggtcgcgctcggcacccatgagctgcgcggcatcgcgcggccctgtgcggtcttcactttgccggagagatgagccgatcatcggaacaggcgcaaccacggcgccagatgaaatgcgctcatcagcgcgtacatcgggaccatcccctgcaatgaaagcggtccctgcatcgcgccgcagatcatgtcggccggcgccagcgcggcagtcagcgccatcaccgcgaaggtcggcgccgccgccagcgacagccaccgcgcggcgatcgcgccacggccgccaagccggcccttcaaccaatcctgatgtgtttctaagccggtcatcattcgatctcgctggagatgcgccatgtcgtcatgtgctagattaggaccgggcctcggagggcgagagtgacaagtgtgtcgggattcgaatggactcgctgattgcggctgcggcgcgcgcactcgcggcgggtgatcccctcggcgcactgaaacgggtggcgctgcgcgacgatgcgccggcgctggcgctgcgcggcatcgcgatggcaaggctcggcgatttcacgcgcgccaaggagctgttgcgccgcgccggccgggccttcggtccacgggaagccatcgcgcgggcgcgctgcgtggtagccgaggccgagatcgcgctggtgtcgcgcgacctctcctttcccggcaagagcctcgccgctgcgcgcgcgacgctcgccgcgcgtggcgatgcgctgaacgccgcgcacgccggctatctcgaaatccgccgcctgctgctgatcggcagcctcgacgcggccgagcgcatgcttgacggcctcgatccatcgcccttcccgccggcactgcgggtcggccatgaactggtcgtcgccgggatcgcgatgcggcggctacggaccaagccggcacgcgcggcgctggcacgggccagggatgccgcgcaccgcgccggcatcgccgggcttgcggccgaagtggagagcaccgcgaagctgctcgccacaccggcggcgcgcctgattgcgcgcggccaacagcggccgttgctgctcgatgaggtcgaggccttgatggcatcgaaggcgctcgtcgtcgatgcctgccgctacgtcgtgcgtgattccaggaccacggtctcgctgacgcggcgtccggtgctgttcgcgctcgcccgcgcgctgggcgaagcctggccgcaggacgcctcccgcggcacgctgatcgcgcgcgcgtttcgcggcaagcacgccgatgaatcgcatcgggcgcggctgcgggtcgagatcggacggctgcgccgggccttgctgccgcttgccgatctcaacgccacgcccgacggcttcgtgctggcaccgcggggccgccgcgaggtcagcgtgctggcgctgccggtcgaggaggagcatgcggcggtcctggctttcctcgccgacggcgaggcctggtcgagctcggcgctgtcggtcgcgctcggcgccagccagcgcaccgtccagcgcgcgctcgacgcgctggcggccaccggcaaggtgcagtcggtcggccgcgcccgcgcccggcgctggatgacgcccccggtgccgggattcacgacgacgttgttactccctgccccgctgccgaacggctagcatcgggatgaaatcagacaactggagcgccgcatgaagacgtccgaagccgagatcatccgggaatatgccttcgaaggcgtcgagagcgtcggcggcgtcagcttcgacggcgagcaggtgtggttcgcggccggcggccggctggtcgcgttcgatcccgacagcggcaacaccacccgcagcctcgacatcgcggcccatgccggcaccgccttcgacggcaagcacctctatcagatcgccgaggaccgcatcctgaagatcgagccgaacagcggacgcgtggtgtcgacgatcccctcgcccggcggcggccgcgactcgggtctcgcctgggctgaaggctcgctgtgggtcggccagtatcgcgaccgcaccatcgttcaggtcgatccggaaaccggcaaggtcattcgcaccatcgaaagcaaccgcttcgtcaccggcgtctcctgggtcgatggcgaactctggcacggcacctgggaagaggagcagagcgacgtcaggcggatcgacccgcagaccggcgaggtcatggagcggctggaaatgccgaagggcgtgttcgtctccgggctcgagtccgacggcaaggaccgcttcttctgcggcagcggctcgaccaacaacaaggtgcgcgccatcaggcggccgaaacgcagccgcgcgtaaagcgatcaatcgctccacgcgctgagcgagcttacgccgacgccggcaccgcagtgggccgcgccgatgccatcggccggaaggtcatcatgatcaggaacgcgccgaggcccgttgcccaggagccgacatagagccacgtgtagctcgcaaaggtatcgtagatcaggccaccggcgagcggtccggtcgccatgccgagactgcccgccatcgcggtgccgccgatcacggtgcccatcatgcgcagcgggaagttctcgcggatcagcacggaatacagcggcatggtgccggcatagatgaagccgaagattgccgcgactgcgtagaacgcggccagttcgcgcacgaagacataaccgagcgcgccgaatgcctgcgccagcagcccgagtaccagcacgcgcttggcgccgaagcggtcgccgagcaggccgaaggcgatgcggccgcccatgccggcaagcccttccacgctgtagatcgtcaccgcggcgaccagcggaatgccgcaggtgaccgcgtagctcaccgtgtggatgatcgggccggaatgggtggcgcagcagaagaaattggtggtgatcaggatgatgaattgcggcgagcgcagcgcctgcgccagcgacatcgccggctccccgttctcggaagccaccgccacgtggtcatcttgcagcgccggcgggcggcgcaccagcaacgacaccgggatcatgatcgcgccgaccacgcccgagacgatcagcatcgcggtccgccagtcgtggtgggagatcaaccaggccgcgagcggcgacatcgtcatcggcgccatgcccatgccggccgacaccagcgaaacggcgatgctgcgatgggtgtcgaaccagccggcgacgcaggccatcatcggggcgaagattgcggccgtcgcagcaccgaccagcccgccgaacatgaactgaaatgccagcagcgatggtgcccgacttgccagcgcaaggctcgcggtgagcaccaccgatccggtcagcacgaccgggagcggcccgaagcggtcggacagcgtgccccaggccatgctggtgaaggccattgcgaggaagccgatcgtcatcgcgctcgatatcccggtcaccgaccagccggtctcgcgcgccatcggctgcaggaatacgggtaacgagaacatgccgccgatcgcgacgcagccgagcaggccgccggccgcgacaatcacccaacgataggtcgaattggccattcgggaactcccatgcagttcgttctgggtggaagacgaacggaccaaggcggaaccgacagcagacggtcgccgtgactcacttttttttgcgaccgtggcgacctctgaggggcacgatcacgataagcgggttaccacgctgatgaaaatccgcacacgcatgctcgccgccatcagtcacgatttgcgaatgcccatcacccggctacggctcagatccgaatacacgagaacgatgcgcaggcgtggagaccttgcacgaccagatgcaggccacgctggaatcagtgctttcattcctgagcggcggcaacacggcaaatccgaaggcagcacgtcatggtgcaccggcacgccgctgccgcagcatcagcccttcttcggatcgccgcgcgtgtgttgcagcagattgtcgcgcagcctgaccacgctcttctgcacgatcggaaattcgtcgccgagcccggtggcttcgaccagcgacgcgttgatctccttgtcgagcagacgccggcccgctgccgtcaggctcacccgcacctgccgctcgtcggcgggatcgcgggtgcggctaatgtagccgctctgctccagcttcttcaggatcggcgtcagcgtgttggattccaggaacagcttctcgccgagttcgctgacggtctgctcgtccgcttccgacaacgcgatcatggcgatgtactgggtgtaagtcaggccgtacgcatcgaggatcggcttgtaggcgcggccgaaggccagattggccgaatagaccgcaaagcacagaaaactcgatagttttcggccctttgtgtcggccttggaggaacgggtcacgggcgtctccggagtttgtgaagtccggccaatataaatcgtatccgattaaatcggaagagcttgacatcgcccggcgcggggtctatttcaacgcgcatccgattaaatcagatacgatctatcttcaatccaaaggagtcagccatgaccgccaatgcaaaggttctcgtcaccggaaatacccatgtcaccgccggcccgaacggcgccgcccgctcgcgcgacggcttcctcgacgtcaagctgccgcagccgcacccggccgccgaaaacctgttcgccgccgcctggtcggcctgctacatcggcgcgatccagctcgccgccggacagcgcaaggtcaagcttgcgagcgagcccgaggtcgacgccgagatcgacctgaatcaggccggcagcgccttcttcctgagcgcgcgcctcaacgtgcacgtccccggcgtcgagcgcgaggtcgcgcagcagctgatcgaagccgcgcacggcatctgcccctactccaaggcggttcacggcaacatcgacgtcacgaccactctcgtctgaacgatcacgtggcaactcccgacgcgggccggccgctcgcgggcccgcggtcggagaggccagaacgaaaatcaaggagatcaagatgaccggcaatctgttgaagacgacacgcctcctcgcaagggcggcgttgatcgctggaagtttcctgacgattcctaccgcgcaggcgcaacaaccggcagggttcacgcgaaccgacctgcagcgtcacgacctcagtgctcccggccgtgaagccgtccaggtgcgtgtcgacatcgagccgggcaaggcattcggccgacacacccatccgggggaagagatcatctatgtgctaacaggcacgctcgaatacgaagtcgacggcagaccgccggcaacactgaaggccggcgacgtcctgttcattcccgcgggcacgatccatgcggcgaagaacgtcggcagcgtcacggccagcgagcttgcgacctacatcgtcgagaaggacaagccgctgctgacgctggtgaagtgatcgatcccgcctgctcgcccctctccttggggcgagcgcggcgacagactcatttcgtgctctggacttcaggctggcgcgccaaccgtgcgttgaagatcaggaagctgatcgcggccatgatccagacgccgataccgccataaagcatcacccagccgaaaccgctcgccagcgcctgatgcacgatcgggccggtcagttccggcgcggatgcggcatcgccggacgcgatccgctcggcgaggacacggagttgcacgccatcgagccccggcagcacggccttcaggtgcgcgagcacgccgctcgccagaatgaagcccatcagcgcgatattgaccgacagcgagaccatgcgcgcgctcatgtcgatgccggaagccatgccggcccgatcgctcgagaccgagccggtggtcgtgttggtaaccggcgtgttggtgatgccgaggccgatcccggcaagcaggcagcccggcagcatcgtcagccagtcgggctgcgcggctgcgctgccgaacttcatcagcatgaatccggtgccgatggtgaacagccccgccgggatgatcaggcccggctggtagcgcagcgacaggcgctcggcaaacggcggcatcaccaaggtcggcaacgtgtaggcgagcaaggcaagtcccgcggatacgctgtcatagccgaggccggcgtgaaaccagatcggcagatagatcatgaacggccagtagctgaggttcatcgccgccgagccgacgatcgagccggagaacgcggatatccggaataccgagaagtcgaacatcggccgccggctgattctctcggcaacgaggaacgcaatgaagctcaccgcggagacgccgaggatcgcgagccccttcgggctggcaaagccgagatccggcccctgcgtgatgtagaaggcgagacagaacactgcgagcgacatcgtcacgatgccgccgacgtcgaggctgctggccttcgggtccttcgattcatgcacgccgccgatggtgagcacgaatgcgacggctgcgaacagcacgtggacgaggaacacccattcccagctcagcaccgcgaccacggcaccgccgatgatcggcccgaagccgagaccgatgccgaagatgacgccccaccatccccaggcgaccgcgcgcaggcggccaccctggaattcgtgcgacaacacggcgatctggcaaatcaagagcgcaccgccgctcagcccttgcaggaagcgggcaacgatcagcatttccacgctcgaagcgacgccgcagatcagcgacgtgatgccgaacgccgcgatcgcgaccaggaagatgcgcttgcgtccgtagcggtccgccaccgttccgatcgccatcagcaccgtcgtcaccgcgatggtgtaggcgttcatgatccattgcagcgccttgaagtcggcatgcagcacctgctccagcgtcggcaggatcgcggggatgctggaaatctccaatccgaacatcaggcaggcaaggcatacggcggagaggacaacagcgccgcggcggctcagttcagtagacatgatcaggccttttgttgtggcaagccaacggcataccgcacgctgttgccagggtgctggcagcagcgtcggtcgatcgactcacgatggtttgaggcagcagcggcaggaatcgggtggccacggcgcttcagggctcaaagctagtgacgtcttgagcattggtgaattggatgactagatatttcagagacaacaattccggatgactgacatgaccacgctcgacatcgacgccgtgaagaccttcgtgaccatcgccgagttcaggagcttcacccgcgccgccgaagcgctcggcaccacgcaaggcgcgatcagcgtcaagctgaagcggctggagcgccaggtcggccacaggctgatcgagcggacaccgcggctggtgcgcctgtcggcccagggggccgaattccttgcacccgcgcgcgagctgctcgccgcgcatgatcgcgccgtcgccggactgtcgtcagcccgccgccgcttttcactggggatcgccacccacgtcggcgcccccgaacttcctaccctgctcgcccgattgaatgcacatgatcccatgctcacgatcgaggtgcgcctcgatgatgcccgtgacctgctcgacaccttcgatcgcggaatgatcgacgccgtgatcattttccgggaggacgatcgccgcgacggcgtcgttctcggccccgatcacttcggctggtttgccacgccgaactttcttcatcgcgccggagagccgtttcgattggcagcatcatcacccgcctgcggcatcctcaacaccgccacgcgtgcactcgacgcagcggcactgccgtggaccgaaaccttcctcggttgcggcgcttttgccgtcgccgatgcggtctcggcggggctagcgatctcggtgttctcacgccgggtggcgccgcccggcacaatcgaagtgaccgagaagttcggcctccccgctttgcccccatccgagatcatgctgctgtcggcgttgtcggacgccaggtcgcgcgcggccttgaagacattggcaagcgcctttcgcgagcaccatcgtccgccggcgagcgcagcggggaacacccgaaccatcgctgtcgctgccgggtcctgaacaaccagtggcgcgcaagatcgcttgccggctaacgcggcgcccggtcggcgcgccttccctcgaacagcgcgcgttccgacgcgagcgccttggcgaggaaatccagcacggcgcgcatccgcgcggtgcgcctgagatcgtcatgggtcaacagccatagcgccgatcgcggctcggcgagcggcttcgacgcaagccggcgcagcgcgggcgcgagatcgccgacatagcacggcagcagagccagccccattcccgccgccgcggcgtcgcgcagcgtcggaagcgcgtcgacgcggcaggccaagcgcgccgaaggcaggttgtcgcgcatccagccggcgatcacggttcccgccagcgcgtcatcgagtccgatccagtcatgtgcagacagatccttgccgttacgccgggcaagataggcacgcgatccgtagaccgcatgggcgatgtcggcgacgcgccgccccaccagcagctctgacggcgccggtgtcggccggaccgcgatgtcggcctcgcggcgcgtcaggttggccatcgcattcgagacgatgatctccggctcgatctccggatgcgcgcggcgcatcgcgggcagatgccgcatcagcaccgcgccgagcgtatccgtggtcgtgatgcggaccgggcccgacggcctgaggtcttgtcccgccagcctgcgctcgagcgcgagaacctcgtcttcgagccgggccgccgccgccgctgccgtctctccggccggtgtcggcgcgtaaccgtcgcggaaacgctcgaacagccgcgtcccgatcgccatttcgatcgtgccgaggcggcgaaacaccgtcgaatgcgtgacgcccagcttgcgcgcggcgcccgagaggctgccctcgcgcgcgaccgcgaggacgaggcgaaggtcattccagtcgagagcgctgtgcatatttgcaaactcatttggcagctttggataataccttatcacgagcgaacaggccatcttccggacgttggaccggcgcgccgacgatgcagaggagctggcaggtgacaagcgaaaccaccgagacgttgcaattgcacgatacgcggccggcaacggcggacccgcggcgatggctggcgctgccggtgctgctgaccggcgccttcctgccgatcctcgacttcaacgtcgtcaacctcgcgctgccggccattcgcgacgatcttggcgccacctcgagcgaggtgcagttcgtgatttcggcctatgccgcgacctatgcggtgttcctcatcacgggcggccggctcggcgatctgctcggccggcggcgcatgttcctgaccggtgtcgccggcttcacggttgcgtccgtgctgtgcggcattgcgtggtcaccgacagtgctggtcgccggacggatcctgcaaggcctcaccgccaccgtgatggcgccgcaggtgctcgcttcgatccgcgtgctttttcccgcggccgaacagggccgcgcgctcggcttctacggcgcgacgttcggccttgccaatatctgcggccaggtgctcggcggcgtgctggtctcggcgcatccgttcggcctcgcctggcaagcgatcttcctgatcaacgtgccgatcggcctcattgcgttcatcggtggcctgctgtacctcgccgactcgcgcgccgatcgtgcacagcggcttgatatcggcggcgtcgtcctgctgtcgctcacgctcggccttctggtctatccgctgatcgagggccgcgaatccggctggccggtctggatcatcgcgatgctgctggcgtctccgctgatgcttgcggctttcgtccgcttcgaggcgcggctgtccgcgcgcggcggcgatccgctggttgccctgcatctgctgcgcaacagcgacttcgtgatcgggctggtgatggcgctcgccttctacatgctgtcgtcgttctatttgaccttcgcggtctacctgcaaagcgggctgcatttttcaccgctggcggccggcctcgccaccctgccctttgcgaccggcttcttcgtgagctcgctggtgtcgtcgctggtgatgcagtggctcggcgcgcgcacgctgacccttgggttcgcgcttcaggtcatcggcttcggcatcgtgatgctgtcggtcggcggagtgctgccgcagagcgctgaattcggcctgatctgcggcgggctcggcttcggcaccgtgatgccgtcggtcatcaaggcggtgatcggcagcatcgatccgcgccatgccggattggcgtcgggcatgatgatctcgaccttccagatcggcgccgccctcggcgtcgccatcatcggcggcgtcttctatagcctgctcgggccgcatccgcaggccgatgactacgcacacgccttcaccatcgcgctcggctgcaacgtcgcgctgctggcgctcggcggctggctgtcgctatggctgccgcgcgagccggcggcttgaaccgagacgaggataattccatgaacgccacgttgtacgacgcctccgtcccggtgttccggcagatgctcgacgcgctcgccgatctgctgcataagggcgagtcccacgcccgcgagcgtggtctcgatcccgacgccatgctcgcggcgcggctggcgcccgacatgctgacgctggtcggtcaggtgcaacgggccagtgatcacgccaagggcgccgccgggcgcctcgccggcctcgagcccccgccatttgccgacattgagcagagcctcgtcgaagcccatgcccgcatttcgcgaacgctcgactatatcgacaccgttccgctgcaagcattcgaccaggcggcggaacgcatcatcacgttgccgttcggcgtcccgccaatgccggcagcgcgctatctgtacggcttcgcgctgccgagcctgttcttccacatcaccaccgcctacgccatcctgcgccatcgcggcgtgccgctcggcaagcgggatttcctcggcaactacctgtcgaactgatcgctacttcctggcgacctcgcgaagggtggtgtagacccactcggcgccctgcttgatggcctcgacgccgatcttttcgtcgttgccgtgcatccggctcaggatgtcgtcgtcgagcggatagggatagatgccgtagacgggtacgttgcgctcacgccaggcggtggcgtcggtcccggcctcgaacatggtcggcaccaggacggcgtccttccagacgcgcttggcgttgcgctccagcgcggcatagagttcggtatcgaccggcgatcccggcatcttgctccgcatcagataagcatcccgcgcctcctgctgcgtcagcgagctcacgaggctgacctcgatgccgggatcggcgaccacgtgcttgatctccgcaatcatctggtcggtcgtcgttcccggcagcagccgcgtgttcacgaccgccttggcgtcgccggggatgacattgggcttgatgccggcgtcgatcatcgtgatcaccatggtgtcgcgcagcagggcgtgcagcagcaggctgtccttgggattgtcggcgaccagcttcttgccggccgcctccagctcgccctggtcctttgcggccaacagctgcctgatatcggctgccgtctgttccgagctgatcggaagcagggccttgaaataggcttcggtcgccggcaccagcttgacggccggatcgtgcagcgccagcttggccaatgccgcgatcaggcggtcgttggccatcgcgcccgccggaaacggccgcgacgaatggccggagggaccggtcgccctcagggcgaacgtcgccgagagcttttccgccgtcgtgacattgatctggcgcaccgtgccgtcgcgctcctgcagcaaataaccgccttcgttcagcgcgaattccgcgtcgatcttgtcccaatggtccttcgccagccataccgtgctgtattgcccctgctcctcgtcggcctcggccaggaagatcacgtcgcgcgccagcggcgtcttctcctccgccagtcgcatcaccgcgctggcgaacacagcgagcccgcccttgaagtccatcgcgccgcgcccgtagacgaaaccgtccttttccacgccggcgaagggttccacggtccatttctcacgctcgaccggaacgacgtcggcatgcgcggcgagcaacaccggcttcttcgagccgtcaccgcgcagccgcgcgacgaaatgcgcggccttgccgttcggggcgacgaagatgtccacctcggcgccgagcggcgcgaactgcgacttcagatactcggcgagcgcccgcgtatcgcccgggccattcgatgtgtcgaatgagatcagcttcttgagcaacgcaaccgtccggtccccattcgggtccgcgacggcaagtccggttccaaagaggaagacaccagtggcgagcatcaaggcggcgaggttattcctggtctgcgacgtcacgtttttcttcctcccgttttggtagaccatatcctgcacggccggcgtcagggaacccttccgaacagcagtttcagcatggctgccgcgacaagagtcgtcagggcgaggccggtcgagagatagagcgcgctcgcatcgccgaaccggtcgatcacgatcgcataggccaacggcgctgccgccggcaggatgaagctcggaacgatgagccgaccgaccagcgtgccgtagctgcgatgatcgaacaggaccagcggcagcgttcctcttgtgatggtcaggatgccgttgcaggcgccgtagagcagcgcgaaggcgatcgccatctccttcgacgacccgctgaacaatcctgcgatgaaagaaagcggcatgatcaggcaagccatcagattgagcgcgagcggatcgagccgtgcgccgaacagcacctcgcagagacgcgctgcggattgcccgatgccgcggagcgtcgcgatccagaccgccacagtaacagtgagcccgaggcccgagagcaccgcgatcatgtgcgccgacatgccggcattcaggaaattggcgccggtcataatcacggcatagagtccgcccgccgtcgcaagctgccggcggctggcagcgcgtggtggcttatgtgccggcgctgcggagctcggcacaccggcaaaccgcttggtcggaatcagcaagtgcagcgggatggtcagcaacaccaagcccgcataggccaacaccgcgatgcgccagccgaactgctccgagagcgcatggccgagcggccagaacacggtggccgccagaccgccgagcagggtgatcccggacatcgcgcggcccgcctgcggcccaccgatccgggccaacgcggcgaacgccgcatcgtacagcgtcagccgcatgccgagcccgagaacgatccaggatgcgaaataggcgccgatctgatacgagaccgcgagaccggcgcagccgagcgcgttgatcacggcgcctgcgaccatgacttgacggccaccgcttctgtccacccaccttcccgcaaggggcgacgtcacccccatcaccagcagcgccgcggcgaatccgccatagacgatgtcgcgcccccaaccgcgatctgctgatatccgctcgccgaagccgccgatcagatagtaggtcgctccccacgagatcagttgagccagcccgagggcggccacgacgcggcgggcgatcaccgcggcagttctcgctccgcgggaagcgccgatgcgcccggccccagcggccgctgcatcaacacagtgtcgacccattgcccgagcttgaagccgaccgacctcagcgttccgaccatctcgaagcccatgcgacggtgcagcgcgatcgatccggcgttgccgctgttgccgatcacggccagcatctgccgcgacggcccggcctcggtgcgcgcgatcaaagccccgagcagcgccacgccgatgccgcgaccgcgcagcccatcagccacatagaccgagtcctcgatggtgtgacgataggctggccgtggccgatacgacgtcgcatagctgtagccaaccacgcggccttcgagctcggcgacgagatacggcaagcctgccgccagcacggcggtccggcggtcgcgcatctcgtcgaccgtcggcggcacttcctcgaaggttgccaatccgttgaggacgtgatgggcgtagataccctgcacgtcggtcatgtcgccgtccgctgcgtcgcggatcacgacgccgttgctgcctgccgccatcctgtcttcctgcctgagccgtcaatattgcccgagcatgcgccacggcgctatataagtgaagctttgattggttatacgatgcataagagttactttgatgaagcgccttaacctcgactatcttgaaagcttcgctgtcgtgatcgacagcggcagcttctccgccgcagccgagcggttgcagctgacccagcctgcggtgagcctgcaggtgcgccagctcgaaaagagcctgaacgcgaccttgatcgagcgggtcggacgacgggccaggccgaccgccgccggcgccgccttgctctcgcacgcgcatcagatcaacgccgcggtgagttcggcggtcgacgccgtcgcgcagcagaccacgggaacggccggccgtgtacggctcggcactggcgcgaccgcctgcatcttcttgctgccgccgatcctgaaggagttgcgcactgcattgccgtcgctcgagatcacggtgacgaccggcaacacggcagagatcgcgcgggcggtcgaggacaacacgatcgacgtcgcgctggtgacgctgccggtgtcgggacgcagcttcgagatcacgccgatcatggacgacgagttcgtgctgatcgcgccgcgcgacatgaagctgccggcgcggatcacaccgcaggtgctcgcgagcgggccggtactgctgttcgagcccggtggcaacaccaggcgcaccgccgacgaatggctggcgcgcggcggcgtgtcgctgaagccgctgatgtcactcggcagcgtcgaggcgatcaaggagatggtccgcgccggccttggctgcgcaattctgccccgcatggcagtccccgcgagggccgagcagcacgacctgatcgtccggtcgctgtcgcccaagctctaccgccggctcgcggtcgtgatccgccgcgacaagcgcctcgaccgcgggctgcggcagacgctgtcggcgctgaaggcgctctctgcaaagagcagctagggaggacgcggcgtgtcctccctgctcgcccccatcacgtggcgttgcgctcctgctccgcgatcttgcggaacgcggcctcgccggcatcggtgaccgccgcccacttcgcattcggcgcggcctcggcctcgtaattgtcgtgccagttccaccatttgtaggtcgggccctgcggatagcccttcggcgagtcctcccagagctcctggcggccgaacggggtgatgtcgagatagctccacaccgtgcccatcgattcatcgccccggctgttgacgagatacgtgcggaagatccgttcgccgtcgcggatgaagacgttatggccgtgccactcggcaacgccgaaatcagcgtcgaaactgtcggtgatcgtgtaccacggcatctcccactccatccgcgccttcagccgcgcgatgtcggcttgcggcgcgcgcgaggcgtaggccagcgtggtgtcgcgctggttgagatgcgagagatggctgacctgatcggcgccgagcgagcagccgcggcagccgtgatccggccagccgaacacgccgggctcgaagaacgcgcggtagacgatcagctgccggcggccttcgaacaggtcgagcaggctcgccttgccattcggtccctcgaacacatacggcttctcgaccgccatccagggcatccgccgccgctcggcggcaagcgcgtcgcgcgcgcgcacctgcgccttttccttcaccagcagttccaggcgcgccgcctcccatgcctcgcgcgacaccacgggcggcgtctgcattgccgccagcccgcagcgatcgttttcagccgatttgctcatgatgatctccatatttcgaattggacgaaccccggcaccactgcgcagttccattgctggcggccgttcgtcattggccatgccgcaatctggcgcggcggcaggcgatggtgggagtgacaagtgtgtcgggattctcgcgcatgcgatccgtcgatcgccgatctcgttgcataatgcttgcactatgcaattatctgtgagaacctgaggccatgaaacagacggcccacgctgccgaagatggcctgaagctgagcagctggctgccttatcgcctgttccttgtcgcggcccaggtcgcccgtccgctcgagagtttctacagcgagacgttcggactgagccaggccggctggcgcatcctcgccgtcatcgccgaacgcgaagccgccaatgccgcggagatcggccgcgcctgcgcgctcgatccgttcgcgaccagccgcggtatcggccagctcaaggagctcggctttgcggtccgacgtgccggcaaatccgatcgccgcttcgccgccgtcagcatcacccgcagcggccggactgccttcaaccgcatcgcctcactcggcagcgcgatcgaggcgcggctgctggcccgcctgtcgcagagcgagcgaacgacactcgattccgcactcacccggctcgagggcgagagcgcgcggatcgacgcgggtggctggcgcgcgctgctcgacgacaccggcgcaccatgacggccgcgttgttcgcgttgaccgcactgctctggggcggcggcgcgctggcaaccgcgatgcaagcgggcgtgacaccggcgccatggtcggtcgccctgcgcatggtgctggcaggtgctatcctgttcggctacggccggctgcgcggcgtgccgctcgcgatcccgcgccaggaccggccggcggtcgcgttgcagggcctgctgttcttcgcgatcgccttcatctccttctatgaagcggccgcgcgcatgccaagcgggctggcggccctggtgctctcgacatcgtcgctgttcgcagccgtgatcgcgcgcgccgcgctcgacgtcccgatctcctccggcttcgtctggggcgcgctgtgcggcatcctcggacttgcgatcatcttcctgccaggcgtcaccgcacagggaactgcgtcgctggcgggtttcgcctgggcgctcaccgccgcgatcgcaaccggcgccgggacgacggtcggtgcgcgcaaccagcgcgccggacttcccgtggtctccgtgctggcctggggcgccttcgtcggcgccgccgcgagcgcgctgtgggcgatcgcgacgcgcgcgccattcgcggccgacttctcgctctcctacgcagcgagctttctctatcttgccgtcgccgcgtcctgcatcaccttcatgctctacttcgagctggtgagccggctcggccccggccgcgccgcctacacgctggccctggtgccgctggtcgcgctcgtactgtcggcgctgttcgagcacctcgcgctgggctggccggtgctcgccggcgccgccgcgatcctggccggcaatgtgctggtgctggcgcgagcgtagattgcggcgcccggtcgcgccgccatcgcaattgacgcgcggcatatatctgactaaagtcagatatatgctcgaccccgttgcccgcgtccgccgcttcaaccgtgccgtcacacgcgccgtcggcgcgctcgacagctcgttcctcggccgcggccggccgctcggggcggcgcgcgtgctgaacgcgatcgggcatgggcgcactgacgtgggcgagatcagggattacctcgggctcgattccggccttatgagccggttgctgcgcagcctcgaggacgaggacctgatcacgaccgcggcacatggcgacgatgcgcgccgccgcatcgcaaagctcacttcggccggcaagcgcgagttcaacgcctacgaggcgctctccaaccggcaggcgaccgacttccttggccaccacacccaacgcgaggcgctactggcggcgatggatctgatcgcctcggcgctcggacgcgacggcacgtcgctggatgagatcgacccgcggagcgaggaggcgcgctattgcctcggcgagtattacgccgagttggcgcggcgcttcaaacagggctttgacgtcaagctgtcgcgcgacccggaggccaaggacatggtgcgcccgcgcggcagcttcatcgtggcgatgtcggacggcctgccgctcggctgcgtcgggctgaaaggtggtggccgcgaatacgcggagatcaagcggctgtgggtcgcacccgccgcgcgcggcctcggcatcggccgccgcctgatggacgcggccgaacatgccgcgcgcgagctcggcatcgcactgctgcggctcgacaccaacagcgcgctggcggaggccggccagctctaccgccgaaccggctggaccgagatcccgcgcttcaacgacgacccctaccccgatctgttcttcgaaaaacatctctgagcagggcgccgggtgcggggttgccatgttgtccggcgcgatgtgctggcctaagacaccgggatgaccatttgccccatcgtccgctatcccgatccacggctggcgctgcccgccgagccggtgaccctgttcgacgacgcgctgcgcgagctggcgcaggacctgctcgagaccatgcgcgccgcgcccggcatcggcatcaccgcgccgcatatcggcgtggcgctgcgcgtcgtggtgctcgagctcgacgcgcgtgaggggccgcggacctatgtcaatccggagatcatcaccgcctcggacgcgatgatcctgcacaaggagggcagcgtctcgatgcccggcgtcaccgacgaggtcgaacgccatgcgcgaatccgcatccgttatcaggacaccgacggcaacgcgcagaccgaggagtccgacggcctgcgcgcggtctgccatcagcacgagatcgatcagctcgatggcatgttctggatcaggcggctgtcgcggttgaagcgggagcgcctgatcaagcggttcgagaagatgtcgcgcggttaagccgacttcaccctcccgccatcagatccttcgccagcgccatgtaggccggcagcgtcaccggatcgttggcggcattgccggccatcgggtgcgaggcgtagcgcgcgatcaccatctcggccctgggatcgatgtagattccctggccgtgcacgccgcgcgccatgaaggcgccatgcgcattgtgcgtcacccaccattggttgcggtaggaggcgccgggcagcgtggtgtagccggccggcttgaacttctcgggatcgccgccgcgcgcgatgtcctcgaccacttgcgacggcacgatctggcggccattgaagcggccgtggttgcggatggtctcgccgaagcgggccagatcgcgcagcgtggtcgacagcccgccgccgccgctttcggtgccgatgcggtcgacgtgatagtgcgcgtcctcctccgcgcccatcggcgcccagatccgctcggacagcagatccgacaatttcatgccgctggcgcgcctgatgatccaggccagcacgtcggtgttgacggtcttgtaagcgaaggccttgccgtgctcgccctgcttctgctgcgcgcggaggaaatcgaagatggtggtcgcgccctcatagcccggcggtatcggcgccatgccgttggcgcggcgcagcccccagacgtcggaattcttgtcagtatagacctcggtgtatttcaagcccgtagtcatatccatgacatcatgcacgcgagcatcgccgaacgcgctggccttcagctccggcacatagtcggtgaccggcgcctgcggatcgatcttgccctcggcgatcaggatgccggcgagcgtgccggtgaacgatttggtcaccgacatcgcgatatgcggcttgtgcggcttcaacgcgccgaaatagcgctcgtagatcagtctgccccggtgcagcacggcgatgccgtcggcgtagctgtcctcgagcatgcgcgcaaaagtctgcggccggccgtccatcgtcaccgacgccgacgcgccgatgtcgtgatcttcgcgcggcagcacggacgccggccctgccccgcgccagacgttcaccgtcggcaccagctggcggatgttgctccaggcccagcgcagctcggggaagctgcggaacgagccgttctggaaggtgatggtcttgtcctgcggcggcggaaagccctgcatccagccgagctcgttcggatcggtctcggcggcggtgagagtttgctgctgattggcggctgcgacggacatcaaggttggctccagggctgcaatacgaatttcgtatcacgcgcgggctacgaccacatcccgcgtttgcgccgggggtgatcgtcgccgcgagcgcatgccggcgccaggatttccggcacatggattaccctgcggccgcccgctcgatcgcggcgatgtcgatgttcttcatcgtcatcatcgcctccatcgcgcgccgcccggcggcgcgatcggcgccgttgatcagttcgagcagccgcagcggcgtgatctgccaggtgaagccccaacgatcccggcaccagccgcacggcaattccgcgccgccgttggtcgtcaccgcgttccagtagcggtcggtctcctcctggctgtcggtcagcaccatgaaactgaccgcctcgttcggcacgtagttggaaccgccgttcagcccgacgaagcggcggccgagcacggtgaactcgaccgtcaattcgtcgccctgcccgatgcccgggatcggcgagacatgccccgcatcaacgtggctgtcgggaaaggtcgcggcgtaaaactccgccgcttcgcgcgccttgccctggtcgaaccacaggcatgtgacgagatcggtcatgtgcggtctccttgtttgcgcggaggacgattggcgacgacggcaaccgacaggccgacgaaaataatcgcgggaaatccgtttgtcgcaacaccgcctctacgtgcaccactgtcgtcctggcgaaggccaggacgacggcggtggatcaagctcctcagtcgcgcgatacggacaatcccgcgagcagcggcgcgtacgcggcgagcctgcgcgatacgaactccgtgaacagccgcacgcgcttggtcttgcgtgtctctccctgggtgaggagccagagcgtgccatgcatgtgcaggtcggtgcccggcaccctcgccagcagggggtcggcgtccccggcgaagcacggcagtgtcgtcatcccgagcccttgccgaacggcagcgatctgcgcctcaccgtccgtggtcctgaatggaacccccgcggtacgaacctcaccctcgcgggcccagtccgggatgccatgcatgctgatgacgatccacctgacgggatcaggcgcgcccgcgcgccacgcggccagtcgatcgcgcgacatgtagacgccgccgaacagatccggccccttcaggccgtgaagattgagcggcagggtcttgcggtcgtagacgacacggatcgcgacgtcggcctctcgattggtcagattcgccagctcgcctgacgacaggatttccatctcgatgtccgggtgcaaacgcgcgaaatcggcgaaatccggcatcagcaggtgtgtcgcgagggtcggtgccagcgtcacccgcagaagcccgcgcacgccctggtcgcgaccgaagacgcgcgtctgcagctggtgcgacgacgcatccatctggtccgcgaactcgaggacctcttcgcccgcagccgtcagccggtagcccgaaggcagcttttcgaacatctgcgccccgagacgctcctcgagctgggcgatgcgtcgcagcacggtcgagtgattcaccccgaggtgctcggcggcagcccgcaccgagccgccgcgcgcgacggcaagaaaatagcgaacgtcatcccagtcgatcatggtgcaatccggcaccgcatggtgcgccttccaagcccgcatctaacacatcgaacggcaatacgggcggccatcatagcctatgccgacgagcgcggcccggttccgagccgcagataccaatcgtcacgactggcgtcagtcgtccagccggatcgatttcgcaccaccgatgtgcgcgcttccgcactcaacgcctgactgcggcggacccatgttggcgttctcgggggcatccccgaacgaaggcgaagctcgaaggagaagtcatgggaaagcttgaaggtaaggttgcagtcgtcacaggtggatcgagcggcatggcgctggcgagcgccaagcggttcgtcgaagaaggcgcctatgttttcatcacgggccggaggcaggagacgctcgacgcggccgtcaggctgatcggccggaacgtgacgggcgtgcgcggcgacgcggccaatctcgacgacctcgaccgcctgttcgatacggtgaagcgggaaaagggcaggatcgacgtcctgtacgcgagcgccggcatcggcgaagccgtcccattgggcgagatcagcgagcagcatttcgatgcggccttcggcctgaatgcgcgcggcacgctgttcacggttcagaaggcgttgccgctgttcaacgacggcggatcgatcttcatgaccgggtcagttgcctcggtgaagggttttcctggttacggcgtgtatgcggcgagcaaggcggcattgcgctcattcgcgcgcacctggctcaacgaactgaagggcaggaatatccgggtgaacgtgctgagcccggggccgatcgccacaccgatgcaggaccaggtcctcaccgaagaggcgaagcggatgttcgaatccctgatcccgcggggaacgatggggcgtcccgaggaaattgccgcggccgcgctgttccttgcttctgacgagtccagcttcgtgaatggggtggagctgtctgtcgacggcggcttctcagccatttgaaggcggacaatcaatatcaacacggatcggagaagcatcatgagctacgcgattataggattcggcaagatcggccaggctcttgccaaggcgttcgcccgcaagaacatcgacgtgaccgtcgcaagccgccggccgcccgaggcgttggcgccgcaggcccaggcgatcggccccacggttgtcgccagatcgctgcgggacgcactcgcggccgacacgatcatcctggctgtcccgttcgaggagcatcgcgaggtcgcgaaggcgctgccggactggcaaggtaagacggtgatcgacgcgatgaacgcgttgcttccgcctgaggagcttgacggtcttccgtcctccgccttcgccgcgaaggcgttcgccggcgccagttacgtgaagggcttcaatcacctgattgcggcgaagctcgctgccgatccgatcgtcgagggcggccaccgggtggtctttctgtctggtgacgacgacgacacgatcgcccccgtggcggccctggcgaagcaactcgggttcgcacccgtcaagctcggaaagttcaacgagggtggcgcgctcgtgcacgcacgcggccgcgtttggggcccgctcatcttccaggatttgttcaagaaggagccgtgatcggcgtatgggcgccattcgaagtgtggcgagacgccctgcccgcgcaggataaacagcgcgcagttcggttcaacggtttcaaacagcgtcagatatgacacggcgtgctcttgaccagccctgtgcgctcggccaactcagccaaggtcaaggcgctgtcgccccgacgaaaggccgtcaagactgctagcgcccgttcggccgctgatacccccttgagtgcgggcggcttcttctcgctctgtctcgccatctcaaatcctcatctttgcttctcctacgtcattctcgtaccggtttgaagggcgatgtccgcgcagttgagagcgtcgaggcgaaacctgctgaggagacagccggcagaggccgcggactgcgcccgagaagattgcaattttcattcagcacggctggaagagcgccgtgtcggggcggtacgcgcaacgacggcagcgtcctattgctgagaccagccccgcccttttggcgatcaggtacgccgcagtactccgccagcgaaaagcgcgtggaaccccgacctcgatcagtctaagccagtgcgcgatcttcagcgtctgcaacgaagccgaagcaagatcatcaagaagtttggattacaccatgaccacgcccatcgctcacttgcctccccgcgtcagatactgagggccgctgagcgccgagagctgtcgctcgggtggggcagctaacgaccaacgacccagctctatatccgaagagagcatagcgacgagcttagctcctaggacttaccaacgtccgccgccccggcacgaagaaacaggctaacgctggcaagtagaggcggtactatgaagcaccacacgctgaacttcgcgtacagcaaggccgcacccgcgcaaccaaccgcgaacgctacgatattgattgacatgcgcgccaatcgactctcgggcgcgcctgcatccggcttgggcccctgcagcatgtccgcaagatcaatcatcacctgcgtcgtcgttccggtcatcaatgttgacggaggtgcgctgcccagatgaatacggtgagccgcattctgaatagccatggcggcgaccagcaccatacccgtgaagactgccggcccggcgtcgccgttggtgaagggcccgaaatgaatcgcgagcaccgcaccgatgagcaggagcgcaaacttaaccccaagaaccaccttcagcgccggcaaccggcgccgcaacaacgcgctgctgagcagtcgtgcaaggatgacaacgaggcagaacaccggcagcgcaagcagcttggctacagcgcctgacgtgccgagcaccagcgatgcgccgagcgtcacgaagtttccggtgacatgcgcggtgaacaagccttgcagggcaagaaaaccggccgtgtcgacgtatcccgcgttgaggctgagcaccagcggtagcagcggacgaaacaggtctcgggtcatgaacgttccttacagcccatatttgagctcgatgccgagatagttgctgtcatggccgccagcgcgcaagatggtatcgccgaccttgtagtgcacggcctcgaccgcgccggtgagatgcgcgtcgaaccggtagtcggcccgcaattgcgcgtagacgccggaccatgccgagcccgtacccgcagtgttggccacagggatattcggctgcacgtagatcgcatcagctgtggtttcgcgccactgcagccccgccgcaaccatgatggacaatgctgccacaggattcaccgtgagcgacggcttgagatggatcagattggtgtagccggtaaatccggccaatgtgaagtagtagccgttgggaaacaatgggttgaacgtgccgataatgttatcgccgggatgatgatcgccggacgccgcgtcgaactgcagtcctatccgcggattccatgcggcctgttcgaacgtatagccggcgcgcgctccgacgccccaggcccggatgtccttggcgccgaccgtgccgagttggcccattccctcgagatcccagtcgatttgctgccacttgccggcgaagcgagcgtcgaagacgtgacgtttctcgtcgccgcgggcgtcaaggaaacggacattgtctcgtccgtagtaagaatagtacgcggagagctcgtccttgccgaataccagccgctccacacgcagcgtgtgaaagcgaaaatgactgtttgatgtgtcgtcgaatggatgaacgtcatagtactgcaccggctgactgacgaagccgatgaagcgccattgtccggtctcccaatccgcccaggcggcatcgaatgactgacgtacgttcggtccgtcgcgagatgacacgaagcgttgcagatcgaaggcgaagtcctgacggccgacccgcgctttgaacgtaccatcggcggtcgcattgacgtaggcaagataggcgagccgcaggtcgacccggtcctgatcgactggcgtgatcacattcttgtcgaaggcgcggtcatcctcgaactgcagaaacatctgccaatgctcgtcgaagtgaaaatcggcgtgcagttgcaggcgctggatcagatagttgtcggccttgttgccactcgtgccgaacgcgttcgcgtcaacgtgttcgaagcgttcgcgcagcgtcatacccagcgagacgaagctcttgggatcgccaggcatgagcggaatgtacttgatcggatcgaagaaatcggttcggagcgcggggttggccagcacagaccagtcctcttgccagcggttcatcccgattgtgggccgcaccggcgtcgcatcgtcagccaacgccggcatggcacagagacaggcggcgagccccgccgccatgtcaacaagtctgttcgcctttgccctcacaatcgacacatgcctcaccgttcgcggctccgacgaagctaaaggccgccgtcgtactgcgctgcagaacgaacgctcctatttagccgcggcgtggatttcggcgacatagccgcccggaaatttaatcatcgccgattggcggtggtccgcaacgaaaggctcgaccagcaccgtcgcacccgccgcctttgccttgccgatggtttcacccagatcggtcacttcatacccggtcagttcgcggccgtaggggtacggcaagtgcccgtcggtggcgaccactgtcaccttgccaaatgccgattcaacgcggatgcgccgataggtatcgtttggacggccaatctcgatccccggagcgcgggtttcgtctgacagtttcttgccttgggagaaccgcaggaagctgcgcacgaaggcgtcagcgcggtctcgcgagacgtagacccggttctccggaacggtctggaacgcggcatagtttggcttcgtcgtgtgccaatatagctgcatgttgacgccacccggccactggatcaccacgtcgcgcccgatcggatcgggaaagggtgcaaccagcacatccgcaccagccgcctgcgccgccttcacggcggcatcaatgtcagtgaccaggtatccggtgcgctcggcgccgaacgggtacggaatcggcgtcttgaagccaaacagcgagaccgtaccaaccggcgtctgcaggagctgtgacgtcgcgctactcggcgtcggcgtcacggtcgctacaacctgcttggtgctctgaccgccgaaggtcgccaggaagctttgcacgaacttgtcgacgtcctcgaacgcgacatagacatgggtcgtgtcatattgcggtgcgacaccgtagaccgtacggggagccgcctcgcgcgcgtgcgcgatctgcggtagcgacaagcatgctgcaaacatcaggctagcaagggttttggacgagatcacgaggcacctcctcaaggcaaagtcgaaagcggatcggatcacgcaggccgattcttggacgcaatcatagcgaccaaaatcaatcccgcgatcaagccgagatgttcgaaaaacgcgttaagcgccatgaagcgcggatgaccatcaagggcccagaagttgttcgccgtcagcattgccacagccgtcagcacgcccaagccgcctgcgccgaaccagacccagcgaccggccagcaccagagccgagccgcccagttcgacgatgatggcaaggcttgcccacagccaacccggacgcagcgcgaaatgctcctgctcggcgatcgcaccgctgaagtcgagcaacttcgtaacccctccgatcaggaaggccgacaccagcgcgaggcgcaccacaggccagagccacggccagcctagaatgccgcgaatcagccgcggcgtatcgacatgggtgggcatgtcagaccgcccagcaggcgcagccaagcgcgccccagaacgacttgaggtcggacgccggaatccggctcgtccaggcccgggcgtgatcatggccatgcaccgaacattggctcgcacagttgcaggcgctgaacgccatccgtgacgcggtcgtcgcttgctgatccgaggctccccaggcggcgtaaccgccaaagctgcgaaccggcgaccagtccggcattgccggcggcgggacggcttcgtcgagcgacttgaagtcgccggcgccatagaccaccttgccgccaacgatggtgagatcgctcgccatatcggcgatttcggcctcggcgcaggagaagtagtcgcggtcgggcacgatcagatcggcgaaatgccccacctggatgcgccctttcctgccctcctcgttggaaaaccaggtgacgttctcggtccacatcctgagtgccgtttcgcggtccaggcagttgcgttgcggcgtgatgcgaagcccgccgaccgtcttgccggtgacaagccacgcaagtgagacccagggattataggaagcaacacgggtcgcgtcggtgccggccgacaccttgactcccttgtcgatgatctttttgaccggcggcgtggcctctgccgcaccaaacccgtaacgctcgacaaaatactcgccctgataggccatgcgatgctgcacggcgataccaccgccgagcgccgcgatgcggtcgatagactggtcggagatggtttcggcgtgatcgaagaaccagtgcaggccgtcaagcggcatgtcctgattgaccctctcgaacacatcgagcgcacgcgaaatcgtctcgtcataggtcgcatgcagccgccacggccatctgttctggacgagcacacggacgacctcttccaattcgccttccatctcgggtggcatgtccggtcgtgcgacgcgaaaatcctcgaaatcggccgccgagaacaccagcatctcgcccgcgccgttgtggcggaaataatccgtaccctgcttgtacttagaggtccgggtccagttcaggaagtcgtccttctcgccctttggcttctgggtgaacaggttgtacgcaaggcggatcgtgagctgtccctgatccgacagttgctggatgactgcgtaatcctctggatagttctggaatccgccgcccgcatcgatcgcgccggtgacaccgagccgattgagctcgcgcatgaaatggcgggtcgaattgacctggtagtcgaacggcagcttgggcccctttgccagcgtcgcatacaggatgttggcgttcggcttcgccaatagcagcccggttgggttgcccctggcgtcgcgcgtgatttcgccccccggcggctccggcgtctcctttgtgtaaccgacagcgcgcagcgcggccgcattcagcatcgcccggtcgtaaaggtgcaggatgaagaccggcgtgtccggtgctaccgcattgagctcgtcaatggtcggcaagcgcttctcggcgaactggtgctcggtgaacccaccgacgacccgcacccattgcggcggtggcgtgatcgcgacctgcctcttaagcatggacatcgcgtcggcgagcgaccgaacaccgtcccagcgcagctccatgttgaagttgaggccgccccggatgatatggagatgattgtcgatcagcccgggcagaacacggcgccccttgaggtcgataatccttgtttccggaccggcaagcttcatgacgtcatgatcgcgccccacggcggtgaacaggccgtccttaatcgcaaccgcgctcgcagtcggattcgatcgatcaagcgtcgtgaagagaccgctatggaaaatcgtgtcaggagcgctcatgaggtcttctccgcggtgtccgtggtagccttgccctcgccggcgtgccgcccgggcagcattccgaacatgtgaggcgcgcacttcgcttgccgccatgcagccgcaaggccttcgcccgtcatcatctgcctggcgacgggcacgatctgctcaccggctagaatgccgagcaatccgaccagcgccaccaagggtggcgccggggagcgcacgttgagaagactgtagatgacgccgaccaggaggcctgcaccaagcgacaacaggtagattctcatgtagctcgctccccggcgtgcgtcgccttaatgtccttccgacgcaccgaacatggacttggcgtaaatgatgccgaggccgtaggcgccgccgtgccgcttcgcgatccctgtggtcatctcgtaggtttcggttcgcgcccagtctcgttgcagttcgagcagatactgcaacgacgtcatcggccggacgcccgcctgaatcatgcgctccatggcgcgttcatgggcttccgttgagacatcaccgcaggcgtccgcgatggcatagacctcaaatccctggtcgagcgcggacagcgtcggtccaacgatgcaaaccgaagtccagaggccggcaaacaccaggcggttcttgccgatccggttgacctccttgatgacattttcgtcttcccaggtattcatggaggtgcggtcgatcatcttctggccgccaaaggccgaaacgatctcgccgaacatcggcccggagaagctcttttcggcaaccgtcgtgagaatggcgggcaccttgaagccggccgcggcttccgagatcagcgcagcattggtgcgaagattgaccgcgtcgatcgacttggttgcgaacgacatctgagactgaaaatcgatcaggatcagagcgtgattgctgggactgagcagcccttttccgggagtcgctttggcattgatcgacatgatggctccttttcgtttggaaggtttggttggggctcgccgcctcgctgacgctcaagtcagcgaggcgatggtcgcgccagatgatgggaagcgtcgccaggcgaggaagccgagaacgccgaagaggacgagcccggcgacttgcgcgaccgcgaaaggcggttcgctttgcgttggtgccaaagcatgcaagatcgtgatcttttggaacgactgcgcgattgccacgaagacgttgagatagagcgcggcaacggcgcaaatcacataaaccgaacaccacgcgccgcggagcgcaaacagatagaggccagcgcccgcggcaatgagcaggcaaagcaagatcgcccccacgatccgtggcggatccagaccgaacggcgccagcggaaatccggtcacgcccgtcaacaaggtcgtcgccaggaagattgcggtccagcccccgagatagcggccaccgatcattccaagcaccgtcacaaggccggtcagaatgccgatcaagctcagcgcgacgtggatttggaggaagatagacgtcggaatgccccaggtcacttcgaaactcccgggttttcgatcaggctttgaagaatgcgagcatgtcggcgttgatggtcgccgcctcggtcgtcggcatgccgtgcgggaagcccgcgtatgtcttcaacgttccgttcttgagaagcctggccgagagcggccccgagcccgcgtaaggcacgatctggtcgtcgtcgccgtgcatgacgagcacagggacgttgatcttcttgagatcctcggtgaagtccgtttgcgagaacgcgacgatgccatcgtagtgagctttcgcgcctcccatcatgccttgacgccaccagttctggataacggcctctgaaggcctggcgccggaccggttgtagccgtagaacggtcccgccgcgacgtcgcggtagaactgcgagcgattggcggcgacctgcgcctggaagttgtcgaaaacctctttcgggaggccgcccggattttcctgcgtcttcaccatcagcggcgggacggccgcgatcatgaccgccttggcagccctgctctcgccatgacgagccaggtaacgcacgacctctccaccgccggtggagtgcccgacatggatggcgttcttcagatccagatgcgacgtcaatgcagcgagatcatccgcatagtgatccatgtcgtgaccgtcagcgacctgggtcgaccggccgtgaccacggcgatcatgggcgatgacgcgatagccgtggctgaggaagaacagcatctgggcgtcccagtcgtccgacgacagcggccagccgtggctgaatacgattggttgccccgaaccccagtccttgtaaaagatttcgacctgatcgttggtcttgatggtcggcatcgtcggtccccaatccgcccttgacggtctcgacgatcgttagtcgtggcgcgcccacgtggcgaataaatcgttccaaaaaccccctcgcgacgtttggccgaagccacatcatcctttcgtctagtttttggaaatttttatttggccgcgatgatccgtcgcgggagacttggtcgtctcaaacgtgtgcggaagcgatgaacggcaatctggctcagttcggtgaggatctgcgcctgcacttgcttcgcttgcaggcaagcctcaacaacatcaaccggctcttctctgaaagtaaggccgcccaccacgtggaattttccggccggctagacgagctacgcgcgacggcgaaggattcggcggagcgaacgaatatccttcgagaagctctcgccggcggcctcgatcgagagatggcgctctcatccgagacggtgtcgaggtgggtgagcaagcgacagacctcacagcttcacgctcgggcggatctaatcgaacaactggcggcgacggccgtcgaattggcaaccctctcgacgctcgaagccgagcgtatcgccatgacggcgatcctggcgcgccggcaggccgtaaccgtccagatccagggcgacggggggcgataacgagccgatcccggaccattggacagactcccttctgcagcgtatgggggtactccatgctaccgacggcctaaagaatgcctgctgccaaagaccgcccagaacgtacgttcctcttcgggcccttccgcctgtcgacctccacacgtgtactccacgagggcgagcgcgtcgtccgattgggcggcaaggcgatcgaaatcctgatcgcgctcgtcgagcgtgcgggcgagctggtaagcaagaacgatctcattgccatcgcctggcccgatacttttgtagtcgaggcgaatctgacggtgcaggtcgccgccctgcgccgcgcgctgggcgaagacgacacggcgaaccagtacatcgtgaacagcccgggaaagggctatcgcttcgtggcgcctatcaagttggtcgagacggacactcccatcgcgagctcaccgatcaatcgcccgacgcacaacctcccggcgcagctgatccgcctcgtcggacgagcggatgcactggaatcgatgcagcgcaagctggaaggcaatcgcctcctgagcattgttggcccgcccggaatcggcaagacttcggttgcactgcggctggccgaaacgctcctgactgagttcagccacggggtctggcttgttgatctgagctccgtcgccagcccttcgttgattccaagcgcgcttgcttccgcccttcccgtggatatccgctccagcgacactctgtccggtcttgccgcggccgtgcgctacaagaacctgctcctggttttcgacaattgcgagcatctgatcgacggcgtcgcggctgcgatcggcgaactgctccgcagcgcgagcgggatcaagatcctcacgacgagccgcgaaacgctgcgtatcgagggcgagcaagtctaccggctcccttccctggatgtgccccctgcgaccagatcactcggcccgaacgaggcgctcagctatccggcgatccaattgttcgtcgagcgtgcagctgccatcgtcaatgatttcgaacttacggacaccaacgcagtcttcgcggcacagatctgccgcgaactggacggaaacccgctggcgatcgaggttgccgccgcgcgcgtagatgcattcggcgtccaggggctggcggcgaggatcgacgaccgcatgcatttgctcggtgacacgcatcggggaacgtccgagcggcaccgcaccatcgcgacggcgctcgaatggagttatcaactgctcagcgaaagcgagcgatacatcttccgatgcctgggaattttcgccggcagcttcacgcttgaggccgcagtaagcatcattcccgcaacaagcgatgcggatacggcatccattctggccgatctggtctgcaaatcgcttgtctctgtcgacatcggctcttccattgccagatttcgattgttggaaattacgaaggcgttcgcgctcgccaaactgatcgatcaatcggagcgaggcacgctcgcaacgcggctggcgtcctgcgtgacggaaatgcttcgaaagtgcgccttgggaccacaccaggtgcaaaccgctcgggacgcggtgcacgaactcgacaacgttcgtggcattctgagctgggctttctcgcccaatggcgatagacgattgggcgtcgcgcttgctgccgcagccgtgccggtgtggctggaaaactcgcttcttacggagtgtgtcgcctggacgaccaacgcaatcgacacgctcgaaccgggcgtcgatgccgagcgggacgagatgttgttaaaggctgccttcggtctcgccgtgatgtacaccgaaggcatgacaggccaatcgcgtgatgctctgaaccgcgcgatcgacatcgcgagaagcctgggcgacgtggcgtgggagctcaggggccgccttggtctcatcctgttcatgcatcggcgtggcgacctcaaaggcgctctggaaggaatgacgaggatcgagcggctcgtcgccgacgtcaaagagccgacggcactcgcgatgatgaagagcgtcaagagcgcatcgctctattttggcgctcagtatccggacgctatgaagctcgcacgcgaagcccatgtctatttccagacccataccgatgcttcgcagatcgcccgttggggcttgaaccactcggtctacgcgcaatgcgtgatagcgggcgtccattggtgcgaggggcggtttgatcagactgtacgtgcctgtgtggccgcgcatgaagacgcggaggaaaccggaaatccggcatcgatctgccaggctctcagctggtgtggctgcaaccttttcctcagactggaggagctacagcttgccgagatcgcaattcatagaatgaagcaggtcgcgcaggacaacgacatccaaagctacctgctttcggccattgggtttgagggcaggctgctgtttcttaagggagaattccgcttggcggagcgacaattgcgagaggcggtgtcgaagttgggcgacgtacgctatggaaatgttgcagtcccgttcctcgggcgcctggcggaagttctcgcggctgacgaccgtccagaagaagcggttctggtgtcggcggaatcgctcgatagaataagggcgaccgaagcgctctggcagctacctgatgcacttcgcatccacggcacgactttgctctcgctcgagggaatcaaatcagaagcggcggaacgccactttcgcgaagcgatcgctatctcgcaatatcagggagctctcggccacgagctcaaagcgacggagagtttggccgaaatgcttcgccatcaaggcaggatcggcgaagcctcggcaaggctcgatgatgccctcgggaaattcgccgagggatttggtaccacgccgtaccgacgggccaaagccttgctcgacgaaatgggtggcagcggcgcgcacggttaggccgacaacgggccgatgccagattgatcgtcggccgcacgctttctcatcgatcgattgtcacttccttcggcgaatcgcgcggtcgaatacaatcttcaccgaccgcaggcgcatccacatacggaaagcgcagcgctcctgaagcacagtccggagtcgacaccacgacttgccgcaatccgttgcggaactggccgacctcatggtgataggaggcgagcgcgatcgcacgcaatgcctcctgccgaacgccatgctcgtgcatgtagcgctgcacccgcatcgcaaaccgctgcggcggcgccagcacaccgtaaggcatcaaataggatcgttcgcccgaaacggtgtggatgccagccgcctgcccgaaccgcccatactggccctgcgccagcgagcggaacaccacgacacaatccgccaggcccacgacgatcgaggccgccgcgtgggcaaccgccgcgcagcatccaccgccgccgccaccccattgcatcgtcgccgtgcgcaattggcgcgtgcccagcgccgcggccaaccgcgacgcctcgctgcgatcgtcgctgtaggaggagaacccgtcgatctcgcggggatcgagcccggcatccgcgcacgccgccagaatggttttcagcgccagcttgaactccggatcgggagacgcgccatggcgataatagtcggtctcgccgatcccgatgaccgcgacccggccccgcagcgtccgctcgcgtcacgcgcgcaccgtcacggtttggtatcctccttgaccgcctctcgcgatggctggctgccgaaagcaccgcccgccgccagctgcgcaatgcgcgcgtcgtcatagccgagcagctcacgcagcacgtcttcggtatgctggccgacggccggcgccgcgacgggatcgacgatcggcgtccgcgaatagcggatcggcaggttgacattcggcacccagcccaccgtctcgtgcgggatccttgtgacgatcccgcgctcccttgcctccggcgagcggatcgcctcggtgacgctccgcacctggccgcagggcacgccagccgcccgcatccgcgcctgccagtgcgaccagggctgccgggcgaaggcatcgccgagaattgcgaacagttcctcgcgccggcggattcgatcggggccggttgcgtagatctcagccgccgcaagatcttcacgctcgagcacctgcgccatcaggcgatgaaagatcttgtcattgccgcagttgatatagaacgaacaatcgctcgccaggaacacgccagacggacaggtgtccgggctggtgttgccgcttcgccttggatccgcattattgaacagcgactgcatcgtcgcgtagccggtcatcaggacggcattctcgaacagcgacacctcgatggcttggccctgcccgctgcgctcgcgcgcgaacaacgcgccgaggatcgcattgctggccatcatcgcggtgctgatgtccatcaccggcgatagggcccgcacaccctcccggtcggcatagccgttcattgacacgaagccgctctcgacctgcgcaatcggatcgaagccgagccggtcggagaacgccccgtcacggccataggcggacaccgagcagtagatgatctcgggtttgatctggcggcaactctcgtagtcgagcccgagccgcgccatcacgctcgccgaaaaattctcgaccaggacatccgccgtcgcgatcagctcacgggcaacctccagaccttccggggacttgagatcgagggcaacactgcgcttgttacggttggtccagaggaacggcgcaccgtgcctgagatcgggatgcagcggaggataccggcgcagatcgtcgccccggccaggcgcctcgaccttgatcacctcagcgcccatgtcggccaggatcatggttgcgaacggacccgcgatgaagtgcgaaaaatcgatcacccggattccctcaagcgccctcggcgcgccggccggacgaggcgtgtgctcgggaaattcggcttccagctgatccagcatgtgagacatccgtacgtcttgagaaaggttgatcggcgttcgcggccgtcgtcgtcaattgctcttcggtggctcgacgagggagcaaccgccctggtcgagcggccgaaacgcctccgggcccgcgagcacgccgacctgctcgagcagatcccatttgctcttcgacgcattcgggctcttcgccttgaagatgtacatgttgtggatggcgcggccgtccgcgcgcaccacgaccggcccgaacaaggcgtcatcgatcgggttctccttcagcttgcggatcaccgcctgcgcatcattggttccgacggcctgcgccgcattcagataggccagcaccgaggaatagacgccggcatgaaatgctgtcggcgactgcccgtgctgccgctcgctaaacctggccgaccaggcgcggctggcatcgttgagatcccaatagaacggctgggtgatgatcagcccctccccgaccgcgagcccgctggactcgacatcgttggtggtggtcagcagcgccgcgaagatccgcccgctctgcttcagcccgaactctgcggattgcttgatcaggctgacggtgtcgccgcccgcagtggcgaacgcgatcacgtcggcgccggaaccgtcggcctgcaggatgaacgacgcatagtccgcgttgttgatcggcacattgaccgatccgagaacgctgccgccgccggcgccgatcaccgccgtcccgtcgcgcaccatcgatttgccgagcgcattgtcggtggcgatgaaataccatttcgtgccgccgtgccgtaccagataggcgccgatcgtgtgcgaggccgcccaggtatcgaaggtccactggatcgtgttcggcgagcagtatttgccggtcaggtcggaggaagccgcgctcgatgcgatcagcgccgccttggtgccgcgcacgacctcgttgacggcgagcccgacggccgagttcggcacgtcggcgaccgcatcgaccttctcctgaccgatccagcgccgcgcgatcgcggcgccgacgtctgccttgttctggtggtcggccgatacgatctcgaccctgaagtccgggtgcagccgcatgaaatcctcggccgccatcttggccgccgtcacagacccctcaccggcattgtccgaataagggccggacgcgtcgttgagtacgccgatcttcagagagcgcgcggcgtccgccgatgccggagaggccgcgcaggcggccagcagcgacaacgcgagaatgcgagagagatagttcacttgtttccacccatcctgtgttgttgttttcagagatcgagcaccagcgtgcgggacttcgcgcccgagcagcagatcatcacgctcttgtttgccgcctgctcctcttggctgagaaactgatcgcgatggtcgggtaagccgtcgagcacgcgcgtctcgcaggtgccgcagacgccttcggtgcaggcgtagttcgcggcaatgccggcatccagcaacgcgtcgagtatggtctttccggcctcgaccgcaacggtccgattgcttcgcgcgagcctgacctcgaagccgccttcagttgccggcgcttcccgcgccttgaaatattcgacatgcacatgatcggccaggcgaccggccgtcgccgcctcgaatgccgcgagcatcggcaccggtccgcagcagtagagatgcgtgtgcgccagtgcgctcccgacgattgccgggagatcgaacacgcgtcccgctcgctcgtcgtcgaaatcgagatgtaccctcgatcgatacgcgccgagctcgtcgagaaatgcggccgcggcacgcgtcctcgcggcgtagaacagctcccagcggcgcccaagcgcttccaggcgccggatcattgacagcagcggcgtgatgccgatcccgccagcgatcaggaccgagtgctcggcctcttcatgaagcgcgaagttattgcgcggcatggagatcgtcatgacgtcccccaccctgatagcgtcgtgaacaaggctcgagccgccacggctctcggcatccctgtgcaccgcgatgacatagcgatgccgctcgcgctgatcgttgatcagcgagtagctgcggatcatgccgttcggcagatgcaggtcgatatggctgccggccgtgaacggggcaagctcgctgccggcccgtccgatcagttcataggaattgatccgctcggcctcgtagccgatgcgcttgaccagcacctgctgcgtgtcggccgtatggccggatgcgctcacagctcgtacccgaaatcggcgccgagcttcgcccgcatgaacggcgctccgacatcgacccaggaatcctccggcggcagccgcagcgacaccgcccgcaccatgaacacgtcggggtccgagactccctttggcttgatcgcgtgatcgcgataggcaccgagcgcctccagaatgaagcgccgcgtcatcgcgatgccggtatcgctggagcagagcgtctccttggtgcggtcgaagatcggcgagacgccgctctgacaggcgccgtcctgcacccagagccccggcaggcccgagaaccaggtggtccgctgcgcctcgtagtcgaactggaaaccgttctgcggattgtatttggtccagtagccggcatacggcaccgtcaccggatgctgcaccagcgcatgccggctggcgtggccgctttcgcggcccttgtgcccctccgcgaacacttgccgggttttctccagcagcggttccgacggatgataggagaacatgatgcagagcgtgttctcatcgtcgatcggcacccaggcatgcccgctcaggtcggggaacggtgatagtggaggcaccagcgtatagaacggcagcatgaactggttgacccgccagtacagcgtgttggcgtcgtagttgcgccgcgcggcgatgctcatgccgaagtcctgcttgatgcattcgaaggtcggccgcaggtcgcgcttctggatccaggcgttggtggtgccctgcgcgtcgagccgcccgtgcagcaatggcgcgtgcgcggagtcgatctcgccctcgaccgcctgcaaccagttgcactcctgcacgcgcaccgagatgtgcacctgctcggccggcaccagattccattcgaggttcggcaagggcggaagctcgacctggtcgggccccatataggtccagatcattccgttgcgctccttgcagggataggccttgatccgcacccgctccttgaggcggctgcgtaccggctccgccggcatgtccgtcaccgcgccggtgacgtcgaacttccagccgtgatagacgcagcgcagcccgcaatcctcgtttcgtgcgaagatcagcggcgcgccgcgatgcggacaggcctggtcgaccagcccgacgcgaccttcggtgtcacggaaagcgaccagatcctcgccgagcaaacggatgcgcctgggctgtccgtccttggcgagatccgccgacggcaggaacggaatccagtacagccgaaacagatcgccgagcggcgtgcctttgccgacccttaccaggcgttcattgtcttcgcgcgagagcatggtttgtctccttcaattgcgtgctgtcggggccgttgcgccgagaagtgcggcgacgcggtcggacaacccgagatcctgtgcggtccaaagcggatcggatgcggcgagcggctggcgtggaacgggaggttgcttgccctcctccaccaggcccacgatcagctcgatgcgccgccgctcgagcgccctgagggcatcctcgacgacggccgcctcggccgtgcatcccggaagctccggataggcgagacgaatccgccaatgtcccggttcggtctcgcccgcctcggcctcgagcagatagggaatcgacagcagctcgcgcagctccaacggcaacctccctgaacgacgtcttcgcgtctatttgatacgtatacgtactacatggccggatggctgacaagggccgaaaaccattgcgccgctccgggaacaggcccgggtgcgattgatcgcagggttgaggacgtcaggccaagctgctaacggctaacgcgaattcgtgaaatcggggtcgaacaacggcatggcagccgacagggcaaagaagaccagctcggccgcagacgttgcgcgcgactggcaactcgaaggcggcgtcggatttctgctgcggctgctggaggcccgctacgacggactctatcaaagcatgacgcggcagagcgacatcacgccgcggcagttcggcgtgctgatggcgctgtatcagttgggtccgctcaccccctccgtattggcggaccggatcagttgcgaccgcaatacgctgagcgaaatgctgaagcggatggtggcgcgccggctggtcgcgaagaaggacaatcccgacgaccgccgctcgctccaggtgcagatcaccgccaagggtgaggaagcgctgctggccgtgatcccggccgccgcccagctgcaagagatcatgctggctcccttgcgcaaggaggaccgcgcgcatttcatgaaatgcctgctcgcgatcgcgaaggctccgccgccggacgctccgtccgatcgttgagcccgcttaggccgcaggcttcccaaacgtccccgcagcggcaagtgtcgcgatggcatcgggcgacagtcccagaatctgcgacagcacgtcatcgcgctgtgcgccgatgccaggcacgtgactgccgatcggcgtatcggcgcccgacatctgccatggcgcgctgacgccgacgaagtcgccggcaccatccgtgaccgtcccgaatacgccccgttgacgcagatggggatcggtcagcgccgcacccggcgcccgatattcggcgcaaggcacaccggcgcgatcgagcgccgcgatgcattcggcggcggtgtgacgctccgtccacttctcgatcacctgcatcatggcggaccaattggctccgcgcgccggaatgctcgcaaaacgcggatcgttcgccagctcttcctgcccggtgacctcgcagagcgcggcaaaattgcgcggcgtcaccggggcgatcaggatatcgccatcgcgggtgcggaccggcccataggtcggacgcggcgctcggatcgggaattgcgcttcctgaagctcgtagacaagcaggttcagcatgcagtccatcaaggccacatcgacgcgctgcccttcgccggtgcgcacacgctggaccatcgcagtctggatcgcggaatagccgaaaatgccgccgaggatatcggcgacgaagatcgctcccgccgcgggccgctcgcggtcgccggcatagcgcatcagcgaggtatcgaatccactctcggcatgcacgatcatcgcataagccgcccgctcggcagcgggacctgactggccatagcccgagatcgagcaatagatcagccgcgggttgatctcgcgtaacgcctcatagccaaggccgagccgctccatgacaccaggacgaaaattctcgacgagaatgtccgcctccgcgaccatgcgatgcaccagcttgatggcgtcggcgttcttcaggtccagcgccaggctgcgcttgccggcattgagctggccaaaataggtgctgtggccgtcacgcagcggcgtccgcagtcgcatgtcgtcgccctccggcggctcgatcttgatgacctccgcgccgacgtccgccagcagccgcgcgcaatacggccccgccaccatgatggaaaaatccagcacacgcaccccggcgagcggcgcccggtcgccatccttctgcatccgatctctcctatctcggcagcccgagcgcgcgttgcgcgatcaggctgcgctggatttcgttggtcccgatgctgatgacccacatcagcgaatgccgcaggttctgctcaaagcggccgttgtcgatcgcgcccggcatctgctcggacagcgcggcgcgcatgccgaggatatcgagcgcagcctcgccgaagcgttccatcagttcgcctgagaacaccttgctgatcgcgccatattccggcggagtcacgccaccggcggcaagctcggcgcaatgcatcatcaagagacggccgatctcgatctccgaggccagcgtcgccatcctgtcgcggacgatcggttcgccggccagcgactgatcgccttcccccgccattacatgcgcgcgcaattgctcgaaggcgtgcgcaaccttcaggacgatgccgccaccgaccaagccgcgctcgaacgcgagcgcgccggtcagcaccttccagccgtcattgacctcgccgaccaggttctcggcgggaatgcggacattgtcgtagaagatgttggcgaaggtgccgtcgtacatcgtggcagacggccggatcgtgatgcccggcgcatccatcggcacgatgaacatgctgatgccggcgtgcggcggcttggcgtccttgtcggtccgcgccgcgaggaacatgtatttcccccaccaggtggtggtccagatcttctggccgttgatcagccagtgatcgccatccctcacagcgctggtgcgcaacgccgcaaggtcggaccccgcctgcggctcgctgtaacccatgccgtgcatggcctcgccgcgcaaaatcgccggaaggtactgctgctgttgttccggcgtgccgaacatcatcagcgcattggcctggatcgcggcgccgatccgcggcgcctcggcctgctccatcgtctccatgaacgcgatctgctcgaggggggagcgtgcctggccgccgaaccgttccggccagccgaggccgatccacccggtctcgccgatatcgcgggcgaagccggcatcgaattcgcgcttggtgaacggcttctgatcaaacgcatccttccgttgtcccgaccagttctccgcgagccagcgccggacctgctcacgatacgcgtttccggcagtcccgaggtcgtattgcggcagcccagcgccgcccgcatccaggaggcgagcggccaacctgcgcttcgcatcggacgcaccaccaagtgcgatcgtatcgaggtgcacgcgcttgaaatggattggcgcttcgtgctcctcggcatagccgatcgccccgaacgtgtgctgcgtctcgagcgcgacctgccgcagcgcactgccggagaacgccgacgcgcaatcggcaaaatatcgccagtcggcatcgccgccatcatgcaatctggcggtgtgatcgaggatcagcctgacgccttcgagcgcgatcaggcaatttgccagcttgtgctggatcgcctggaacttgccgatcggctgcccgaactggtgtcgctccctggcgtagtcgacggccagctcgaacgcgcgccgcgcagcaccgtaagcgcgcgcggtcaacatcgccttgcccttgatgcggagctcgtcgaggtcgacgccgcctccggcaatccgtgtgagcggcgccgcgttcagccggatctcgtagagcccccacgcccccatcgcacgggtcgcaacgcattcgacaccgggacggccgagctcgatcagcgcaagatgagcccgatccagcgcgaccaggaggtgcgtggcacttcccgccgcctcgacgcagcggagcacgcccgttgccgcgttgatcgcgacctcgatcgagccggtgccgcgatcgggatccagcgcaccgaacgagaaggcaacaatcgccttcccggaatgcagccgcgccagcagatcggtcacgacgtcgctctgcgatccggaaatcgcaaggttggccagcgccgccgaccacatcggcgccggacatccggcccggccaagctcggccatgacgacgaggatttcggcaaggccgccttcatccccctgcgccccgagggcggctacgccctgcccgaccagcttgcgccagatcgccgatatctcgtccggcgaagacgacgccatcgcgccacgcggacgccaatgctcatcgaggaatccacgcaaggaatcccgcagcatcgccgtgacgtcatcgtccggctgttcggtcgccgtcatcacgccggcctagccctggccgaacctgggcttgcgcttttccttgaacgacatcgtcgcttccttgtggtcggccgtctcgaacgtcacctgctccagcgccatcgaggcttccagcagcatgttgacgcgctccttgacgatctggttgatcgacagcttggtccagcgaatggcccaggtcggaccgttggcgagctcgatcgcgatcgcacgggccttggccagcacctccgcgcgcggcgcgacatgattgaccagcccgatccgctccgcctcgttgcccttcaggagcgtgccgcggatcaggaattccttggccttgttgatgccgatcagaagcggccagatcacggtgccgccgtcgcctgcgaccaggccgacgcgggagacgtgggtgtcgccgatccgcgcgtcctcggccatcacggtgatgtcgcagagcagcgcatgcgtggccgccaggccgatggcgtcgccgttgatcgccgcgatgatcggcttgtcgagctcgagctggcgcgtgacgccgcgccggctgatcatcggatcatggacctcgccctcttcgagcacgtcgccgccgggccgctccgacatcgccttcacgtcgccgccgacgctgaagaagtcaccggcgccggtcagcaccacgacattgacggcgtgatcgtcggcgaggtcgtcccagatcgtgcgcagttcgcggatcagtttctggttgatggcattgcgcgcctgcggccggttcaaggtcacggtcgccaccttgtcggcgacctcgaccgtcaggcattcatacttggcgtagttggacacgtttacctccattgttattgctgcttggattttgtgatatctttgggcgcccgggctatcgaagcatccccggctgcacgtccgccaatgcgacgtggagcgacatcgctcccgggtcctgctccagcatccgctgcacggattccaggtgcgaccgcagcagccggctcgccagcgccacgtttcgttcgctcagcgccgccaggaactgacgccgcttctccgccagtcgcgccatcgcgacaccgctggaggcgaccttggcatagacgaagcgcatgtggatctcagtgaccgagtcgacgatcatcgcgatcaccttgttgccggtcgacgccgccagcagcttgtagaattcccgcgagcactcgacccgatcgagcagcctgccttctttggtggcgagctcggtccgctcgatattggcttccagcgcatcgaggtcggcccggcgcgcgttcgcgcaggcgagctgcaccacgaggtcgagcacatggacccgcgcctccgacaattcccgcacggaaatcgtcccgaggctcagcatgtcccgcatcacctcgttcatgcggcgggtgtcgccctgctggatgaaggcgccgcccttgacgcccttctgcagcttcagaacgccggccatttcgaggctgcgcagcgcctcgcgcaggacgttgcggctgacgccgagctgctgcgccagctcgcgctcggccggcagcttgtcgccgggcttcagcacgccgagcgccagctgctcgcggatgcgctcgcagatctcctcgaacgtccgcctggtgtggatcggcttgaaagtcggcgcggccgacgctccggcggcacggagatcggaggttcgctcccgccggttcggcgaggcggcacgggagcgctgcggcgcgcgagggcttgacttggtgctcatgcggtgaattattaaatggatcacccattcaatggaagcccctttcttggcttccggcaaagaaaacgacggggagcccgtatgagtttttccgaggagcaggtcgcgttccgcgacaacgtgcgcaggatggtcgccaggcacgtagcgccgatcgccgccgagatcgacgagaccgaccgctttccgctggagctggtcaagctgttcggcgagatgggattgatgcagctctgggtgccggagcgttacgacggcccgaacggcaatctgaccatggcctgcattgcgcgcgaggagatctcgaaggtctcgccggcctgcgcctcgatcgcggcgctcaacaccatgttcatcatgccgctgctgcatttcggctcggaggagcagcgccggagatacctgccgatcatcgccaagggcggcgtggtcacggcgatcgcgatctccgagccgcaggccggctccgacgtcgccgcgctcaacacccgcgcccgcagggacggcgacagctacatcctcaacggccgcaagcaatggtgcagctacggtgtcgtcgccgactacatcgtggtgatggcgcggaccagtgacggcgccggcgccgacggcatcagcgccttcatcgtcgagccgaagacaatgcctggcatcacgttcggtcgccacgagcgcaagatgggctttcgcggcgcccccaataccccgatcttcttcgacaatgtcagggtcccggccgaaaatctcgtcggcgaggaaggcaagggttttcgcgcatcgatgcgcgcgctcgacctcaaccggccgaccatcggcgcccagtcggtcggcctcgcgcagggtgcgctcgatgcctgcatcgcctacgccaaggagcgcaagcagttcaagcagccgatcgccgaattccagggcgtgcagttcatgctcgccgacatggcaatgcagatcgaggcggcgcgcgcgctggtctacgaatgcgcccgcgccggcgatgccggcgactggaagcggctcaacgtgcttgccagcatggcgaaatgcgtcggcagcgacatggcaatgaaggtcacgaccgacgcggtccagatcttcggcggctacggctacaccatggactatccggtcgagcgcatgatgcgcgacgccaagctgacccagattttcgagggcaccaaccagatccagcgcgtggtgatcgcccgcgagttgctgcgctgacgcagattccaataagaaacgaattaaggggagaacgaccttgaaccacctcatcgaccgggcgtttgcggctattgcgctgtcggccctgctggcggcgcctgcctacgcccagaaggcctatggtcccggcgccagcgataccgagatcaagctcggccagtcgacgccgctcagcggcccggcctccgccttcggcgccggcgccgggcgcgccgtggtcggctatttcgagatgctgaacgcgaagggcggcatcaacggccgcaagatcaacttcacccagctcgacaatgcctacagcgcgccgaaggccgtcgagcagtcacgcaagttgatcgaggacgtcggcgtcctggccgaggttggcacgatcggcaccgcgccgaacgtcgcgatccagaaatacctcaacggcaagcaggtgccgcagctgttcattacggccggtggacggcgtttcaacgatcccaaaaccttcccgtggacgatcccgctctatccggacttcgagaccgagggccgcgtcgtcgccaagtacatcctgaccgcaaagcccgacgccagaatcggcgtgctgtatcagaatgacgactacggcaaggactatctcaggggcctccgcgccggcctcggtccaaaggccgagctgatcgtcgcccaggcctcctacgaactcgccgacccgacgatcgactcgcagatcgttcagctcaaggccgccggcgtcgacacgctgatcgagcagtcgtcgtcgaaggcagccgcgcaatcgatccgcaaggtctacgagctcggctggaagcccttgcacgtgatcggcggctcgacggcatcggtcgaaaccatcctgaagcccgccggcctcgaagcgtcgaagggcctcgtcaccacgcaattcctcaagcagccgggcgacccggcctgggccaatgacgacgaggtcaaggcctacaaggatttcctgaagacctacgcaccttcggccaatccggacgattactccgtgctcgttgcctacatgaatgttcacgccgtcgagatggcgttgcgcaaatgcggcgacgacctgacccgcgaaaacctcatcaagcaggccacctcgatgaaaggcgagcgtttgccgatgatgctcccgggcgtcgcgatcagcaccaggtcggaagactacacgccattcaggaccctgcggatcgcgacgtttgacggagcaagctggaacctgactggcgagcctctctctgctgattagaccagattacgagagccatcgcggaattcgcggccgaccatttcagagcactccgtgcctcgccccaatgtctacctcaccctcgaggacgcgcgaagctttgccaccagaagcctcggcctgcaggtcggcgagcaggccaagcaagtgctctatctgcgttccgacgatcgggcgcacacgctctgctatttcgagggcgatccgcaggaccaagccgtcgccttcgaagtcgaagatgcggacaagctcaacgtcgccggcgcaacgctagatgcgctcggccatgccgtccatgccggcaggcccgacgaatgcgcgctccgcaaggtcaaggctttcatcgcgttcaaggatccgacgggcaattccgtcggagtggacgaaatcgaggacgaggaaacccatcgaccgcggcagttcggctttgagccatccagcctttgcatgtgggggcgcaaaatcagcacgtccgcgctagctcgtccggcggcgggcggagcgcttcgtagcgcgggttggcgccagcgtagcccgccactgcaccctccgcaccggccacagccattcacatttcaaacagcgcaagcattcgcgatctcgcgacatgatcggtccgagctttgtgcatcgttccgccctcctctcacagagggcgcagggaaagccgggtgccgatcgcacccatgggccccgtgcaaaaggtagaaagcacgggggtaggaccacaggtgtaaccggaaacaacccggctagcgcccctcgatcgggtgagacgggcgaaccataaaccgagttgcacttctgataaagcgaaatatttccggcgcgatggattgacaggtttttgctgagttgcccgtcgggttgaaatgccgcgggtgccacggccgcaacgcccgtgcgaaccgctcaggcagcaggtttggcatcgcgtgcagcgtcctgctgccaccatggtgtcagcaggatcggcgtaggcagaccccgaacgcaatccgggcggggagcaggcacgacatgcacgatcgctcaaccgaggtcgctcgcgagcgatcgaacctgaccacattcgtgctcagccttggcgcattcctgatcctgttcgatgtgaccgcggtcgtggtcgccatgccgggcattgccgacgatctcggatttgccgttgcaggcaccgcctgggtcatcgacgcctacagccttgccttcaccggcgcgttgctcgcgtcaggcgcgcttgcggatcgcttcggccgtcggcgcgcgatgctggccggcaacatcgtgtttctgctggcctcgatcggctgcggcgcggcggcgagcgctccgctgctgctcacggcacgcgcgctgcaaggcgtcggtgcggccttcctgggtaccggcgcgctcgcgctggtcgccggcgcattcccgcaccagcgtcggcgggcgcaggccttcgccaccatcgggacgatctcgggcgttgcgatggctctgggcccaacgctgggtggattgcttgccgcctggttcggctggcgctcgatcttttatgccaacattccgttttgcctgacgctggcctttgccgtgcctcgggtcgtcgcggagacgcgcgaatccggcggacgcccgctcgatccctggggtatcgtgctgttgacgctgtcactgggtcttgcgatcgacgcactgctgaagcccgacgcgccgtcgaccgtcagagcggctggcctgatcgcgagcgcggcggcggcattggcattcgtccggcagcagtggcacagccgaaatcccgtgctcgacccgcgcgtattcgcgaccgcgccgatgatcggggtcggcgcgtccttgacttcgatccaattcggctactgggcggtattggtctatctgccgctgttcctgagcgccggcctgcatgtcagcatggaagtggcgggcgtggccttgctcgcggcgacattgccgatgctgctggtcccgctgctgggcggccgcctcgtcacccaatggggctggcggcgtttcttcatggtcgccttcggcaccatcgcttccggagatctgttgctcgtgatcgctgcgctatccgccgatgccaccctgcgcagcatcgcaacggtcgccggcatgctgacgatcggcgttggagcggcgctggccaacccgcaattgggcagcaccgccttggcccttgcgccgccggcgcaggccggcatgacgtccgcgatgacaatgatcgtccgccaggccggttttgccatcagcatcgccgcgctgggggcgacgctcaggacgacggaggtggcatcggcgtatgcggctccattcgtcctggcgaccatcggtgcggtcgccggcatgatcgcagcggctgccctgtatcctgcaccggaagccggggcgtcagaacgccgggagcgttagggggcacgtccgcatcctcccgtcattccggggcgacgcgtcagcgtcgagcccggaatccattcatcgtttgaaaatgcggcccgatggattccgggctctcgcttcgcgagccccggaatgacgatggagagagccgtcacgcctccctcgcgtaactcttcaaccttgcctccagcaccgcgatcacctggtcgcggaccggatcgcgggagcctttcagccaggcggcggcgagcggcaggcggccggcggcgctgccgcgtttgagcctgaggggaacgaaacgcacgcccgggatcgccatccgcgcggtccagcgcggcacgatggcaacgccaagccgtgccgcgaccatgttgacgatggtctgcttttcgtcggcgatctcctggatgttcggcgtcaacccggcctcgtcgaacagcttggtcgtgaggtcgtggctgtgcggccgcgagcggcgctcgggcacgatcaacggctgatcggcgatatcgggcaacacgatctgcttgcgccgcgccagtccatgcttgtgcgacagcgccaccacggcggtctcctgcagcagaggaaaaaactcgatgcggcggtcgggccgctccggcgggcgcacgaacgcgagatcgagcgcaccggacaatagcttcggcagcagccggatcgtcttctcctcgagcaattgcacggcaacgtcgggatgggcggcgcggacgtcgcgcagcagcggcggcagcaagccggccgcggcgctgtcgatcgcgccgatccggaagcgccgcgcctgcggcttgcgcagccagcggcgaaagccatcctcgatcgcctcggcgcggctgagcagcgcacgcccctcgcgcagcaacgttgcgccgtcctcggtcagcgacaccgcacgcgtggtgcgcgcgaacaaccgcgcgccgaggtcctcttccagcagcttgatgtgacggccgagcgccgacggcatcatctgcaggcgttgcgcggcgcggccgaaatgcagttcctcggcagccgccacgaagcagcgaagctggtgcagttccaagacgtgtttactccagaacctatccaccgtcgttgcgagccacccggtcggcgcgaagcgccgccggatgacaggctccgcgaagcaatccgtgccaccgcataggcggagcggtggatcgcttcgtcgcttcgctcctcgcaatgacaaagcaaggattatatcatttttttgtataaacccacacgggttgaaccggaaggccgcagccttctaggcttttcggtggtgcggcataacgcgccgtcccaacaacaagacgaaccccggggaagcccatggaaagccagcttggcacgcgcgtgttgcgcaagatctcactgcgcatcgtgccgttcatcatgctgctgtacttcgtggccttcatcgaccgcgtcaatatcggctttgcctcgctgaccatgaacaaggacatcggcctgtcgccgaccgtctatggcttcggcgccggtatcttcttctggggctacttcctgttcgaggtgccctccaacatcatcctgcacaaggtcggcgcgcggatctggatcgcgcgggtgatgatcacctggggcatcgtttcggccgcgatggcgctggtgcagggcgcgaccagcttctacgtgctgcgtttcctgctcggcgccgccgaagccggcttcttccccggcatcatcctctatctgtcctactggttcccggcgcggcagcgcgcggccgtcaccgcgctgttcatggctgcggcgccgctgtcgaccgtgctcggctcgccgctgtcgggcgcgctgctggagatggacggaatgctcggcttcaagggctggcaatggctgttcgtgctggaggccgtgcccgccgtgctgctcggcttcgtggtgctgggcttcctcactgaccggccggagcaggccaaatggcttgccgacgacgagcgcgcctggctggtcaagaccatgaaggcggagaacgacggcaaggccgcgaccgcaagccacagcatctggcgcgggctcgccgatccgcgcgtgctggcgctggcgctggtctatttcggcacctcggccgggctttacacactcggcgtgtgggcgccgcagatcatcaaggcgttcggcctgtcgtcgctccaggtcggctttctcaacgcggtgcccgcgaccatcgccgtagccgcgatgatcctgtgggcgtggcactccgatcgcaccggcgagcgcacctggcacgtggtgctggcctgcctgacggcagcagccggcctcgcgctggccggaatgtggaccggccttgccgccgtgatcctcgcgctcacgctggtcaatatcggtatctcctcgtcgaagccgccgctgtggagcatgccgaccatgttcctgtcgggctcggccgccgcggccgggatcgccaccatcaactcgatcggcaatctcggcggcttcgttggcccggcgatgatcggctggatcaaggaacgcaccggcagcttcgagggcgggctctatttcgtcgccggcctgctggtgctctcggccgtgctcacgctgctgctgtcacgcgcgccggccgcggccgaaccgcatcccgatcccctgcgaacccgctaaccacccatccggagacaaatcatgcgtacccattccatcgccgccattcccgccgacggcatcggccccgaagtgatctcagccggtgtccgcgtattggaagcgctggccaagcgctccggcgacatcagcttcaacgtcaagaccttcgactggggttcggactattacaagaagcacggcgtgatgatgccggccgacggcctcgcggaattgaagacattcgacgcgatctatttcggcgcggtcggcgcgcccgacgtgcccgaccacatcacgctgtgggggcttcgcctgccgatctgccagggctttgaccagtacgccaatgtgcggccgaccaagatcctgcccggcgtcgcctcgccgctgcgcaatgtcggcgtcggcgatctcgactgggtgatcgtgcgcgagaattccgaaggcgaatatgccgggatgggcggccgcgcccacagggggctgcccgaagaggtcggcaccgaagtcgcggtcttcacccgggtcggcgtcacgcggatcatgcgctacgcattccagctcgcgcagtcgcggccgcgcaaattcctcaccgtggtgaccaagtcgaacgcgcagcgccacggcatggtgatgtgggacgagatcgccgccgaggtggccaaggacttccccgacgtgacctgggacaagatgctggtcgacgccatgacggtgcggatgacgctccatccgaagagcctcgacaccatcgtcgcgaccaatctgcacgccgacatcctgtccgatctcgccggcgccctggccggcagcctcggcgtcgcgccgaccggcaatatcgatccgcagcgccgcttcccctcgatgttcgagccgatccacggctcggccttcgacatcaccggcaagggcatcgccaaccccgtcgccaccttctggaccggtgcgcagatgctggagcatctcggcgagaaggacgccgccgcgcgcctgatggccgcggtcgagaaggtctgcgcggccggcatcctgacgcccgacgtcggcggcaaggcgacgacgaaagaagtgaccgacgcggtgatcgacgcgatccatgggtcgaatgtgtagggtacgacgatctcgtcgcatcatgcagtgaggcgagcacgatagccgggctccctccccccttgcgggggagggttggggagaggggtaccgcttgctccgctcttcgttagcaacggcgatactcgctgcgcatgttgatgcagtcgaatcgatgtctcgcaattcgtccggagccacccctctccccgccctctcccgcaaggggagagggagcctgagagccgtgctcacctaacgaagccgcgccgcgtccgataccgcaaccggggacagaaccgtgctacccgatctgaccagacgacacttcatgactgctggaggactatcgatcatggccgcgatgacggggatgcagccggcaagggctgcgacgtggcacgatgagatccgcgcgatcgcgttcgacgtgcaagggacctgcgtcgacttctaccagccgatcctgcgtgcgggtcaagccgtcaacgccgccaaggggctcgcgctcgactgggccaaactctcgagcgaatggcgcgatctctaccgtgccgcgctcgacgacgtgatcgccggcaagcggccgtggatcagggtcgaccgcatctatcgcgaggcgctggacgtgctgctcgatcgccacgggctctcggaggctttctccagggacgagcgtgacgaactgaacacggtgtggagcaagctcgacgcttggcccgacagcgtcgagggcctaacgcgcctgcgcagccggttcgtgacctcgacattgtcgaacgccggcatggccgcggtcgtggcggtggtcaagcacgcccggctgccgttcgacgccgtgctgaccgcggagcttgcacacagctacaagccgtcaccggcggtgtatcagcttgccgtcgactacctcggctatccagccgacaagatcctgatggtcgcctgccacaaatacgacctgaaggcggcccgcgccttcggcatgcggaccgcattcgtcgcccgtccgctggagttcggaccggccgcgaaggtggacgtcgcgccggagccctggttcgaccttcatgtcgacagctttacgcaactcgccgacgcgctgatgccggcatgacgatgcagaggtgaattggtgtgtccggcttacaccggagcgcccgcttccgcgcaattggtcagccgcgccggcacgccgacggcggtgcatccggcggggacatccgacgtcaccagcgcgccggcgccgatcttggcgaaatcgccgatgctgagattgccgataatcgtggcgccggcgctgagcagcacgccgcggccgattgtcggagcgtggcgcgggtcgtcctgatgccgtgcgatggtgacgttctgcaggatcgtgacctcgtcgccaaccgaggccagcgcgccgatgatgatgccggtgccatgatcgaggaacaccgcggttccgatttgggccgacgggtgaatgctgatctgcaactgatccgccgccgcgctctgcatcagcagcgcgaggtcggggcgatcgtgacgccacagccagttcgacacacgccaggcctgcagcgcgaggtaacccttgaagttcaacagcggcgtgagcaagcccgtgatcgccgggtcgcggcggacgatcgctgtcagatcggtcgccgcggcatcgaccagcgcgggctcggccgcataggcttcgcgggcggtccgcatgaactgtaggcgatcggcatcagtgcggcagatggtccggccaatcaggaaggcgagcgcgccgccgagatcgccctggtcgaggatgaaggctgccgacgcttcgaggaagggatcggcgacaatggcagcttccgcctcgcgccggattgcaagccagagctcgtcggaattcgccgtcgtggatagcgccatcgccttcgcctcatcgtccgatcccgaacgatacagtggacatggcagccgcaaaatgcaaaccgcccgcttgctcatcgcaaacgggcggctcagggccatcaggtgctatgggggcacatcgcctgaaggctagcgcttgcctcgcgtgatcagccttgcaagatcagctctgcggcggctggtcgttcggcggagtcggacgggtcttgtgctgcgccatgaaggcatcgaactcttccttgtccttggcgtggcgcaggcgatcgaggaagttcttgaactcgacctgctcttcctcgagacggcgcagcgtgtcctggcggtactcgtcgaaggcgcggttgccgctggagggcgggccgaagccgccgaacgggaagccgcggcgctccatgcggctcttcatccgctccatcttgtcctgcatgcgctccatcttgttctgccagcgatccatgtcgttgtgactccaacaggccatttttctgctcccgagtgtgaaaaagagaagggcgaggccgatcggccaccagatcatgaagccgaggatgatcccggcgatcttcaggggatgccacggcgtcgcgtagaagtacgggcggtagggttcttcgacggggccgcgccagcgattgacatcagcggtgtaggccatttccttctccatcacggcatcacgccgttgtgaatgtaaataacatttacatagatagccgatcgcccgggaaagtcaagcagcgcggatgacgcacctctcggattatttttagctcaggcgttgaaccttatttcggtttgccccacgggcccgccggcttgtcatccgcggcagcggttcccggcctctggtcggtccgaaagccgaggccacgcagatagatcagcacttcggcctcgagcagttcttccggcgacatcggcagcttgcgccgcgcggcatcgccgcggccgaacagcgaggcgactccgtgcgacatcgaccagatgtgcagcgccatcatcatcgccggcggacgcggcatgcccggcggcgccagtgccgcaaggcgttcagcggcggcgcggatgatcgcaaaggcgcgctcgctcgcggccatcagtgttggattggcgtctggcggcaggcctgattcgaacatcgcggagtagaacgccggctcctcccgcgcgaaggcgagataggctttgccgacccgctcgaacgcggtgacggtatccggacggccgtcatcccaggccgcggtcagcagcgattcaaattgctcgaagccgcgctgcgcgatactggcgatcaattcgtcacggtcgcggaaatgccggtagggcgcggcggggctgacgccggccatgcgcgcggcatcggcgaaggtgaagccggccggccccttcttcgagatcaggtcgagggcggcctgcagcaacgcctctttgagattaccgtgatgatagccgcgctcggcgcggccttggtccttgcgccagctcatgtgaacggcttttacatgagccggcagtaaaggtcactagcggcggggcggccggtccatcaagattaacggatcgctcccgtaccgcgcgggcttgggtccgaggactatcggccggggatcggcagcaccggcatgatctccacggcttcgccggggaagatcgcaaagtgcgggtggttctcgaacagctttgccgccgcctcatgcgagggcgcgcgcaccacggtgaatccggtcatcagattggtgatgtcggcggtgccgccctcgccgaccttcttggtcttgccgagcggtccgcccatctcgacgatcacgtcgtggtgcttctcgacccaggcgccccaggcggccatgccctcctgctccttggcacgccgctcggcctccggcagcgcgttccaggctgccatgcgcgaaccattcttgccgccgccgagatagacggcgaggaaagtgttgctgctcatcttgcgtctccgttgtggtggttgcagtgatcgtcgatgcgaggggcggtgacacagctcgcggcgtcaccgcttcccgatctgatttaacgcagcgccttgccccaaccgcccttcggatgctcgaaggtcgcggccgcctgctgcacttcctcggagaaatcggccatctcctggacctggcggatctcgatcatctcgttcgcggtagccgggcacttcttggcccattcgatcgcttcggcgcgcgagccgacctcgatcatccagaagccgccgatcacttccttggcctcggtgaacggaccgtcgatcacgatgggctcgccggtgacgaacttgacgcgcgcccccgccgccagcggatgcaggccttccagcgtgatcagcacgccggcgtccttcagcgcctgattgtaccgcatcatcgcggcgacccgttcggggtcgagctcgagcttggccggcgcggactcgtagccgagcgggatcatcagcatcatgaagcgcattggttggatttccttgtcggttgaatcacgcgcaatcttcacgctcgtcactccaggatgcttcaccagacacaggccgggaatccatgacctgcgaccatggtcatgtcgtccgcgccgtgcgccggagcgatatcgtggaatgacgtcgggtatcacttttggcctgcctgcgcacgcaggcgctcttcctgctcgcgcagttcgggcgtcagcgcctcgccgaaatcctccgcggcgaacacctgacggatctcgatctcggagccgccgccgaacggcgcgcgcttcatccagccgatcgcttcatccagcgatttggtctcgatcagccagaagccgcagaccagatcgccgctcgggccgaacggcccgtgggtcaccgtgccctgcccgccggcatatttgacccgcgcgcccctgctggtcggatgcaggccctcgccggcctgcatcacgccggccttgaccatctcctcgttgaacttgcccattgcggcaagcatctcggtgctcggcatcacgccggcctcggtatccttgttcgccttcacgatcaccatgaacttcatcgtcgtgctccgttgtctctctgccgatctcagcaccggcgctcggttgaaagacgacggacggtttgcacttccgacacgacctttgaaattgtcttcgacgtcattgacgcaggctcctagtcatcgatcgcctgataggcgagcgtccagaaatcggaaaacaccgcgggcggctgcggcgcatccagcacgcgagccgtgcttgcgacaggccaccgttttcacgcgcaatgggcattgtttgggcttccttcgcagagcgtgcgcgccgatgacggcgatcgcacgcgccatatcaccgatgctgccttaccgctcctgcctgacgagctcgccgtcctgatgcgacggaccgaaatagacgtcgatgcgcgataccttgtcgccgtcgaacacgaagaactcggtgttgcggaagctcttgccgtcccgcgcgacgcagcggtaggtgacgaaggcttcaacaccgtcgaccatgatgcgctcgatctcgtggcggccgatccagccgctgtcgcgccagcactcggcgaaatagcgcggcttgtcgatgttctcgccatacggcgtcgagaaacggaaatccgcagtgaacgccgcctcgacgctcgcgcgatcgttggcgagataggcggcgaagagggagcggatgatctccgccctgttgccagctgcagccatgtcgtctccacacatgtcgcccgggcctctggaggttgcgcgctccagggcccgggtctcagggagatgacgaacggcacgacgcgaaaccgacatcgcgccgcaatttattttcggaaccggaaccggatcggcgctcacccttcctgcgggaacatgccgaaatagggctcggcctccttgaggacccgcgcgaaggacggccgcgccttcagccgctcgagataagcggccaggtggcggtgcgcctcgccgatcggctcgaccttgttgccgtagaacagcgccggcgcggccgcgcaatcggcgagcgtgacatgctcgccgatcatccagccgccatgcccaagctgctgatccaggatcagcaattgctgatccaggatcgcataggaggcgcggagctgcgcccgcgcctcggcgacgccgtgcggatccttggcgtccgccggccgcagccggtcgccgacgatcttctgcgtcggcagatggacatagagatcgaggaagcggtcgcgcagccgggtctgcagcgcgaggtccggatggtccgggatcaatttgacggcaccgggatagtgtcgatcgagatattcgatgacgatgctcgattcaggcactgtctcgccgcgcgtctcgtcgcgcagcacggggaagcggccgatcggccacagcgcgagcaacgccgcgcgctcggcgggatcgccgagattgaccatatgcggcgtgaacggtgcgccgttctcgtaaagcgcgaccagcgccttccagcagaacgaggacagcgggtggtaatgcagggtgagcgacatcggaactccatcatgaatcggtctaccgaggacgggccggagacagtcgtgccgacatctcgtgcggaaattatttgtgcggcgcccggcgctgagagcggacatcgacgcgacacgcattcgtcgagatcagcgaatcgaagtgctggatcgatccttgaaaacagtcggcaatatcagccttcgtgataggtctatcagagctggtgaagtgcacgcgttgcaatcatccgcatcagaccagaattgtcatcgattttcgtccgtaagattacggtgaacattgcatcgcgactatggatgataacgtgcagatgaaaaaattacttcgcgaaatgagatagatggacatgcgccgcactgcgttatgcaatccgtgccaagccgcagcctttaccgatgctaaacggctcgctgcaacctttccgtgagttgccgcgatccgcttttccatcccgtctcatttgaacattcacggagccctgatgttcggtttcagcaacaaggcaaacaacgacagtgcgctggcgcaagccgcagcgatcggcaagtcgcaggcagtcatcgagttcaagctcgatggtaccatcgtcaccgcaaacgagaacttcctgaacgcgatgggctactcgctcgacgagatcaggggcaagcaccacagcatgttcgtcgaaccggccacgcgcgacagtcacgactatcgcgaattctgggcgcgactgaaccgcggcgaattccaggccgcacagtacaagcgcatcgccaagggcggccgcgagatctggatccaggcctcctacaatccgatcctggacaaggccggcaagccggtcggcgtcgtcaagttcgccaccgacatcaccgcgcagaagatccacagtatggaagatgccggcaagatcgctgcgatcggccgggcccaggcggtgatcgagttcaacatggacggcaccatcgtcaacgccaacgagaacttcctcaacgcgatgggctattcgctccccgagatccagggcaagcatcacagcatcttcgtgccgacggccgaccgcgacagtgcgacctaccgcaatttctgggcgcggctgaaccgcggcgagttcgaggccggcgagttcaagcgcatcgccaagggcggcaaggagatctggatcctcgccagctacaatccgatcctcgacgatcgcggcaagccgttcaaggtcgtcaagttcgcgaccgacgtgactgagcagaagctgaaggccgccgacaatgacggccagatcgatgcgatcggcaagtcgcaggcggtgatcgaattcaacatggacggcacgatccgcaacgcgaatccgaacttcctcgccgcgatgggctattcgcttgccgagatccagggccggcatcacagcatgttcgtcgagccggtcgaggcaagctcgcagggctatcgcgagttctggggagcgctgaaccgcggcgagttccaggccggcgagttcaagcgcatcgccaagggcggccgcgagatctggatccaggcctcctacaacccgatcctcgatctcaacggcaagccctacaaggtggtgaaatacgccaccgacatcaccgcgcaggcgatcggccgcaagaaggccgacagcgcgcgcggcctgatcgaggcggtcgccgccggcagcgaggagatgagcgcctcgatccgcgagatctcggagaccatgaccaagtcgaagcagaacgccgcggtcgccaccggccgcgtcgaggctgccgacggccaggcccagaagctcaataccgcagctcaggcgatgagcggcatcgtcgagatgatctcgagcatcaccgggcagatcaacctgctcgcgctcaatgccacgatcgaatcggcacgcgcgggcgaagccggccgcggcttcgcggtggtcgcctccgaagtgaagagcctcgccaaccaggccaagcaggcgaccgatacgatctcctcggaaatcgatgcgctcaactcgatcgccgcagcggtggcgacctcgctgtccgagatcaaggctgcaatcgccggcgtcaacgaatacatcacctccaccgccgctgcggtcgaggagcagagcatcgtgacccaggacatgtccacaaacatgcagcgcgcctccgccgagctcgcggcgtaaggcgcggtgcgatcctcgaagggtgcgcggcccgggctggggaccgcgcatccttcgagacgcccactttcgacgcaagaatgacaaggcatccctgtcgggttgacacgttagggtaaaggtcgcagacggtcgggatttctgcccgaaccgatggaccttccgatgactcccttcgcacacaaagtcgccctcgtgaccggcgccgcgcgcggcatcgggcttgcggcggcgaagcgctttctcgccgacggctggcgcgtcgcgctgctcgacatcgagggcttgctgctggagagcacagtggcggccttgaagcagcccgacgacacgctggcgctgacctgcgacgtatctgacgctgccggtgtggcagccgcgatcgctgcgatcgcaaaccgcttcggccggctcgacgcgctggtcaacaatgccggcacggcggtgttcgcgccggtattggagacctccgacgccgactggagccggatcatggcggtcaacctcaccggcccgttcctctgcaccaaggcggctgcccccttgatgcgcgagcatggcggcggcgcgatcgtcaacatcacctcgatctcggcggtgcgcgcctcgacgctgcgctcggcctacggcaccagcaaggcggggctcgcgcatctcaccaagcagctcgcggtcgagctcgcctcgctcggcatccgcgtcaacggcgtggcgcctgggccggtcgagaccgcgatggcgaaagccgtgcacacgccggaaatccgcgccgactatcacgacgcgatcccgctcaaccgctatgggctggaggaggagctggcggaggcgatcttcttcctctgctcggaccgctcaagctacatcaccggacagatcctcgccgtcgacggcggcttcgacgccgccggcatcggcctgccgaccctgcgcggcgagcggcggaatgggtaatctttccaaccgcgcattcattgcatcaccgtcatccggaggagccgcgtagcggcgtctcgaaggatcgacggctaccggccgggctgtgcatccttcgaggctcgctccgctcgcgcctcaggatgacgggactggtagcggcgattgattcacgccaacaacacgccacgtattcttgagccgatcgatccgcgtcagcgacagcggatcgatgacgaagcgcaatgcgagctccggcgcgagctcaagcgcgatcgcgaggatcgcgcggatggtgccggaatgcacgaccagcacgacgtcaccgaccggcaagcgtgctagcccagctcgcgcgcgggcgatctgatcggcaaagctttcgccgccgggcggccggttggtgcccggcgattgccagaacgcgcgataggcttccgcgccgagctcttgctcgatctcgctgtggcggcggccggtccaatcgccaaaatcctgctcgcgaaaggcttcatccgccgttgccgtaaggccgagccgcacggcggtctcgctggtgcgccgcgccggactgcacaccgcgaaagcgttggccggcagccgcgcctgcaacgtggcgaaggccgcggcatcgccgaggtcggcgggcgcatccggcgcatggatcacgccgcgcggaccgtcgaccggcgcgtggcggatcagccagagatgcgtttcaccgttcatttttccactatcccaaccgcgctgcgagcagcaccaggatcgccgtctccgcgacctgctcggcaccgccaagcacatcgccggtctggccgccgatctgccgccttgccaattgcatcatgatcaatgcgctcgcgccggccgcgatcgccgccagcagcgcgctgccgaggggcagcgcaaggattgctatcaagagcgcgatgccggccgcgaccgccgcgatcgcaccatcgggccggccggcattggcggcgagaccatctttccgggcgtaaggcaggctgatcgcgatccacggcagcgcgccgcgaccgagcgcatgcgccgcgatcaggctctgcacgaccatgccgtcgggaagcgcagccagcgccgcaagcttgctggcaaagctcaccaccagcgccagcgcgccataggtcccgagccggctatcacgcatgatctcgagcttggccgcgacatcgcggccgccgccgaatccgtcggcgacatcggcaagcccgtcctcatgcagcgcaccggtcagcagcgcagccccgccgagcgtgagcgcggccgcggcaagatccggcacgccgatcgaccgcagcagcaggcagaacagcccgaccgccgccccgatgccggcgccgaccagcgggaacagtcgctgcgcccgcgcaaagctttccggccgcgcgccgtccggatgcggcatcggcaaccgggtcagaaaggcgatggcgatcctgagatcgtcgagccattgattcatggtcggccttcgaattgaactaaagcgcgatgagatcgggcggatcgtcatcgcgctttagcctcgtgattgggcatgatcttctcggaaaaccgcttcacacttttccggatcatgctttagtttgcggcccgctcgacgagggaatcgcatgcagttcaatactctagacgacatccgcagcttttgtcgcgagctgcccgagggcgacgaggccactgccgcagcagcaaccctgcgccagcagaacctgaccaagccgccgggtagcctcggccggctggaggaggtcgcgatctggctggcgcgctggcagcggcgcgaactcccccggctcgaccacgtgacgatcgccgtgttcgccggcaatcatggcatcgccgagcgcggcgtctcggcctttcccgccgaggtcaccgcgcagatggtggcgaacttcgccgcaggcggtgccgcgatcaaccagatcgccaagctcgccggcgccgaattgcgcgtcgagccgctcgaactcgcgcggccgacccgcgatttcacgatggcgccggcgatggatggcgccgacttcctggtcgcgctcgacaccgggtggcgcacggtgccggagcaatgcgatctgctcgtggtcggcgagatgggaatcgccaacaccacggtggccgcgacgctgtgcgcggcattgatgggcgggcgcggcgcgcgctgggccggccgcggcaccggcgtcgacgatgccggcctgctgcgcaagcgcaccacgatcgataccgcgctgaaaatacatcgcaacctgctcgaggatccgctcgccgtcgccgtcgcgctcggcgggcgcgaactcgcggccatcttcggcgccgtgctggcggcgcgcgcaagatcaatcccggtgctgctcgacggcttcgtcgcgacatcggcggtgctgccgctggcgcggcttgcgcccaacggcctcgcacattgccgcgccgggcacgtctcggccgaactcggccatcgcatgctgctgcgcgatcttgagctcgcacccctgctcgatctcgagatgcggctcggcgaagcctccggcgcgggggttgcgatccagctgctgcgcgcggcactggcctgccacggcggcatggcgacctttgccgaggccggcgtctccggcgcggcctgaggccgccggccgagcggaaaagctccccaaaaagccggtgcataccgcccgcatcgggcgcaatcttcgcgtgcgcagcatgacctctgcgcgccgcgcgcctaacctctgcggcgctgggcgccagccggcgcctcggccatgctgaaccagataccggggagaaatcgcgtcatgtcgggagtcctcatcaatctgatcatccagatcatcagcggagccgtcggcggcaatgtcgccgcgggagcggccaagaacatcgatctcggcacgctcggaaacaccatcgccggcgccatcggcggcggcgcgggcggacagcttctgggcatgctgatcccgctgcttgccaattcaggtgctgcgcctgacatcggcagcatcatcggacaggtcgcgggcggcggcgtcgccggcgcggtgctcacggcgatcgtgggtgcgctcaagaaccgcgcagcctgagtccgcctgccgatcgcgaaccggggcatccgtcttgacgatgccccattccggcgcgagcctgtgaccacggatgcgggacctcgatcgcatcggcggcagggattgcgcttatgagaacactcgtcgcggcggcagctctctgcgcaacgctcggctgcgcacatgccgacgttcgcatcctcgccagccccggcgggcaggtcggcccgttcatcgacctgttcgacaaggtgcgcgagtccggcgaacgcgtggtgatcgacgggccgtgcctgtcggcctgcacgctggtgctctcgatggtgccgggcgaccgcatctgcgtgacgcggcgcgccgtgctcggcttccacgccgcccgctcgatcgaccgacgcggccgcacctatgcggagccggaagcatccgaagcggtgctggaagcctatcctgcgccggtgcgcggctggatcatccgccgcggcggcctgacctcgcgcctgctgctgctgcgcggtcgcgagctcgccgcgatctatccgcggtgccggtagagcgcattcatcgtcccgtcatccccgcgcaaaggcgaagccatttcgcgggggatgacggtgatagagaccgctgtccgccctacatcccctgcgggcagttcaccatccaggggatgccgaactgatcgacgcacatgccgaagccgttggagaagaaggtcttgccgaacggcatggtgaccgcgccgccttcggacaggtccttgaagcggcgttcggcctccgcgggatcctcgacctgcagcgagacgtggaatccctgcggcttctggaagtggccgggcggggcgtcggaggccatgatgatctcgccgtcgatcgtgaggcgggcgtgcatgatcttgtccttccagcccggcggggtctgcatttccgcattgccctcgccatagggaaaagtttcctcgatccgcgcgccgagaaccttctcgtagaatttcagcgcggcgccgcaattgccgtcataagagagataggggttgacctgcatcgcgtgctccctgggtagatcctgcgcggtttcttcatgcgaaccggtaaaccacttcgctcgaaacggcgctatttttccgtcagcttcttcagattggcgagaccgacctcgaaatccttgccgatcatgtggtccaggttcatgaacacctgcatcaccttcgacatgaagacagccggaccatacatggtccatgtgacgctggtcgcatctccctgcggcagcattgtgaactcggcggtgttgtggccctcgaacggcttgaggaagtcgagcttgatgacgaccttcgacggcgccgacgactgcaatatctccatgcggccggtgccgacattcttgttgccgtcccaggcatagaccgcgccctgcccgcgttcggcgccgtcgtagctgcgcttcatgtcaggatcccggttctcataaggcgaccagaccgtccactgccggaaatcgtcgatcagcggaaagatccgttcggccggcgcgttgatgctggtcgcacgcgtgacgcggaacgtgctcggcttggtcgccgcgaggatgaggatgacggcaatcgcgaccgcgaggatgaccgcgatgatggcaagggtctcgaacatgatggtctccagcaatatgaattgaaccataactcagcggcggaacggaagcagcgcacgcagattgccgtcgcgcaggtagagcccgccccacaccatcaggccgagatagagcccgaacagcgtgtgggtgaacagcgggctgccaatccgcagatgcgatgcgatcgcgccgccgagatagccggtgagcaggatggcgccgaggatcgaggtcggcggcaccgagtacaacaacgtgcagacgatggtgatgatgccgaggctgcgcgccagcgtatcgctcgcgccccagcccatcttgtccatggtctcggtgacgaccggcaacggcaccagcttgatcgcgccatcgaacagcaggaaaagaatgactacgccgctcatgacgcggccggtgatgcgggcgggctttgagacttcggtgtcgacgatcgtcggcatggcaggctccgtaacgcttggtgatgctctctgccttcatgacgaacgaagggatgcggggccgacagcgcgggtgaagatttttctcaagcgctaccggagttgcgagagcgacgcacaaattgatcagctcgcccggggcttacccctctccccagccctcccccgcaaggtagggctatcgcatatgggccaggacggtgagaaggaagtcgttgctccatcttgcctggagcattttgtggct

SEQ ID NO: 38 - DNA, 84362 bp, Bradyrhizobium enterica
aagaccggccgcaagccgagccgcaaggactggcggatggtgcgcgaggtttttgtcgccgataccgatgaagaggcctggaagctctcgactggcgacatgatgggccggatgatgggcgagtatttcctgccgctgctcggccatttcggcttcaaggattatttgaaggcatcgcccgacgttcccgacagcgacgtcacggtcgaatattgcgcgcgcaacaactggatcgtcggctcgccggcgacggtcaccgagaagatcgagaagatctatcaggaggtcggcggcttcggcgtgctcttggtgttcggcttcgactacaagcacaagcccgaggcctggcacaattcgctgcggctcttgaaacaggaagtgttgccgcggctgaagcacctcgacgcctcggtcggccgcgcggcgtaggcgtcaggatgaacatgcggggcagcctcaacgctgccccgtgcttcatgtcccgcccgatcttacgcccagtgcattgtccggagagccgccgccgacaccggaatgaatgaagcggatcgcacagcaccgcagcaacgggatcgagtgctaccttggatcgatcgatcatcattccatgccgcgctgggtgtgaatcggcgcccaaaagcatcacgaggtcgcggccatgtgaggcgtcacgactttcgcgacgtgacgaaaaggcctagcctgaccgacggcgcagttcatttgatgaggcatagcgatgcgcagccgcgtcagaaaatttgcccatatcctggagcgcttcggccttgccctggcgggcgccgcaagcggtctgttcgtcgccatccatgtcggctcgagcgtgtcggcgctgacctcgcaggcgttcctgctgatcatgatgctgggcggcgcgatcggcttctatctcggcatcgacacgccgccgaagctcttccacccgaaggacggcgcctcgacgcgcaagatcgacgcggcggaactactcagcgcgatcggcactttcctggcgaccatggtggcgttcttctcggttggtgtcgtcgtgctgcgcagcgagccggatatcggctggactgcggcgatcatggccggctgggtgctcggtgtcgccatgcagatcgtcgccggcacgatcgcccgcacccgggtgtaattacgcgccgcgcgccacgcccaatccggcgagatgcgtgtcgacgaactgcgtgagccgctcgcgcagcatctccggcggcaccgcgaccatccgctcctcgaggcccagcgatatgatgccgtggaccgcggagaacatcatccgcgacagtagcgcgacctcgttcggatcgcgatcgggcaacagccgcaccagcggcgcatgcatcagcgcgaacgcatccatcaccatcgccaggatatcctccggaaacggccggtcgtcctccatccggtgctcgaacagcgagcgcagcagattggcgtgctcgctggcgaagccgagataggcgtccgcgagcccgtggagctggcgcaggggatcctcggccgggacggccttgagccgcgcggccagggcctgaacggtctccctgttcacggtcaggatcaggccgtcgaagtcgccgaactcgttatagacgctgccgatggagcagccggcggcctcggcgacatcacgaaccttcaatgatctcaatcctttaatcgcgatatatcgacgcgcgatctcgatcagcagagctcgccgctgaagttttttccggtcccgtcgtgattcttcttgaacaatgttcattttcaggctactaatttgagcgttgctcaagttggcataggaggccactcagatgcagaccctagcacttcaactgaccaccaccttcgtcgatgatgcgatcgagctcgtgaagggctttggccgcgtcgtccactcgctggcgaccgagccgatcgagcggatcgcccgtgcctgcgacgtcgcgggcgtgctggagcagcggcgcgccgagcgcccggcggcacagcatggcggccgctgcaagtcgcgcaactgcagctggtcgccgttcggcggcttgcgtgaactgacctgaagcgctccggccgcaattgtcgccgaaacctcaacaaagcactcaccatgtcgccgcgagctggtctcgagatcgatcaaccccaggtctggataaggtctcatacatctctggcgggcaatgtcgccgcggcccggcgcgtgtggatgtgcgccggttcgaaccgaaccgttgcggaaaagactaaaggctgcggcatttccgtcaatttcaccccgttcacccattctctgcccaaccaattcgcagacctgccagcgccgtgcgcgctaacccaaggaaccggtcatgatcaaggaattgatgacgtcccgccgcttcgcgccgctgttctggtcgcagttctgctctgctttgaacgacaacgtgctgaagaacgcgctggtcatcatgctgctgtatggcgtcgccaacgagcaggggccggcattggttcagctcgcgggtgcggtgtttatcttcccgttcttcgtgctgtcggcactcggcggtgaactcgccgaccgctacgtcaaatcgatcgtcgcccgccggctgaagttcttcgagatcttcgccgcggctttcgccgccgccggtttcttcacccattcgatcccgctgctgttcattgcgctggcgctgttcggcatcgtcgccgcgctgttcgggccggtgaaatatgccgtgctgcccgaccaactgtcggtgtccgaacttgcgaccggcaacgcactggtcgagggcgcgaccttcatggcgatcctgatcggcaccatcgcgggcgggctgttcgtcgcgggtgccagccatatgggctggatctgcgccgccgtggtcggcctgtcggtgctgtcctgggggtttgcgtcgcgcattccggtgacacagccttccgcgcctgagcttgccattaccaagaacccgtggacctcgacggtgcgcctgttgaagtcgctctatgccgagccgcggctgtgggacggcatggtgatcgtgtcctggttctggatggtcggcgcgatcgtgctgtcgctgctgcctgcgctgatcaaggagggcgtcggcggcaccgagggcgtggtcacgctgtgcctcgcggtgttcgcgatcggcatcgctgccggttcgctgttcgccgcgcagctcagccatgttcggccgaatctcgcgctggtgccgatcggcgccatcgtgatgggcgtggtcggcctagacctcgcacttgcgatcgccaccacctcgctcggcaaggacgtcaccgcggctgcgttcgcgacctcgttcggtggcttccgcatgctggccgacttcttcctgttcgctttcggcggcggcctgttcgtggtgccgtcgtttgccgccgtgcaggcctggaccgcgccgtccgagcgcgcccgcatcatcgctgcgggcaacattttgcaggcgggcttcatggttgccggcgcggtgttcgtcggcgcgctgcaggctaccggtctgccgatcgcctggatcttcttcggccttgcgatcgcgagcttcggcaccgtctggttcgtgctgaccaagtggggcaaggagggcgtccgcgatttcggcgcgctgctgttccgcgcgctgttccgcctcgaagtgcgcggcatggagaacctgccgcccgccggcacgcggatgctgatcgcgcccaatcacgtcagtttggtcgacggtccgttgctgcatgccatgctgccgatcgacgccagctttgccgtcgacaccggcatcgccaaggcgtggtgggccaagccgttcctgaagatgatcaagcactacacgatggacccgtcgaagccgttggctgcgcgcgacctgatcaagctggtcgccgccggcgagccggtcgtgatcttcccggaaggccgcatcacggtgtccggttcgctgatgaaggtctatgacggcaccgcgatgatcgccgacaaggccgatgcggtggtcgttccggtccgcatcgagggcgcgcagcgctcgcatctcagctatctcaagaacggcgagatcaagcgctcctggtttcccaaggtgacgatctcgatcctgccgccggtgaagctgccggtcgaccaggcgctgaggggcaaggcgcgccgcaacgccgccggcgccgcgctgcaggacgtcatgatcgatgccatggtccagaacgcgatgctcgaccagacgctgttcgaaggtctcggccatgcctatcgcgaccgcgacaccggcaagcctgttatcgaggacgcgctcggcaccaagctgacttatcgcaagctaatcctcggggcgcaggttctgagccgcaagctcgagcaggggacctcggtaggcgaaaatgtcggcgtgctgttgccgaattcggccggcgttgctgtcgtgttcatggcgttgcagaccatcggccgcgtgccggcgatgctcaacttctcggccgggccggtcaacgtgctggccgcgatgaaggcggcgcaggtcaagaccgtgctgacctcgcaggccttcatcgagaagggcaagctcgacaagctgatcgcggcgatggccggccaggcacgcgtgatctatctcgaggatgtcagagccggcatcagcctctccgacaagattgcgggcttccgcgccggcatcgcgccgcgcattgcgcgaagcgcgaatgatcccgcggtgatcctgtttacctcgggttcggaaggcacgccgaagggcgtcgtgctgtcccaccgcaacatcctcgccaacgcagcgcaggcgctggcgcgggtcgatgccaatgccaacgacaaggtgttcaatgtcctgccggtattccactcgttcggcctgaccggtggcatgatgatgccgatcctcggcggcatcccgatcttcatgtatccgtcgccgctgcattaccggatcgtgcccgagctgatctaccagaccggcgccaccatcctgttcggcaccgacaccttcctcaccggctacgcccgctcggcgcatgcctatgatttccgcacgctgcggctcgtcatcgccggcgcggaagcggtgaaggagcgcacgcggcaggtctatatggagcgctatggcattcgcatcctcgagggctacggcgtcaccgagaccgcgccggtgctcgcgatgaacacgccgatggccaaccgccaaggcaccgtcggccggatttcgccgttgatgcagtaccgcctcgatccggtccccggcatcgaggagggcggccggctgtcggtgaaggggccgaacgtcatgatcggctatctccgtgtcgagaatcccggcgtgctggagccgctgcccgatggttggcacgacaccggcgacatcgtcacggtcgatgcgcagggcttcatcgcgatcaagggccgcgccaagcgcttcgccaagatcgcgggcgaaatggtctcgctctccgcagtggaggcgatggcatcggcgctgtggccgcaggcgatgtcggttgcggtgacgctgcccgatcaacgcaagggcgagcgcatcgtgctgctcaccaccgagaggaatgccgaccgcgccgcgatgcagcgccaggccaagagcgtcggcgcctcggagctttcggtgcctgccgacatccgcgtcgtcgacaaggtgccgctgctcggcaccggcaagaccgactatgttggagcgacggcattggccaaggaactcgccacagcgcctgcgacgcagtccgagcccgccggcgacgagcccgagccggagtcgctgcagcaacacgttgcatgagtcctggcatgagtcttggcaggatggttgtgcttttcgggagcatgttgtcagatagacggcaactgctcccgagaaagcacgatcatgctggacaaactgaacccggctaccgaggacgcgcctgaactgatcgccgagcgctggatcggcgcgctcgatgcggcgcttgccggccgctccgctcatgctctcaccgcgttgttcgcgcccgagagccactggcgcaatatcttcggtatttcctggcattttgcgacattcagtgggcggcaaggcgtcgttgccgagctgctggcccgcgtcgcctcggtgaacgccactggattccgtctcgatggccgtgccttgataccgcgacgcgccgtggtggccggacgggaggtgatcgaggccgtttttaccttcgacacgtcgaacgggccgggcactggcgcgatccgcctgcttccagacgtcgatggaaattccgcggcgtggacgttttccaccatgctcgacttcgatcgcgtctgcgacgcgcgcgccgggcacaccgccgaacaatcccatgcgcgcgatttcgccgcacccgactggctcgagcagcgccatgcctcgcgcgcctatgccgaccgcgagcctgacgtgctgatcgtcggcggcggccatgccggcatcgcggccgcggtcgagtgcaagcggatcgggctcgacgccttgatcgtcgatcgcgagcggcgcatcggcgacaattggcggctgcgctatcgcggcttgaagctgcacaacaagacgccggtcaatctgtttcgctacctgccgttcccgccgaccttcccggactacatcccgaaggacaagatcgcgaactggctggaaagctatgtcgacatcatggagctcgacttctggaccgagacctcgttcgacggcgcgcgctatgacgatgccatgcaacgctggacggtgacgctgcaacggagcgatggcccgcgcacgctgcatccgaagcacatcgtgctcgcgaccagcgtcagcggcacgccgaatatccccaccatccctggcatcgagaatttcaagggcaaggtgctgcattcgagccaattcgcggcggggcgcgaatgggcaggccgctcggtcgtcgtgttcggcaccggcaccagcgcgcatgacatctgccaggagctgcacgctgccggcgccgacgtcaccatggtccagcgcagcccgaccatggtggtcaatgtcgagccggcacagctctacgacaggacctatctcggcgacggcccgccgatcgaggtgcgcgacatcctcaattccggcgtgccgctgccggtcatgaaggtcgcgcacaagatcatcaccgacgaggtgaagcggctcgatgcgccgttgctgtcgcggctggagcgcgccggcttccggctcgaattcggcgaggacggcaccggctggccgctgaaattccgctcccgcggcggcggctactacttcaacgtcggctgctccgagctgatcgccgacggcaagatccgcctgatccaggccgccgacatcaccggcttcaccgccgatggcctcgcgctgaagggcggcaagacgctcgcggccgagctgtttgtgctcgccaccggctacaagggccccgaccatctcgtcggccgactgttcggcgaggatgtcgccgcgcgcgtcggccgggtctggggcttcgacgaggcgacgcaggagctgcgcaacatgtggacgcgcacaccccagcccggcctctggttcactggcggcgccttctcgcaggcccgcatctacagccgcttcatcgcgctgcagatcgccgcgatcgaagccggcacgctttccaaatcattcaactgcaagcacgcgaactgaaggacccccatgccgctcccgctcgatgccgtcattgccaacatcattccgctgctgccgctgcgcgatcccaccaccatgacgccgcagagcgcgcgtgactcgctgcgcgctttggccgatgcgcgcgccgcggtgccgccaccgccggtcgatgtcgccagcaacatcgaggtgcagggcgccggcggcaagctcgccgctcggctctaccgcaacggccgcggctcggcgccgaccgtgatcttcttccatggcggcggctgggtcgccggcgatctcgagacccatgatcgccaggcccgcaacctcgtgatcgagaccggcgctgtcgtgatctcggtcgattaccgccgcccgccggagacgcgctttcccggcgcgttcgaggatgcgttcgccgcggtccgcgacgtggtggggcgcatcagcgaattcggcggcgatctctcccgcgtcggcgtcgccggcgattccgccggcggcaatcttgccgcgaccgcagcgctcgcctgccgcgacgccggcatcgcgctcgccgggcagctgctcgtctatcccgtcaccgacgtggtcggcaatttcgccgatcccgcggagaatgccaaattcccgtcgcgcgccgagaatgccgagggctacttcctgtcacgcgcggtgatggaatggttctgcggccattatctcgcgaaccccgcgctgggcaccgactggcgcgtttcgccgctgcgcgcgacgagcctcaagggtgccgcgccggcggtcgtcaccacggcctggttcgacccgttgcgcgacgagggccatgcctatgcgagggcattgcaggcggccggcgtgcctgtgacctatcacacgggcgatggcctcattcacggctatttcggcctcggcgacgcctcggccgccgcgcgcgccgaggcgcagcgcgcgcgagccgatttcaaggtgttgttggagaagggggtgtaactcctccccgcggggcggcgcgcgttaccaaaactgtgaaaacaaccccatgcaaaggagccggcggtagcccggggcgttccttcaggtgacttgacgcgtcgggcgaaggccgggacccattaccccgattggatgtttggcgcgacgctggggccgcagcccgctgcaacgacaggctacggtggttatgggtcccggcctgcgccgggacgacgatgtgggtggttttgcgttctacaacttccgcctcagcaaccccctcaatcgttcccgatggtgtcgccgaacagctgccaggtctcgccgttgaacttctgcagccgcatcgcctccaccgggaaatagtcggtcggcgacgtcttcaccttgatgccgggcaggaacatcggcagcgcgatgtcgaggttggcggcctgcttcatgatgttctcatgggtgaggtcgtcgccgcattgcttgagcacctgcaccgtcgcctccgccactacatagccgtagacgatcagctggtcctgcagattgccgtcggggaaatagtccttcatgaacgtcttcagcgcgatcacatcgggatcgtccttccactgcggatcgttcggatccttcagcgagtaggacgagatgatgcccttggagtgttcgaagccggccggcttcagcaccgaggacaccgaggtcgaggtcgcggcgaggaagaacatgtcgggcttccagccgatctcgccgatcttcttgatagcctgcgccgcctgctttgggatcgcgtgcatgaacagcacgttggcgccggaggccttcagcttcacgatctggctgtcgaccgtcgggtcggtcgattcataggtggcttccgccaccaccatcttggcggtgttgtccggccccagccccttcttgaagccgttgccgtaatccttgccggcatcgtcgttctggtagaacagcgcgatcttcgcgtccggcttgttggtcagcacatacttggcatagaccgcggtctcggcctggtacgacggctggaagccgatcgaccatggaaaatgctgatagtcgccccacagcgtggcgccggcgccgacgaacagctgcggcactttcttgtcgttgagatatttgcgcacggcaaggccggtcggcgtgcccagcggattgaggatcgcggcaacctcctcctgctccaccagcttgcgggtctgctccacggtcttcggcggcgaatagccgtcgtcgagcgtgatcagattgatcttgcgcccgttcacgccgccccggtcgttgatcattttgaagtaggcggcctgggtcttcgcgatcacgctgtaggccgatgccgcgccggagaatggcgaggtctgtccgagcttgacctcggtgtcgctggcccccagtccgtatttcttctcggcggcctgagcctgcgtcgcgagcacaagcgctgcggctgtgatggccttccatctcatcgtgagcctccctgcggcttttttgttttgttcgcgcgggagagcttacgcaggtcgagaagggcgggcttgtggggagacgccggggcagggatgcgaaaatgcggctattgccgtcgtcccggcctagtgcgcaattgcgcacgggagccgggacccataacgactaatgtttgccgttacgcggaatgttgccccagcgtcgcatcacacaaatagccggggtaatgggtcctggccttcgccgggacgacgatgacgagatagcgccctcagcgatagcgcacgctgccggtggtgaccgggtcggtcggcagcacggtggcgccggcgcggttggcggcggcggaggtgatcatgcccggctcgcccttcaacacattgcggggcgggttgaattcgaggatgacgaggaccgcggtcgccagcaccgccacggcggcggtcgcgatcgcaggcatcagtcttccgcgcgtatcggctgcgcgaacttgcattgatcaattcctttatcggggtcgttctttggacctgacataagaacggccaggcttgttcccaagagtgcggcgcacatgcctcacaatcagttgtaccgtccgtgatgtccttcacggatttcgagccgcgcagcttggccgcatcgaatcggaatcgtgtcggacggcttgtttgcacactaacatctggaagagatcgtggcgttttgcatgcgcctcatgcgctcgtgatgatgcgaatgagtttgtgattaatgccggcgcgagaaggccgttttgccttgatttatagggtttctgaactgggagaggcgtacgcgttaagcgtttcttcacgcacggacagcgcatcaaaatagattcgtgctgtggcgagcgatgacaccgctgtcattggcagcaggtggcaacgggcgtgttcggcagagagtaaccgggcttgtcaggcggtctcgtccgtcgagccgcttggcggaggctttagcgaaggcgggaagcaaccatctctcccgtcgcgagacggtagattgtcttgctcttcactgattgatgtagaggagaatccactcgcgccgcgtttgcgtgcggcgcgcttgtcttgcgtgcactccgcgtccaccgcatccgcctccacgttcgtgacgatcgcgatatgcccctctcagaggaggcgggacgcgctgcttgtacccgtgagtggtcgagaaataggaacattttctttgtacggaccggacagggggtgtcgcgtcgaaaaggcgggcgaaattcgcggtttggcgcgggtcggctgcaagccttgagcatcgcggaatgacgggcagttgcaacggcttgtcacggcaaccgaacttcggcacgatgcgactgccgcgtattcgggcatgttgtgggatgcgggcaggcttccgggtgggccgatattgtttggcagtttgtcttgagtgaccttgcgaccgatcccccgcttgaattcgtcaacggcgtggcgcgcgaacgcggtgggttctggcgccgcgtgacggcgttcgcgatcgacatcgccatcgcaacgttgttgctccaggtgctggcgttcgccctgtatcccgcgaccggcgggcgcgtgcagtttcccggcggcttcatgctgctgtattgcgatcagctcaaggccgtcccccaaggcttcgacgtcccggcaggtttcgtccccaccacgatcgtcgattgccggcagggcctgtttcagctgacgtcggcacgggcgctgaacctggtgcaggtcacgcaaaacggcgtcctcaccacgagaaagcaaatcaccttcctgcgcgatgtcgagggcaaaccggtcgagcaaccgatcctcggcctgttctggctgccgctgttcttcgtgctgcgcctgctgttcgatcgccggggcggcacgccgggtcgccggttgctcggtcttcgcctgactgacgccgcgagcgggcagcgtccgccatcatcgagcgcggtggtgcgccgctatctgatgcaggcgttgccgctcgcaccctacgccgtcgagccggtgctgctgtccttgtccggggtgcacatcgtgccgctcggcgaggcctggtggatggcgttgatcctgcccacggtgtgcggcggcatcggcgccctgatcgcgctgcataacgtgatctatcgcaaggatgccttctacgattcctttgcgcagaccagcgtgctgcggaccgatggcgccggtgccgtgatgcgggccgcggccatgccaccgttgctgccgccgtcattgccggacgtcacgccgggtcaagtcgaagctgctcttttcgacgggcccgagcaggctgctgccgatgcattgggcgttgcccagccgagcgcagctgcgccgccgccagccgtcgtgcttcctccgcccttgccgcggccggccaattacttcgtgcggcactggcgcggcgagctgtcgctgccggtctcctattgggtcaacggcaccgcgctcggcgccggcctcggcgttgcgattgccgtggtcggccatctgctctacgagcgcggcagcgagtatccggcgttgtggctgggctcggtgatcgcgatctgggcgtcgatcgtgctgttgcggatctgggtcaccgtcggcgtctggcgttcggcctcgcgctaccgggcgcttggcaagtcgttctggggcggtgcggccaaggtcaccaccgcactcggcgtggcgtacctcgcctatagctgcctgttcgtcgcggcgccgcagatcgctggtgtctacgagatcgtctccggcgacacccgcctcgggccgcaccagttccgcgtgctgttgaacggccagatgctggaattctcgggcggcataaccttcggtgtcgccaaggagctcgagggcttcctcaacgcgatgagtgacctcaaggtggtccggctcaattcgatcggcgggcgtatgaacgaggcgcagaagatggccgacctgatcaaggcgcgcggacttgcgaccttcgtcaaggacacctgtgtctccgcctgcacggtggtgtttctcggcggcaaggagcgcggactgttcacaggcggcggcaagctcggatttcaccaggcttcatttcgtggcatgaccgcggccgatcgcagctcctcgatcgaacgggagatcgcgcgcctgcagcgcttcggccttagccgcagcttcgccgagcgcgccatgaagacgccgccgagcggcatgtggtaccccgacaaggacgaactgctgcgtgaaaaggtggtgacacggctctacgcgccgccgccacctgcgaacaatccagcgagcggcaaccagccgcccgcgacggcgatgccacagacatccgcggcggcaagcaacgccgcggttgccgcaccgccggcgccggctacgccgcctgccgcggcgggcacgggccacgctttcccgacgcccggcccgccattgcatctggaatccgggacctatcagaccgagcgcgtatggatgcagccgtttccgaccaagccggcatggccgacgccggccgcgaaggatgccgagggagagaagaaagaatagagcgacgtatcggttcgatggtggagcgctttgccttgccgaaaccggcgaaacgggaagcgtcgcttgcacgcttccatgcgcgcgtctcgcaaaggacaggcggaaaacaaaaacggccaggtcatcgacccggccgtttcaaaactctcttcgcgaattccgctctcgcagctcgctcagctcgccttcttcaccggggccggcttgccgaccttcttctcgatcgcgcgcttcaggtcgagggcgcggggcgagagcacgtcggccttggccttgagcaggtaggcgtcgaggccgccattgtggtcgacgctcttcagggcattggtcgagacgcgcaggcgcacgttgcggccgagcgcatccgagatgaaggtcacgttggccaggttcggcaggaagcgccgcttggtcttgatattcgagtggctcaccttgtggcccgtctgggggcccttggccgtcagttcgcagcgccgggacatcttacaaaatccttattgcatccccgccgctctgccaggcgtgcaatcacacggcccgcgcgggggttttgaattcgcgtccattttccaggaaccgcgggtgtatagggggagatcgcccaaccgtcaagattatatcgccgcatggcggtatcggagaatgccggttcataagccgttccagccacttaacggctgaaatggcaaccatataaagggcgtattcggctgcaagtcttggttccataagagatgcgcacgttgtccggccgaattgaacgtcccgatggacagcgaacagagcgccgatagcaggaccgtcaggtaggttaagtgaccaccgccattgccattttgcccccgctcggccggctgctcggcctgtgcgcgggtgccttgctgctgttttgcgccgagcgcgccaacgcgcaggggcggctcgatgcccagtatgaggcaacgctcgccggtatctcggtcggcaagggcagctggaccatcgaaatcggcgacgacaccttctcggcctcggcccagggcggcaccgcgggcctcttgaaggcgttttcgggcggcagcggctcgggcacctcgcagggccgcgtcgtcaacggttcgctcgtggccgcctcctacaccgcgaccaccaccacctcgaagaagtcagagacgatccggatggtgctggccaatggcggcatcaaggaatcttcgatcgagccggagccgcctgtcgatgccgaccgcctgccggtgtcggacgcgcagaagaagaacgtgttcgatccgatgaccggctcgttcctgcgtgcgcccggcaatgccgaactgatgagcccggatgtctgccgcaccggcgccggcgtgttcgacggccgcatgcgttacgacctcaagctcgatttcaagcgggtcgagatcgtcaaggcggagcgcggctatcacggcccggcgctggtctgcgcgctctatttcgtgccggtctcgggctacatcccggatcgccccgtgatcaaatacctcgccgcccagcgcaacatcgagatcgccttcgtgccgatcgcgggcacccgcctgctggtgccgttccgcatgacgatcccgactccgctcggccaggccatgctggaagcgacctcgttcgtcaccacagccgcgccgccgcgcgtggcgaagacgcagtagcctctcttcgcttccccccttgtgggagagggtgcttcggaggcgctgcgcgagcgccacggccacggcatgcaacaaacgtcatggaatccggttgactcttgcccggttctgattcgactcggccacccctggaacttaaggaattcagtccgcatatcccctgcttgtggagccctctcaaacttgatctagtgccgccgccgtcagcctacccgagatgttgcggtgaacgtttcaggcctggaatggagtcaccgattcggccgcgattcgttctagactcgttccgaagcttaagaacggcgcggaaagcgtcgcattgtgagacagattcggcctcagatggtgtccatgactgcttttccgtcattgcgagcgaagcgaagcaatccatgcttcgggtatgcgcggatggatggattgcttcgtcgcttcgctcctcgcaatgacggctgacagacagtcggctgccgcaacaagaaacacctgcaaaatatggctttctcaacttcgttcggaaatgaccgcgtgcccggtgctggtgtcaccgcggtgctgggcccgaccaacaccggcaagacgcatctcgccatcgagcgcatgctggcgcattcgtcgggcctcatcggcctcccgctgcggctgctcgcgcgcgaggtctacaacaagatcgtcgatcgcgccggtgtcgacaatgtcgcgctggtgaccggcgaggagaagatcaagccgaaggcgccgcgcttctgggtctcgacggtcgaggcgatgccgcgcgatctcgatgtatcctttctcgccgtcgacgagatccagatcgccgccgatctggagcgcgggcacgtgttcaccgaccgcatcctcaaccgccgcggccgcgacgagacgctgctgctgggcgctgcgacaatgcgtccgatcatagagcggctgttgccgggcgcctcgatcatcacgcggccgaggctgtcgcagctcgaattcgccggcgaccgcaagatcacgcggcagccgcggcgcacggcgatcgtcgcgttctccgccgatgaagtctacgcgatcgccgaattgatccgccgtcagcatggcggcgcggctgtggtgctgggctcgctgtcaccgcgcacgcgcaatgcgcaggtcgcgatgttccagaacggtgatgtcgattacctcgtcgccaccgacgcagtcggcatggggctcaatctcgacgtcgatcacgtcgccttcgcctccgaccgcaagtatgacggctatcaattccgccggctgacgccggccgaattcgcccagatcgccggccgcgccgggcgcgcgacgcgcaacggcacatttggtacgacggggcgttgcgcgccgttcgagcccgagctcgtcaatgcgctgcagaaccacaccttcgacagcgtcaagatgctgcagtggcgcaacgccaggctggatttctcctcgctcggcgcgctccaggtgtcactggcgcaggcgcccaatcatgaggcactgacgcgagcgccggtcgccgaggaccagcgcgtgctcgaacatgtcgcacgcgatgccgaggtgcgcgaatgggcgcatgggccgaaggccgtggagcggctatgggaggcctgccaggttccggactaccgaaagctgtcgccggccgcccatgccgaactcgtgaccacgctgtacggcttcctgatgcaaaagggtcgtatccctgacgcatggtttgcggcccaggtcgaccaggccaaccggaccgacggcgatatcgacacgctatcgggccggatcgcgcagatccggacctggacctttgttgccaaccggccggactggctctacgacccggaccattggcaggggatcacgcgcgagctcgaaaataaattgtccgatgcgctgcatgaacggctcacggagcgtttcgttgacaggcggaccagtgtattgatgcgccgcctgcgggagaactcagttttgaatacggaaattggcaagaccggtgaagtgatcgtggaaggccatgcgatcggccggctcgatggtttcaccttcgcacctgatgcggccgaggccggcagcgacgccaaggcgctgcaagccgccgcccagcaggtgctggcgcgcgagatcgatgcgcgcgcggagaaactgggtgcggcgcccgacgagcagttcgtgctgacctccgacggcaccatccgctggaccggcgatgcggtcgccaagctggtcgccgccgacgacgcgctgcatccgcggctgcgcatcatttccgacgagcggctgaccggcgcctcgcgcgaggcggtgcagacgaggctcgacctctggctcaagacgcatatcgagaagctgctcgggccgctgttcgaactgtccaaggccgaggatctgcagggcatcgcccgcggcatcgccttccagctggtcgaggcgctcggcgtgctggagcgcaccaagatcgcggccgagatgaaggatctcgaccagccctcgcgcgcggcgctgcgcaaatacggcgtacgcttcggcgcctaccacatctatttcccgcaactgttgaagcccgcggcgcgctcgctggcttcgctgctgtgggccgagaagcagagcaatgtcgacatggctgcgctgtcgaatgtgcagcatcttgcctccagcggccgtacctcgttcccggtcgacaaggccctgccgcgcgatggctatcgcgtgctcggctatcgccagtgcggcgagcgcgcggtgcgcgtcgacatcctggagcggctcgccgatctgatccgcccggcgctggcctggcgcgagacctcgcctggcgagaagcccgccggtgcgttcgacggccgcggctttgtcgtgacccaggcgatgacctcgctgaccggctccgccggcgaagactttgcttcgatcctgcgcgcgctcggctaccgcatggaccgtcgtccgccgttgccgccgaagcccgtcgcggccacgccggtcgaggccaccgagacggtcgccgccgagaccaccgaggcaccagctgccgaagcgtcggtcgaggccggttctgacgccgccgtcgatgcgccggccgaggccgccgccgagctcacggccgatgcgccggaggctgcgacggatcaggtcgtgtccggcgatcccgcgccgtcggccgcattgctgcccgacgtcggcttcgccgaggtcgtcgccagcgaggcgacgccggtcgtgatcgagaccaggcccgaacccgagcccgtggcggaagttgccgcggagcctgccgctctcgccgaacagccagttgccgaggtgcccgcttccgaagctgcgcctgcggtggaagccgctgcggaggcgccgtccggggccaccgctgaggcaccggcgcagaccgcgggcaccgaggccgcaactgccgaggccgctcctgcgccagcggagacgccggctgagccgcaactggtcgaagtctggcgtcccggcggccgctccgacgagcgccgtccgcatcatcgcggcggtcacgaccgcaaccgcggccgccaccagggcaagcccgccgagggcgcacaggccgcggaaggcggcggcgagggcgagaagcgcgagcatcatcgccgtccgcgccgccatcaggatttccgcacgccgcgccccggcgcaccggccgatgcgaccgcagccgcggccgcgcctgccgacggcgcaccggcgcgcgacaatcgccaggataatcgtgacgaccgcggccagcgccgcgagcgcttcgaaggcaagggcttcgaaggcaagggtcgcgatcgcgacaacaacgagcggcgccgcgacaacaagttcggcggcggcgatcgcaagggcgagcgcggtgatcgtgaccgcggcggccgcgacaagggcggccgcgacaaacgcgagagcggaccgtcgcaccggccctatgcctcgagtgcgccgcgcgagcgcgaccggccgatcgatcccaactcgcccttcgccaagctcgctgccctgaaggagcagctcgccggccggaaggaatagtgcaaccctggtctgaagcttggatcgacagcggctcgataaatggctgtggcacgcgcgggtggtgaaggcccgcaccagcgcggccgagctcgtcgcatcaggtcatgtccgcctcaacggcacgcgcgagaaatcgccgggccatgcggtgaagccgggcgatgtcatcaccgttgcgctcgacaacagcgtccgggtgctcaaggtgatcggctttgccgagcggcgcggcgatgccagttcggcgcgcgagctgtacgaggatttgcaagggagcaatttgcaagccggtaaggagtagttatctcacgtctgttatttcggccgaagcatgatccggactgtggggccggacgcgcgataggatcatgctcccaacaaaaccggctggcagggtcgccagaatgcaggtgtttttcggggccggcttcccttgcggctccggtattcctgcgctacgcaaccccagaaaaagtggatcgtttcggagttttggatgacctacgtcgtcactgaagcctgcatcaagtgtaaatataccgactgcgtcgaggtctgccccgtcgattgcttctacgagggcgagaacatgctggtcatccatcctgacgaatgcatcgattgcggcgtatgcgagccggaatgtccggccgacgccatcaagccggacaccgagccgggcctggaaaagtggctcgaggtcaaccgcgactacgccaagagctggccgaacatcacccagaagaaggactcgcccgaagacgccaaggagtgggaaggcaaggaaggcaagttcgagaaatatttttctccgaatccgggcagcggcgactgattcgccttacctcttcgggactaccccgataagggcaggcttggcctgccgcagccgtccgttcggccgcggatttaaccctaatgacggacatatgacctgaggatcccctgttatgcccggaatcgggcgtaaatcattgatttttgcggaaaatgtgctatattcagcacattacaggccaagaaccccctgccatgcgtaccttgtggcttcgaggttcccgcaacatcgaacaggggcgtggcagtttccgcgcgcaggctgtgtcacagaaaacgcgtaaaaagagtgcttcaaagacgacgaaaaaagccgctgtcgttgctcgcagcgcaaccaagggccgtgccaaggcgtccgtgaaggggcctaagaaggcggcggctgcaaagtcctcaaagaacaaaagaagcgtgatgccagaaaagactgccaagcctgccgcgaaggcgacggctgcgaaacccgctgccgccgcgaaggtcgcccccaaaactgctgctgctgcgccgaagccggctgctccgaaggctgccgtccccgccgccgctccgaaggttgccgccaagccggccgccgcgccgcgcgtcgaggagccgaagaaggtcgtgacccagcgtcagggcttcaaggccaatgaattcgtcgtctatcccgctcacggcgtcggccagatcctggccatcgaggagcaggagatcgcgggcgccaagctcgagctgttcgtgatcaacttcatgaaggacaagatgacgctgcgggtgcctacggcgaaggtcgccaatgtcggcatgcgcaagctgtcggagccggcgctggtcaagaaggcgctggagacgctgaagggccgcgcccgcgtcaagcgcacgatgtggtcgcgccgcgcccaggaatacgaagcgaagatcaattcgggcgacatcgtcgcgatcgccgaggtggtccgcgatctctatcgttcggaatcgcagcccgagcagtcctacagcgaacgccagctctatgaagcggcgctcgaccgtctgtcgcgcgagatcgccgtggtccagcattcgaccgagaccgaggcgatcaaggagatcgaaggccagctcgccaagagcccgcgccgcggcgccaaggccgaatctgctgaaggcgacgccgagggcgatgccgacggtgaggatctcgacaacgatggcgacgataccgccgtcgaggacgaggcggcctgaaagggttcgacggactgaaaaacaaaagcccggtcgcaagaccgggctttttgctgtctgaagcagacttccgtcgcgccacggtcctccgtcaagcggcgcagcgcggaactgtgctccgcgcgcgccacgcagccttgcgcaattgccgcttggcggatcgccgcgactcatgacctcttgcggcgcgctggcggcgatatcgcgccggcaaggggcgcggcatgcttgcgggacgatcgctggggcgcgggttcgacacgctgtgggccgcgttcgcggtttcgtcgctcggcacgcgactggccttcgatgccttcccgctgatcgcaatcctcgtgctgcatgtcgggccggcggcggtctctgcactcgctgcggtcgggatgctggccggtgccgtgctggcggtgccgctcgggccgtgggtcgaattccgccgtaagcggccggtgatgatcgcaatggacctgatccgctttgccgcgatgatgagcgtcccgatcgcattcgcgctcggccagctcagcttcatccagctcgtcatcgtgtcggtgatcgcggcggccgcagacatcacgttccgtgcagcgagcggcgcctgcctgaagagcctggtcaggcgcgaggatctggtgctcgccaacgcgcggctcgaatccaccatgtggatggcgaccgcggtcggcccgccgctcggcggcgtcgcgatcggtctgttcggtccggtcgtcaccgtgatcgccgatgccgtcagcttcctgttatcggcggccggaattcgttcgatcggcgcgaccgagccggagcccgcacggcgcgcggcgccgtcctacagcatgaccgatctgctcgcgggatggcgatacatcctggcacatccggtgctgcggtcgctgttcctcaacaccgtgctggtcaatggcctgatcatggcgacggcaccgccgctggcgctgctcatgctccgcgatctcgcattcgcgccgtggcaatacggcctcgctttcggggcgccctgcgtcggcgggctgctcggcgcacggttggcgccggtgctggcggcgcggttcgggcagcacaacatcctgctcgctgccggtgcgctgcgcgcgtgctggtcgctcggccttgccttcatacctggcggcacggccggcatcgtggtggtgctctgtcttcagctcggcctcgtcacctgcgccggcgtcttcaatccggtgctggcggcctatcgcctcggccatatcgaaatggagcggaccgcgcggatgctggcggcctggtcgatctcgagcctggcgatgaccgcgctgctgacggcgctgtggggcgtgctggcgggccttgccggcgtgcgcacggcgattgcgctcagtggcctgctgatgctcctgaccccgctgctgctgccgcgccgcgcgctcaacatgagcgctgcttgatgctgcggccgcggtcctcgtaggtagccgtggatggagttgctacctcacccgctgcttctccagcttccgcgccagcgtgcggcggtgcatgccgaggcggcgggcggcttcggagatgttgaagtcggtttcgatcagggtctggtggatgcgttcccattccagcgtcttgatcgaggtcggccgcgcgccgacctcgatggcggcgttgccggcggctttctggaatgcggcctcgatgtcgtcggtgttcgacggttttgcgaggtagtggcaggcaccgagcttgatcgcctccaccgcggtcgcgatgctggcaaagccggtcagcaccacgatcagcatctcggggtcatgcgcatgcagcgcctcgacgcaggcaaggcccgaggcgccgccggcgagcttcaggtcgaccaccgcatagcccggcgattgctgctcgagcagcgcgcggacctcgtcgagcgaggccgataccgcgacgccgtagccgcggcgctcgaacgagcgcttcagggtacgggcaaagccggaatcgtcctcgacgatcaggagctggcggtcatccgtcaagatcgtctccgatcgcaagcgtcgcgagcggcagctcgagtcggaccgccgcgccgatgtccggccggttgcgcgccgtcaccacgccgccgagcttgcgcaccacgttgacgaccaggaacaggccgaggccgctgccggggttgcccttggtcgactgatacggcttgccgatatgtgaaagcatctcgcgcgagaagcccgggccgcgatcgttcaccgacagcagcagcttgtcggcattgcgctcggccatcagctcgatccagtcgcgcgagacctcggcggcgttgtcgagcacgttgaagatcgcctgcttgagcgcgatatccgagacgatcgccaggtcggcgccgaacgcattgcggaaatacaacgtggcggagggccgcgtggtccgccattcctgcaccagtgcggtcaggaacgccgccaccgtggtcggcgaggagccttcgccgcgggcttcgccggccgatagcaggatgcccgtcacgatcgacttgcagcgctgcaccgagatttccatctcgccgaggtcctgcgacagctcgggatcggaagcgagtgcaggcatccggcgccagtcgcccaggatgaccgagagcgaggcgagtggcgtgccgagctcatgcgcggcgccggaggccaagaggccgatccggacgatgtggtcctgctcggtggcatgctggcgcagcgcggcgaggcggaggtcgcgatcgcgcaggttgcggttgatccgggtcatgaacaccacgagcagtaccgcgtcgagcacgaggccgatgaaggtgccggcgatatagaggttgaaggcgtcggcaaagccgtgctgcgggagctccagcgggcggtagtagctggtcagccaggcgaagttcacgcagaccagcgccaccagcgaccaggtcgagggcgcatcgagcagcaccgcgccgagcgtcacctgcagcagatagagcgaggtgaagggattggtggcgccaccgctgagatagagcagggcggtcagggccgcgacgtcgagcgccagcgcgatcaagagctcgcggttgttgatgtccgcccggtagcgcagccacagcaggctgacgacattgagggccaccagcccggagatcacggcggccaacggcagcagcgggagggcaacgcccatccagaactgcacaaagccgatggtgatgatctggccgatcacggcgatccagcgcaactggaccaaaagggccatgttcttgcgattggtcgcgatgtcggcgggtgctgcgagatcgaacggcatgccggcggccgcgctcacggcggacggcatcacggccctgccggtcgcggcgttctcctcatgcagatccgatgtgcgctcgagcatctgggcctgggtcgcgagacagattgcgggctgcgccgatcaggcggcgcacggcggcgcgccttgaactccaccctggatcggaggcgccggcacggttcctgctgacgatgcgcaggagcgtgccggccagcataaaggccagcgcgaaccatgtcagcgcgtaaatcaggtggttgttcggaaaccgcacgatcgtgagtccgccgaggggggtgccgcccggattcggcgtcgcatcggcgtcgatgaagtagggggcgacctgcgacaatccgcgcgtggcggcgatcgcggcgacgtcgcgcgaataccagcggccggccgccggatcgttgctgcgcaggaagccgcccttcggttccgacatccgcagcagcccggtgacgctgaccggcccctgcgggttgccgccgctgcgcgtcgcgggatcgcgtcggtcgggcggcacgaagccgcgattgaccagcacgatggctccgcccgtggtttgaagtggggtcagcacccagaagccgggaccttcgttcgtcacagcctgcaccagcgtctcgtcggcgttcaggaaggtgccgtgcacggtgatgcggcggtattcgtcgcgcgcggccgcgacatcaggccatgacgagggcggcggcggggcgaccggtgccgcatgcatgcgctgctcgacccgttcgatcagcgccagcttccaggtcctgcgttcgatctgccagacgccgagcgcgctcagcagcaccacgcccagcatgccgagcgtgagcaacacgtaacggcgcagagcaatcttgcgcccgcgtcgggactgcactccctctcccgcttgcgggggagggctggggtgggggtgtcgccgcgaatcggaagaatcattgagtggagggagcccccacccgccgcgcgctgcgcgcgcgtcgacctcccccgcaagcgggagaggtgaagaggggcctgaggcgccccgcatcgtcacggcatctggctcatgtcgtgcatcggcatcatgttgatgttgagatgatgcatgacccacagcgagccggtcagcgcgatcaccaccatgatcacggtgaatatcagcgccatcatggtccagccgttctccgaccgggtgttcatgtgcaggaagtagatcatgtggaccacgatctgcaccgccgccagcaccagcacgatcagcgcggtgaccgccttgtcggcgatggtcccggtcatcaccagccagaacggaatggccgtgaggacgaccgagaggccgaagccgatcagatagctcttcagcgagccgtgggcggcgccgccatggtcgtcatggccgtggccgccggcattggcttcgagggtatgagcgtcggcgtgagaatttgatgtcatcgcagcattcccaggagatagacgaaggtgaagacgccgatccagaccacgtcgaggaagtgccagaacatcgacaggcacatcaggcggcgccggttcgccgtggtcaggccgaaacgcgcggtctgcaccatcagcgtcaccagccagaccaggccgaaggtgacgtgcaggccgtgggtgccgaccagcgtgaagaacgacgacaggaaggcgctgcgctgcggcgtcgcgccctcatggatcatgtgggcgaactcggtgagctcgatgccgaggaaggcgaggccgaacaggccggtgatcgcgagccagagctgggtctggccgaccttcgacttctccatcgtcagcatggcgaagccataggtgatcgaggagagcagcagcatcgtggtgttgagcgcgaccagcttgaggtcgaacaggtccttcggcgccgggccggcggcatagttgccgccgagcacgccataggccgcgaacagcatcgcgaagatcaggcagtcgctcatcaggtagatccagaagcccagcatggtgctggcgccttccggatgatcgtgctcgtcgatgacgtggaatatcggctcggagccttggacggagatttgggtggttgctacgctcatggctgggctcccgcggcgagaacgcgcgtccgcgcatcttcggtccgcaccacctcatccgccgggatgtggaagtcgcggtgatagttgaaggtatggccgatcgcgaccgcgagcagcgcgacgaagctgacggcggcgagccaccagatgtaccagatcagggcgaagcccatcacggttgcaaggccggcgaggatgatgccggtgccggtgttggacggcatgtggatcggcttgaagccggtcagcggacgcttgtagccgcggcgcttcatgtcccaccaggcgtcgttgtcgtagaccaccggagtaaaggcgaagttgtagtccggcggcggtgacgaggtcgcccattccagcgtccgcgcattccagggatcgccggtggtgtccttgagctgctcgcgcctgaggatgctgaccgcgaactgcaccagcatcgcgccaatgccgagcaggatcaggaaggcgccgaaggcggcgatgacgaaccagatttgcagggacggatcgtcgaacacgcggagccgtcgcgtcacgcccatcaggccgagcacgtagagcggcatgaaggcgaagtagaagccggagacccagaaccagaacgacagtttgccccagaacggatcgagcttgaagccgaaggccttcgggaaccagtagttgatgccggcgaacaggccgaacagcacgccgccgatgatcacgttgtggaaatgcgcgatcaggaacaggctgttatgcagcacgaaatcggccggcggcaccgcgagcagcacgccggtcatgccgccgatcacgaaggtcagcatgaacgccaccgtccacatcatcggcagctcgaagcggatgcggccgcggtacatcgtgaacagccagttgaacatcttcgcgcccgtcgggatcgagatgatcatggtggtgatgccgaagaacgagttgacgctggcgccggagcccatcgtgaagaagtggtgcagccagaccaggtaggacaggatggtgatgacgacggtggcgtagaccatcgaggtatagccgaacaatcgcttgccggagaacgtcgcggtcacctcggagaagatgccgaacgccggcagcaccaggatgtagacctccggatggccccatatccagatcaggttcacgtacatcatcgggttgccgccgaagtcgttcgtgaagaagttggtgccgacgtagcggtcgagcgacagcagcgccagcaccgcggtcaagaccgggaaggaggcgacgatcaggacgttggtgcagagcgaggtccaggtgaacaccggcatcttcatcatcgtcatgcccggcgcgcgcagcttgacgatggtgcagaccagattgatgcccgatagcgtcgtgccgacgccggcgacctgtagtccccatatgtaatagtcgacgccgacatcaggactgtagccgatgttcgacagcggcgggtaggcgagccagccggtgcgggcgaattcgccgacgaacagcgacatcatcaccagcacggcgccgccgaccgtcatccagaaagagaaattgttgaggaacgggaaggagacgtcgcgggcgccgatctgcagcggcaccacgtagttcatcaagccggtcaccagcggcatcgccacgaagaagatcatgatcacgccgtgggcggtgaagacctggtcgtagtgatgcgccgggaggtagccgtcagagccgccaaacgcgatcgcctgctgcatgcgcatcatcagtgcgtcggcaaagccgcgcagcagcatcacgatgccgaggatcatgtacatgatgccgatgcgcttgtggtcgacggtggtgaaccactcgcgccacagatagccccagagccggaagtaggtgacgagcgcgaacagcgcgaggccgccggtcgcgaccaccgcgaaggttccgaccaggatcggctcatgcagcggcagcgcatccagatcgaggcggccgaagatcatcttgacgagatcgggattcatgcggtcctcctcaggactctgatttcggacgctggccgagcagctgggatgtcgacgacggatgcgcgggcgagaacggcggacgcttcagcccgaagccgcgcagcggcgtcaggtcgagcggcgcggtgacctcgcgtgacggcgcgttcttgatctcgtccatcgagcagatgccggcgacgaaggtcggctcggtgccgagcggcgcgccgcggcgggcgtatttgtcgtaagtcagcggcagcgtgttgttgaggccttcgcgcccgaggccacccttggcgtcgatcgccatcatctcactcatgcacatcttgccgggctcgacgcacatgttgaggatcgccttgtatagatcgcgatcgacggtgccgtagagccgcaccggatcgtcctggctcggacgctcgagctgcagatagtcgctgcggccgagcatgttggtgctggccttggcgttggcgacccatttgtcgaagccgccggccgacaggctcttgaattcgaagtgcatgccggagaagccggcgccgctgtaattggcggagaagccgcggaagctgccttccttgttggcgaccgcgtgcagcttggtctccatgcccggcatggcgtagatctgaccggcaagcgccgggatgtagaacgagttcatcacggacgaggccgtgatgcggaagcggatcgggcggtcgacgggcgcggcgagctcgttgacggcggcaacgccgtaatctgggtagatgaacagccacttccaatcgagcgcgaccacctcgacattgagcggggcgtccttgctctcgatcggcttgtcggcggcgatgcggccgagcgagcgatagggatcgagcagatgggtgcccatccaggtcagcgcgccgaggcaaatgatgatcagcagcggggcggaccagatcaccagctcaagctgggtggagtgatcccactccggctcgtagggtgccgcggtgttggactggcggtagcgccaggcgaagaagatggtcagcgccatcaccggaagcacgatgatgagcatcaggatggtcgagatgacgacgaggtcgcgctgctgggcggcgatgtcgcccgccggcgccaggacgacgaaatcgcacccgccaagaagcgccgcgaacggcaataaggccaataatttcaaggcgcgcacggctcaccccacttgaattttatgagttccgccaaggggtagctgcgatgcagcaaagttgacattggacaatttgtccaatgttgcactgcgggatgggaggtcagaaggtgagatggaccgcgtggcaaagcgcctgcggtggcatctctaaggatggatttcggcgcgatggcacaggccccagcaatggctcacggcaccccgaccgcgtcaggtcacgggcaggcgaaacccggcgaaatcgccatcggcgtcatcatcgggcgcacctcggaattcttcgatttcttcgtctatgcgatcgcctcggtgatcgtgttcccgaagctggtgttcccgttcgtcaacgaactgaccggcacgctctattcattcggcatcttcgcgttggcgttcgccgcgcggccgctcggcaccgtgatcttcatggcggtcgaccgccgccacggcaagggcgccaagctcgtcatcgcgctgttcctgctcggtacctcgacggtggcgatcgccttcctgcccggctacgacacgatcggcgtcgcggcgatttggctgcttgccgccgcgcgcgtcctgcagggcatcgcctggggcggcgcgtgggatggcctcgcctcgttgctcgcgatgaactcgccgccgaacaagcgcggctggtacgcgatggtgccgcagctcggcgcgccgctcgggctgatcgtcgcgagcgcgctgttcgcgttcttcgccggcaacctctcggcggatgatttcttcgattggggctggcgctatccgttcttcgtcgccttcgccatcaacgtggtggcgctgttcgcgcggctgcgcatggtggcgaccgatgaatattccgagctgttcgaaagccgcgacctggagccggcgcgcgtcggcgagaccgtcgcgcaggaaggccgtcacatcctgctcggcgccttcgcgccgctggcgagctttgccctgttccacatggtcacggtgtttccgctgtcctgggtgttcctgttcaccagggaaagcccggtgcgcttcctgatcatcgagatgatcggcgccatggtcggcgtcgttgcgatcgtcgcttccggcatgatcgccgaccgcgtcggacgcaagccgctgctgcttggctcggcggtcgcgattgcggtctatagcggttttgcgccgcaactgctcgacgccggtgcgttcggcgaaacggtgtacatggtgctcggcttcgtgctgctcggcctgtcgttcggccagtcgtcgggcgcgatcgcctcgagcttcgcgcgcaactatcgctacaccgcctcggcgttgacctcggatttcgcctggctgttcggcgccggcttcgcgccgctcgcagcgctgctgctcgccacccatttcggcctgatctcggccggcgcctatctgctgtccggcgcggtgtggacgctgctggcgctgtggctgagcggcctgcgcgaagccgaagtcaattgatcaggcagcctcgttcgtcttgtggcccggattgcgctgcgctgcatccgggccacggaccttcgttaccggaacaatccgtcgacgcggaacgaatagccgaggccgacaatgtagttcggtgagttgcggttgagcccgaacgcgacatgaagatcgagctgctgggtcggcgtgatccggtagacgccgccggaattgatcagctgggtcggccgcgcgccgcccggatagtcgccgacatattcggtgaacatgctgatccgctcggtcagcttcttctcgatcacgaaggtcgcttccgacacctgccggccggtcagctcggcagggtggaagaattccgtgaacatgccgctgacgccccagccgtcatgcagctcccatgaccatggcagctggatgtagggctgcgcgccacgaccgacgatcgtagtcgcgccggttggcagcgcgacgccggcggtgatcgacagggcgatcttccccggcagcgggctgatctgccatttgatgccgggcgcgacgtcggaaaagcccgatacgccgggcgatttcacgctgccggaccagctcggcaggtcgaccagcacctcgaggcagggcgcgatcccgagccgccagcggctgttgctgccgtcgacgctgcggccggcggagcggccggtggcattgacgccgttctcgctctgcaggctcccgaccggcacgacgatacttgaattggtgacgtcgggccggtcggtcgcaatttcgtcgctcgacctggggcagccgtccgcgcgcgcggcggtggtggctgctgcggctgtgagcgcagcgagcagcatgcacgcgagtccggcaagtcgagcgacggcgccgagccgattgcgaaacactggggatgctccaatagcccggcgccgctgcggaggtggcagctgcgaattgagatcggtgggccgcgcggatattccacgcgggcgggaaaaaacttcggcaacaactgccattctcggcgatcgatccggcttgcgtccagctcaatcgcgaaccggcggaattcccgggaatagatcgccggtggggctgctcctgttgtggtgacaaacaggagacccccgggaatgaccatccgttcgatcgcaggcgcgctggcgccgcggcacgccaaaaccgccgcgatggcggcgatcgcgatcctgctcgccctgaacagcgcccgtgcggcgggagatgccgcgcgcggcgccacgctgtatcagggctgcggcgattgccattcgatcgagaagaacgacgtcggaccgatgcacaagggtgtcgtcggccggcttgccggatcggtcgcaggctacaattactcgcctgcgttgaagaactcgaagatcgtgtggaccgaggccaatctcgacaaatggctgaccggtcccgatgcgatggttccgggcaccaagatgttctacgaggttcaggatccgagggatcgggccgacatcatcgccttcctcaaggagaaggcgaagtaggccgttttctctctccgtcgtcccggcgaacgccgggacccataaccacagggctgcgttgttcgagcgcgctgtggccccagcttcgtccgacaatgaacgacggtggttatgggtcccggctttcgccgggacgacggcggcggcgatgcgccaacgcagcctcaatccaccacgatcttgacgcggtcgcgcggcttcacctgggcatgcgcgtcgaggccgttgagcatccggaagcgctcggccggatgatcgacgccggccatgcggtgcgacagcgattccacggtgtcgccgggctgtacggtgatgaccttgatgcgcagcggccgtgcggcctggatctcatccagcgtcaggcgacggaatgaattgacggtctcgcgcgcgttgcgctcgctctcggtggatttctgcttggcggcgaagatgaagcggtagacgtcgctgccgaagcgcagcgcatagaccttgaactgccactggtcgccatgcgccgtggctgacgcggccggaaagccgttgatgttgaggtcctcggtcgacgacttctcgacgccttccatccagccggaattcagatagtcgccgagcgactgttcggccggcacccgcaccacgtcgaagcgcatcgcctggctgccgccctcgcggacgccgatcacggcctgcgcggtgttgtcgagcgtgaaattctcgggcgcggtgaaggtgaagccgagcttcggatgcaggaatctgcggccacggacaaaaccttcgctggggtcctcgccatagacgatgttgtcgatcgcggcgagataagtctcgcggtcgcgctcgtcgttctcgggcgaggagtattgccgcgcggtggtctgcgcattggcgatgcgctccggtgtcgccggatgcgacgaggtgaaatcctgcgcacgcggatcaagtgcggtcttgccgaccttgagcgcggcgttgcgctccatcgcggtcaggaagcgtgccgcgccgtagggatcgaaatgcgcgcgcgcggcgatcccgacgccgatgccgtcggcctcgaactcctgctgccgggagaagctcgccatcgtcagcttggtcttggcgagcgccagcgccgtcagatcggggtcggtgctcatgtcggtgacgacgcgcgtcaccaccgccgcctggcgcgcctggtcctcgcgcatcgcggcgtgtttggccagcacatgcgccatctcgtggctcagcaccgaggagagctcggaggtgtcgctggcgagtgcgatgagaccgcgggtgacgtagagctggccggtcggcaacgcgaaggcgttgaccgcgccggaattgaggatcgtgaccttgtaggcctggtcgggccgctcggaggcggcgaccagccgctcgacggtcttgctgatcaaggcctcgagcttggggtcgtcataggcgccgccataggacgacaggatgcgctcatgctcgcgctcgctgttgggcgtctgctgcaccacccggttcggcttcaccggcgccgccgccgccgccggggtgacctgctcgaaccggccgacattgccgcaggccgacagcgtgagggccgcgcagacgagcgcaggcgctgccgaaaggcggcggccagtcccatcttcacgccgtccagcgcgctcaatcacgtcaaaaactcacaaattgtcccgtgaatcggccgggctgtagccagagcctctagttcccgccgagcacttcaatctgccccacccggagcaattcgattcgcggcccacgtcgcgcttccacccagcctcgcacacgaatcctgcgattttccagagacttgggcgcaagcccggccgcctcgaacgcagggactatgcgccttgaaatagtcagagcaaagtcccgtgtccagtttcggccgaaattcaggtaagtcgtcgcgcccgcctggcgcacggacaaaaccctgccctcgaccacggtaaaacgcccgatcccggccaaaatatcgtccggactttcagcgttttttatgaccgtggcctccgcccaggttcccgatcgggcggcgcgcgcctcgccttccgccgccatcagcgccgcggcgcaatccttgtcggcgatgtcggacgacaccagcgcgacgccctggcgcagcaactctctttgtacgggcgtctcgctgccttcgaggaatgcgtaggccggttgccggccatagcggtccggcgtgtcgtcctgtccgcgcaacgtcacctctcggccggccagcagcgcgcccagcgctgcggtggccttcgcccggtcggccacctcgatcccggcgagcctgacctcgcggccgtcgtccagccgcaggctgcgtgcgtcgacgacggcggtgacgcgaccttcgccctgaatctcgaaattgcacccggccgcttcggcgcgtccgatgcatgcggcgatcgcaagcgcacacgctgtcatcgcaaccgtccgctgacggcgaggacatgctctatcgcgtggagacgtcatgctgcactcgtcgctccggcacacgccgttcggggcgtgttcgccaacacgaacagtctggccgaaagatcgtttcggagccacaggcgagaccgcatcgatggggccgacacggctcggcgatgcgccgctgaacattttgtcgcggcacttctcactgcgcgcatcgtcatgccgcgtgtttcacatcgttgggcgcccgccgcgccatcgccggatcgccgatcgcgatgaagattggcgccagaacctgcgcagcgcgctctccgcgcccgtcaaccttacccattgaccatcgcaactccgtgcgcggaatgagaatttgttattattgccaatgacttgcggcgcaagcaaactaatcggcaatttttcgaaatagcggccgaagcgcggtcgctcacgcatattgccgaggtccttgtgtcgaatccggttgttctgacgctgacgaccagcgatcccgtccacgattacacccagctctacaacgcgatctcggcgatcagcgtcggcggcggcctcgctgcggccaacaccgattacgtcatcaacttctcgctctcttccagtgcccgcacgttgcagctgctcgacgatctgccggtcatcaacctgatgaacggctcgacgctcaccttcgacggcaactccgactacaacaatcagctcggcgggcaggactacagcgacgtcatcgacgcgcgcggttatcagggcttcgtcgtcaccgcgggcaaggtgacgttcaagaacctcaccatcatcaatgcggttgcgagcggcggtaatggcggcaccggcggcggtggcggcggtgcgggtctcggcggcggcctgttcgtcgggcagaacgccgacgtcacgctcaacaatgtcaatttcggcaacaacgccgccaagggcggcaatggtggcgcggtcgatccggccggcggtggcggcggtggcggcggcatcggtgccgatggcggcagtggcaatggcggcggcggtggtggcggcggcttcggcggtcacgactattatggcgaccacggcaatggcgccaacggttacagcgaagccggctctgatagccagcatccttcaacaggcgcgcagggttccagcggcacgccggcgaccgtcgtcggtccaggcggcggacagagcgccgacaactacggcggcatcggctacggcgcgcatgcctccggcggcgcaaatggtggcggtggtgccggcggcgtcggcggcggcggcggcggcatcggtggcggcaactcggtcggcggcggcccttcgggcacgctgatcggcttcggcggcgcgggtggtatcggcggcggtggcggcggcggcatcttcgccggcggcaatggcggcttcgctggtggcggcggcggatccggcaacggcagcggatatgcgcataccggcggcaatggcggcttcggcggtggtggcggcggctcgaacggtacgcccggcaccggcgggttcggcgcgggcagcggctcgctcgccggcggcggtggcggcggtctcggcgccggcggcgatatcttcgtccagcaaggcggcaagctgaccgtgatcggcggcaccctgtccggtgccaccgagaccggcggcaccggcgccaatggtgccggcaacggctccgcccatggcgacatcttcatccagggcacgatggtcgtcacgccgacgcacaccgtttccacggtcttcgagggcctgcagaccgtcaccacgctgacgatcgccgacacgatcgcggatgaaaagggcatcagcggcaccggcacgagcggaaagctgcagatctcgggcggcggcacgctgacgctgaccggcgccaacacttacgtcggcggcacccagatcgacggcggcaatacgctctcgatcgccgccgacaacaatatcggcggttcggccggcgcgctcatcctcaacggcggcacgctgaccacgaccggcggctacaccttcacccacgacatccaggtcaccgccaatggcggcactttcgacatctcgtccggcacgattgccgacactggcgccatcagcggttcaggcacgttcacgctgtcgggcgccggcacgctgcaactcgggcttggtcagctcgcagggctgaccgggacgctcaatttgagcggcgggcatctgtcgctgacaacgagcggcacgttcgacgattcgatttcggtcggcggcagctcgctcctgaagatcgcgaacggtgcaaccgtcaccgataccgccctgatcagtggcagcggcaatctcggaatcgacggcggcggcacgttcgtcctcagccatgccaacacctatggcagcacgacgatctattcgggcacggtatggctgaccacggccggcgcagccggcgccggcaacatctcgttcaccccaggacttgccagcacgctgaagattgacgatgccgcgctgaccggcaacgcgttcaccaacagcatctccaacttcaatcccggccagtccattgacctgaccgggctgcactacaacacccagaacaccgcgctcaacaccgtcagtctttccggcaacgtcctcacggtctcgaacggcacggcgacggatacgttgacggtgaacgggctcgacggcggcgcccgcttccagctttcgcaggatgcaaatggcggcacggtcgtgcagctcgcgtcgacgcgcgtcttcaacgtctcgaccgtcaccgagctcaacgcggccatcctgcagatggattccggcggccagaacgccgcgccgaatgccaactacaccatcaacatcaccgccagcttcagcctctcgtcggagctgtacgcgctcaatctcttgagcggatctagcgtcaccatcaacggcagcgacggtcacggcggcgcctacacgatcgacggcctcaacgcccagcgcggcttcttcgtctatgccggcaacgtcaatctcgagaacctgaccatccagaacacggtggccgcgggcggccgcgtcatccagggcggcggcggcggtggtgccgggctcggcggcgccctgttcgtctcggcgaacggcagtgccacgctcgacaatgtcgtatttcacaacagtgccgcgaacggcggcaacggcggaaccggcagcaccgcgagcaacgccaacctcgacggcttcggcggtggtggcggaatgggcggccagggcggcaacagcagcggcggcggcatcggccttcacgcgcagggcgcgaactccgccgcattccagaacggggccgctggcatcgttcccggcgccgcagggggcggcaagggcgtcgacggctacctgatcccgttcgaaggcgggaccatgctctactggtatggtggaacgggcggcgcaaacggaggcggcggcggagcgggtggcttcctcggcgacaataaccgcgcgcacggcaccggcggtggcgtcggcggcggcaacgcaatcgacggcggcaatggcggctacggcggtggcggcggggcgttcggcaatggtggattcggtggtggcggcggctacggcggcaacggcggcttcggcggtggtggcggcgtcagcgggctcggcggcttcggtggtggaaacggcaccgcgggtggtggtggcggccttggcgccggcggcactgtgttcgttcagcaaggcggctcgctgaccgtcaagggcggctcgctctcgaatgattccggcttcaacgcggtcaagggcggcaccaatggcggcggccaggccagcggctccgcgtacggctccggcattttcatccagggcaacaacaatctcagcttcgcccctggcagcgggcagacgctgacgatcgccaacgacatcgctgaccagagcggcaatggcggcatcgccgccaacgcgggtgttggtgggctcgtcatcagcggcggcggcaccgtcatcctcggtggcaacaacacctataccggcaacaccacactcagtggcaccggcacgcgggtatcgatcgcgtccaacgtcaatctcggtgcggtcaccaacgtgctgaagctcggcgacggcaccggcatcagcttcaccagcagcttcacgcagacccacaacatcacggtcgcgggcgatccggtattcaatgttgcggccggtcagacggtcacccagagcggcgtcatctccgatggcgcgacgccgggcgatgtcgaggtgaccggcggcggccggctgctgctgtcggcgcacaacacctattcgggcggcaccgtcatcaagggctccatcctcgagctggcggcgagcggcgcggcgggcaccggcgcgatcgcgtttaccgacggctctaccgagaagctcgtgctcgatgccgcggcattctccggcgcctcgttcggcacatcgatcaccggctttgccggcggcgataccatcgacttcggcaatctcgcctatgacgcaacggcgacgctgtcctatgcgaacggcgtgctgctggtgaagagcagcggcggcacgacgctagcctccttgaacctgagcttcggatcaggcgcctcgttcggctcgctgatgctggcgtccgacggctcggcatcgccgcatctcgagctcaggtcgcaggcgagcatcgcctcggtcatggccgacaccaccggccacctcacgacgctgaacgccggcaaggtcgtcaccatatctgtcgacttcagcaacgtcgtgagcgtgaccggcgcgccgcagctgctgctcaatgacggcaaggccgcgacctatctcagcggcagcggctcgcacacgctggtgttcaattacaccgtgcaggatggcgacagcacgtccgacctgcaggtgcaaagccttgcgctcaatggcggcacgatcaaggatcccggtggccaggacgccgacgtgacccatgcggcgaccgatctgcatctggtgatcgacgcgatcgcgccgaccgtgtcggtgaccgcgaccccggcctcgctgctggccgggcagacctcgaccgtcaccttcaccttctccgaggcgatcacgggcttcgcgctgaccgacacgacggtgagcggcggggcgttgagcaaccttgtccatgtcggcctcaacgccgcgcaccaggatatctacactgcgaccttcacgcccgatgtgaccaacgccgaggcgggctcggtccaggtcgatacgtcgagctataccgacgtcgcgggcaatgccggcgccgcgagcaacaccatcagcttcaccggcgacaccaaggcgccgacggtgtcggtgtcagccgatcacagcgcgctgacggcgggcgatactgcgcttgtcaccttcaccttctcggaggccgtcaccggcttcgggctcggcgatgtcacggtccatggcggggcgctggggaacctgatccatgtcggcgttgatggctccggccatgacatctacacggcgaccttcacacccgatgtgaccaacaccgaagcgggatcggtgcaggtcaacacctcaagctataccgacgtcgcgggcaattccggctcgtcgagcaacacgatcaacttcaccggcgacaccagggcgccgtcggtaacggtgtctgctgaccacagcgcgctgctcgccggtcagagcgcagtcgtcaccttcaccttctctgaggccgtcgcgggcttcgccctcaacgacgtcagtgtcagcggcggcagcctggacagcctcgtccatatcggcgtcaacggctccggccatgacatctacaccgcaaccttcacgcccgacgtgaccaacaccgaggccggttcggtccaggtcaacgcatccagctacagcgatacggccggtaatgccggcggagccagcaatacggtcaacttcaccggcgatacgctggcgccgacggtgtcggtcacgctcaacccggacacggtgctcgccggcgacgtctcggtcgcgaccttcaccttctcggaggccgtctcgggcttcacgctcgccggcaccaccgttcatggcggtgcgctgagcaatctcgtgcatgtcgggctcaacagctccggtcatgacgtctacaccgcgaccttcacgccagatgtcagcgacaccgagacaggctcggtgaaggtcaatgcgtcgagctataccgatgtgtccggcaatgccggtgcggccagcaacaccgccacgatcggcggcgacacgctggcgccgacggtgtcggtcgcggcggatcgcaacgcgctgctggcgggccagaccgcgctggtgacgttcacgttctcggagcaaatcgcaggcttcgcgctcggcgacgtcgccgtgcatggcggcgcgctcggcaatctggtccatgtcggcgtcaacatgtcgggccaggacgtctataccgcgaccttcacgccggatgaaagcgatgccgaggtgggctcggtgcaggtcgccgcgttcggctacaccgacgtagccggcaatgcgggcgcggcgagcagcatcctcaatttcaccggcgataccaaggctccgacggtgtcggtcgcggcgagcccgagcagggtgttggccggccagagctcgcttgtcactttcaccttctccgaacatgtcgcaggcttcacgctcggcgataccgtcgtcgccggcggtgtgctgagcaatctggtccatgtcggactcaacgtgtcgggccacgacgtctacaccgcgactttcgcgccggatatcaacgatgtcctgacgggctcgatccgggtcacggcctcgagctacaccgacgacgccggcaatgccggtgccgcgagcaacaccgccacgatcggcggcgacacgcgtccgccgacggtatcgatcgcagctgaccacaccgtgctgcatgcgggcgacgccgcgctgatgacgttcaccttctccgaggcggtcgcgggcttcgggctcggcgatatcgtcgtccatggcggcctgctgggcagcctggtccatgtcggactgaacgtgtcaggccaggacgtctacaccgcgctgttcacgcccgatgtcaccgaccatctgtcggccaatctgtccgttagcggggcgagctataccgacatcgccggcaatgccggtgcggcaagcagcaccatcgctttcagcggcgacaccaagccgccggcggcgccaagcctggcactgcatcaggacaccggtttctcggcttccgatcacatcaccagcaatctgctgatcgactacaccaaatccgattcggccgacacgctgcgcttcaaggccgacggcgcatctagcttctcgacggtggcgccggtgttcaccaccgacggcgtgcacaccgtgacggtgcaggaggtcgatgccgccggcaatgtcagcgcatcgtccagcctgaccttcaccctcgacaccacagcgccccacctcaccggcatcacggcgacgccttccggcggcgtcgcggcgacgggcgcgctggtgcaactgaccgttggcttcaatgaggcggtgcgcgtcgatggcggcacgccgatcctgacgctgaacgatggcggcaaggcaatctacgacgctgcggcaacggcactgctcggcgattcctcgaagctggtgttcgatcacttcgtgtcctcgacggaccgcgccggctcgctgtccgtgaccggcttcgtcgcgaatagcgctgatgtcgtcgacctggccggcaatgcggcctcgctgtcggccgtgtccgccgctttcgatgcgctgcacatcaacgagaccgtcgtgccggcctacacgctcggaccgatcacccgaccggagctgcaactggatctgggcggtcacgtcatcatggacaccgtggcgtcggcgttcgccggacaatatggcttgcagtatttgttcctcggcctgccgcccggaacgccctatcagaccgtcccggactttcacctctgatcgctgcgccaagcgcttcggcgcagcgcttcattccgcttgatggaaaacagattgctgtcgcgcgcggcttgctgcagtgcgagccatgcggcatgatccgcccctcgaaacggacctgatggaatgaggtccgcgcttcaacgggaggatttgatgagacgagttttggccggcgtgttggcctgtgtgtttgcgatctcggcgaatgcgtcgctggcgcaggacaagcctccgctgaagctcggcggcattctcgacatgtcgagcctctatgccgacatcaccggctccggcagcgaaaccgcggccaagatggcggcggaggactttggcggcgcggtgctcggccgcaagatcgagatcgtggtcggcgaccatctcaacaaggccgatctctcggccaacatcgcccgcgacatgatcgacaatcagggcgtcgagatgatcttcgacgtcgcggcctccgccaccgcgctcgccgcggccgagatcgccaaggcgcgcggcaagatcatcatgttcaacggtccgggctcgatccgcctctccaacgaggcctgcggcccctataccgtgcactatgtgttcgacaccttcgcgcaggccaatgtcaccggcttggccgcggtgaaatccggcctcgatacctggttcttcctgaccgccgactacgccttcggccaggacctcgaaaaggacaccagcagcgtcgtggtgaagtcgggtggcaaggtgctcggcagcgtgcggcatccgatcaacacctcggacttctcgtccttcctgctgcaggcgcaggcctcgaaagccaaggtgatcgggcttgccaatgccggcggcgacaccatcaacgcgatcaagcaggccgccgagttcggcctgaccaagagcggccagaggctgtcgccgctgctcgccttcgtcaccgatatcgacagcgtcgggctcgagaccgcgcaagggctgctgcttgcggaagcgttctattgggacctcaatgacgacacccgcgcgttcgcaaagcgcttcatggaacgcaccaagcgggtgccgacctcggcgcaggccggcgtctactcctcggtgacgcattatttgcaggcggtgaaggccgccggcaccacggatgccgccgccgtcatgaaggtgatgaaggagaccccgatcaacgacatgttcgccaagaacggccggattcgcgaggacggccgcatggtgcacgacatgtatctgttcgaggtcaagaagccctcggaatcgaagggccgctgggatgattacaagctgctcgcgaccgtgccgggcgaccaggcgtttcagccgctggcagactcgcgctgcccgctggtgaagaagtgacgggttgaaaacaacaacgaaaggcaaaacgccatgagcgataaccagatggtccttcaatccctcgacaagggcctgctcaccatcaccatgaaccgcccggatcggcgcaatgcgctcaatcccgagatgacgcaaggtctcgtcgaggcggcgcggcgggcgcaggacgataccgaggtgcgcgcggtgctgatccggggcgccggcggcacgttctgcgtcggcggtgacgtcaagtcgatggcggccggccgcgcgccgctgccgttcgaggccaagatggcgaacctgcgccgcggcatggaggtctcccgcatcctgcacacgatgccgaagccggtggtggcgcagctcgatggtgctgcggccggcgccgggctctcgatcgcgctgtcctgcgaccttcgcgtcgccagcgcctcctgcaagatcaccacggctttcgccaaggtcggcttctccggtgactatggcggcacctacttcctcaccaagatgctcggcagcgccaaggcgcgcgagctctatctgatgtcgccggtgctatcggcgcaggaagcctataacctcggcatggtctccaaggtggtgcccgatgccgacgtcgaggccgaggcgctggagctggcgcgctcgctggcgcagggcccgtcggtcgcgctcggctacatcaagcgcaacatcaacaatgccgagaccatgacgctggaggcctgcttcgacggcgaggcgatccaccacacccgtgccggcgagaccaccgaccacaaggaagcggcgaaagccttcgtcgagaagcgcaagcccaccttccaggggcagtaggccgtgaccaatcacatggccgaatacatgcggctgcggcagatctgcctggtggcgccgcagcttgcgcctgtgatcgcggatatctccacgatcatgggcctcgatgtctgctatcgcgacggcaacgtcgccaaatacggcctcgagaacgcgctgctgccggtcgatacgatcctcctcgaagtcgtggcgccgttccagccggggccgggcaccgcagccggccgcttcatcgagaagaccggcggccgcggcggctacatggcgatcttcgcttgcgaagatcccgacacgcgcggcgccaaagccaatgcgatgggtgtgcgcaccgcgaacgtgatcacgcacgcgccgtatcatggcgtgcagctgcatccacgcgactgccgcgccgccttcatcgagttcaaccacaccgacggcagcgacgacatcttggggccatatccaccggccggcccggactggcagaagtcgattcgcaaggacacgactttggcgctgaccgaggtcgagatgcagagccccgagcccgaggcgctggcggcgcattggggaaagatcgtcggcacgcccgccgacggcaccgtggtgaagctgcccaacagcatttttcgcttcggcaagggcggcagcgagatcatgagcgggctaacgttcaaggtcgttgacaaggcgaaggtactggatgccgcgaaggccagaggctgcgcggcaagtgatgatgagttcttcctgtgcggcgtgaacttccgtctgacctcgtagcgtcgtgacccggggcagcgctcttccggattgcgctgcggtgcatccgggaggagaggttgagctcgccgcatcgatccaatatcgtcgagcccaacaagaataattggacagcgcccccatgccgcatccgctcgataccttctttgccccaaagagcatcgcactgatcggcgcgtcgcgcgatcacgagaagattcccggccggctgctcgcgatgttgcgcaagaacggctatccgggcgcgctctatccgatcaatccgaactatgacgagatcgacggcttgaaatgcttcaagtcgatcgccgaggtcggcgcgccggtcgatctcgccgtcatcgtcattcctgcccgcgcagtgctgccggcgctggagcagtgcgcggtcgccggcgtcaagaacgcggtcatcatctcctcaggctttgcggaggagggcggcgacagcgccgacatgcaggacgcgatcgtggcgttggcgaagcggacgggcatgcggatctccggtccgaacgcggaaggtttttacagccaggtgcagaaggtcgccgcgaccttcagcccgacggtcgacgtcaagccggatgcgccggtattggtcgcgagccagcggcggatcggcatcgtcgcgcagagcggcggcatcggctttgcgatttatcaccgcgccaaggcgctcggcgtcgcgctgagctatgtggtcagtgccggcaatgagagcgatctcggcgccggcgaattcctcgactacatggtgcacgatgcctcgaccgacgtgatcctgctgttcatcgagggtatccgcgacgtcgacaagttcctggcggcggcgaagcgcgcggcggagctcaggaagccggtcatcgtcaccaaggtcggccgctccggcgccggcgaacgcgcggcggcctcgcacaccgcgagcatggcgggctggtcggcggcctatgacgccgtgttcgcgaaatacggcttcatcgtctctaacgatctcgacgaggcggttacgattgctgccgtgttgaccaccaatccgttgccgaagggcgatcgcgtcgcggtgctgacggtgtcgggtggcgccggtatctggggcgccgacaccgtctcgatgcagggcttgcgtgtcccggagctctcggccggaatccagagccagatcaagcaatggatgccgtcctatggcgcggccggcaatcccgtcgacgtcaccgcgcaaggcgtctcctccggcggcctgcagaagagcatcgagctgttcgatgcgtccgatgaagtggacgcgacgctggtcgtgctgtcgctgtcgagcgagacgcggatgccgttcaaggaggccgagctgaagccgctcatctcggcgcagcgcaagccggtggtgttctattcctacacgctgccgtcgccattcgcgcggcaggagctggcgaagtccggcgtggtggtgctctcgggactgacccatgtcggtgtcgcgatgcggcggctggcggactatgcgggcttcaagcctgcgccggaaatggtggccaagtcaccggcgcacgatctctccgcgtatctgaaggccgagacgctctccgaacatgacagcaagtcgctgttgcgcgcggccggcatcgcgttgccggacgaggtgctggtgaccgatcgcgacgggctcgacgcggcgatcgagcgcgccggatttccgctggtcatgaagatccagtcgcctgacatcgcgcacaagagcgaggtcggcggtgtccgcgtcaatatcgccgccaagggcgcggcgttcaccgcctatcgcgacatgctggagagcgtgcagaaggcgcggccggacgcggcgatccagggcgtgctggtcgggccgatggcgaagaagggcgtcgagatcatcgtcggcaccatgacggacaagaccttcggtccgatggtgatggtggggctcggcggcatcaccaccgaactgttcaaggacgtggtctatcgcccggcgccggtgagtgcggcggaggcgaccacgatgctggagacgctgaaggccgcgccgctgttgcacggcttccgtggcgcgccgaaggcggacgttgcagcgctcgcgcaactgatctcacagatttcagtgctggcggcgcagcatgcggatcggatcgccgagatcgaggtcaatccggtgctggtgcatccggaggggcagggcgtgaccatcgtcgatgcgctggtggtgccgaggagttagcgagctatctccccacgtcgtcccggcgaaggccgggacccataaccaccgaagagagttgtgggagaagccgacgccgcgtgcccttcctatgggccgcggcgtatgggtcccggctttcgccgggacgacccgtggagagagcggcgttcgcggttaccgccccttgaagttcgcgacgcggcgttcggcggtggccttgacgccttccttgaagtcctcggtcgcgcgcagcttggtctgctcctccaactcgtggttggtcgcggcgagcacgcggtcggcgaggccggcgcgcatggtggcgcgggtcgagaccaggccgagcggcgagcattcggcgatctcctgcgcgagcttcattgcttccgcacgcacctggtcctgcggcaccagcacattggcgaggccccagcgataggcctcttcgccggtgacgcggcggctggtgtagaacatcagctcggcattgttcttgccgatcagctccggcagcgtcgtggtgaggccgaagcccggatggaagccgagcttggtgaagttcgcggcgaagcgcgcttccgggcaggcgacgcggaagtcggccgacaccgcaagtccgaggccgccgccgatcgcggcgccatggatcgcggcgacgatcggcttcttgttgcggaagatgcgcaccgcctgaacgtagagatgattgatcggcaggttcgaggccggatcgctcttggcgcgctcctcctgctcctggcgggccgggtcgccgaaattggcgccagcgcagaacgccttgccctgggctgccagcaccgaggcgcggatctcgatattgttgtcgaattcctccagcgcgtcggcgatctggttgatcagcgcgacgtcgaagaagttcagcggcggcttgcggatttcgatcaggccgacatggccgtggatctcgacgccgatatcagtgtatttggtcatgtgtcttatctccggtaaggctgcaatctctcggcgcaaaaggtgtcacctctcccaaggggagaggtcgatttgcgccagcaaatcgggtgaggggttgagctctctcgagggaccgtgatccctcacccggcgctgcacgccgacctctcccggagggagaggtgcaagagcttgcggtgagatcatcggtcccattggtcgtcagcgcaagccgagcccgcgggcgatgatgccgcgcagcacctcggtggtgccgccctggatcgtcagcttgggtgcggtcttgatggcgaaatcgagctgcttttccagcgtctcgcgattggtcgcggtctcctcgacgaaggccgcgagatcgcgcacccgatgcggcagctgctgctcccacaccgtgccgatgtccttgacgatggaagcctccaccaccggctcctttccggcctgcagcatgcccgcgaccgacaccgacatgcgccgcatggtgtgcacctgcgccaccaggcggccgatgccttcggcgctgcgggtatccgggttcttgccgaccgcacgcaccagctcagtgagcacgtaataggtctcgaggaagcgctcggggccgctccgctcataggcgagctctgatgtcgcctgcttccaggcgccgtcgacctcgcccagcacgtgatcgtcgggcacgaagtaatcggtgaacacgacctcgttgaattcgaactggccggtgatctggccgatcggattcacctggatgcccggctgcttcatcttgaccaggaactgggtcaggccgtggcggcggttttccttggtcggcggcgaggtgcggaagatcgcgatcatgtagtcggcgatatgcgccgacgaagtccagatcttggtgccgttgaccaggtagccgccgtcggtcttggtcgcacgggtcttcgccgcaaacaaatcggagccggagttcggctcgctcatgccgatcgcgaagcagacctcgccgcggcagatccgcggcaggatgtccatcttgatgtgctcgggcgcgtatttcaaaagcaccgggccgctctggcggtcggcgacgaagaagcggcgggtcggcgcgttcgccacccgcatctcctcggtcaccacgtagcgctcgaggaaagagcgctcctggccgccatatttcttcggccaggtcatgccgagccagcccttggcgccgacgcggcgggagaattccggcgcgtcattgtcctcgcggttcggcgcgtggggatcgaaggtgccggcggcgatctcctcggcgaggaaggcgcgcacttccttgcggagttgctcgcatttctcgggcaggcggatcggatcgaaacgaagggctgcagtcatgatgtccagtcctgattgttctgcctgatctcagcgcgaagccaccagcggccacaattcatcggcgccacggtcggcgacgagcttgccgagctcgaccgcccagtggctctccgagccgaaatcgtcgcgccacgccagcgcgcgcagcgagtagcggtgcaggatgtgctcgatggtgaaaccgatcgcgccgtgcacctggtgggcgatgccgctgcccttctcggcggcctccgagcagcggatcttcgccgccgcggcttcgaggaacaccgcatcgctattcagcgacttggtgttgacgatggtatcggccgcggaggtcgcggcggccagcgccgcggcgttttcgccggcgaggcgcgcgaggttgtgctgcacggcctggaatttggagatcttcttctcgaaggcgacgcgctcgttggaataacgcaccgagatgtcgagcatggcttccagcgcgcccgcgatctgcaagctgcgcgcgacgccgcccatcagcatcagcgtggtctggtcaaagccatcaggcgccggcttggtggtgacgggctgcaccttggcgagcgtgacggtgtcgttggcatcgccgccaagcccgatgcccgattcgatccggcacttcgcggcatcgaccagcgcgatcgagatgccgccgtttccgcttgccagcaccgcaaaatgcttagcgtcctttgcgaacggcacgccacgggcgcggccggagagcgatccatcggcgttcagcgtgacgcgatccttcgggctcgcagggacgaccgtcatctcgccttccggcgaggcgatcttgccctgcgtcagcagccagccggccagcattgtttcggccagcggaatagcgatcgcatgccgtccggcgacgttgagcacgctgaatccctcggcgaggctggcgccggaaccgccgagatcgtcgggcacccaggacagcggcaggccggcgtcggtcagcgcctgccacagcggcgccttccatgcgcccttcttgtcatgattgatggtctgggcatccgcgagatcggcgaaaatcttttccgcggtctcggcgacgatgttttcactctccgccacagcgttcctcgtgttgattggcttgggtccggccatcaggcaggcccagcttgcggtgttgtcttgcgctcaatgatgcggaaaagccatagccgtgacaagcgtggcccgcagggccacttgcgcagatggcatgaagcccgaccagacgcatgaattccgtagagtgaacattcgggcgcgtcggtttgtatgccacgcgctgcagcagataggcgggccggaccggttcagtccgccagatgaaactggtcgccgcgcccatgaggcggcaggttcagacgcgcggccatcggcgagaccggtcggcgcgaggggcatatgagttttcgtcgacccgtgtttagctcgagaccaagatcagaggtgatgcgatgaagatgcatatgctgtcgggtggacggctgcggatgtccaagcggacctatctgccggatgcggagcgcggcgagatgatcgagcttccggtgtcctgcgtgctgctccggcatacgcagggcaacgtgctgttcgacaccggatgccatcccgatgtcgcgaccgatccggaaggccggctcggcacgctcgccaggttcatgcagccgatcacgacggcggacgaccatgtgctgaccagcctgaaggccgttggcctcggtcccgacgatatcgatgtggtgatctgctcccatctgcatactgaccattgcggctgcaacggcttcttcaggaaggcgacggtcttcgtccacgcgctcgagctcgaggccgccaatgcgtccaacgcgctcgatcgcggatacatcaaggcggattgggatcatccgctgaagatggagatcttcgaccgccagacggatgtgttcggcgacggcaggttgacgctgatcccgttgccgggacattcgaagggaacgaccggtgcgctggtcaagctggaccagagcggcgaatacctgctcgcatccgattcgctcagcgtacgcgccaatctcgatcagcgggtctcgccgcggaacagtctcgatgtcgatcaattcctgaaatcgctcgacgagatcgccaggctcgaggcatcaggtgtcaagatcatctgcggccatgacgatgcgcaatgggccagcctgcagaagggcccgaacgcctatttgtgatggaccggcgcggtttgcagatgtatttccgcgcgatatggtatgccaccgccggagttcatctggctcacgacaacaaggaaaatgcagatgtccaaggacggtttgtgcgcgatcgtgacggggtcggcatcgggactcggcgccgccaccgcgcaaatcctcgccacgccgggcgcgcgcctcgtcatcaactattccaacagcaaggcggaggccgaggcgacggccgagctttgccgcaagcagggcgccgaggtgctggtggtgcagggcgacgtctcgcgcgatgaggactgcaagaagattgcggccgcggcacagggctggggccgcgtcgacgtgctcgtcaacaatgccggcaccaccaagcatgtcccgcaccatgatctcgatggcctgaccgcggaagacttccaacgcatctacgcggtcaacaccatcggcccgttccagatggtccgtgccgcgcgtgcgcttctggaggccggggcgaaggcctcgggccgtccgtcggcggtggtgaacgtctcctcggtcgccggcatttccggcggtggctcgtcggttgcctatgccgcgagcaagggcgcgctcaacaccatgacgcagtcgctggcgcgcgcgctggcgccgctgatccgcgtcaacacggtgtgtccgggttatatcgatacgccgtggttcaccaagggccgcggcgaggagggcgccaagcaggtgcgtgatgcggtggtcgcgcgggtgccgctgaaggtcgcgtcaaccgccgaagatatcgccaatctggtctgcttcctggcgagcccggcgtccagcaacatgactggcgaattcgtccgcatggatgccggcatgcatctcattcagtgacgcggtgccgctgcagaaatgaaaatgcccggggcagcccgggcatttttactttgaaccagtgttcggcttgccgtcacttgtttccgatgtccgggatcacgcgcgccgcgaccagccggttccagatgaacagcaccaccagcgcgccgatcgtggcggtgatgaagcccgcgccctgttcgggaccatagtggccgatcgcctggccgatgaaggtcgcaagaaacgcgccggcgatgccgagcacggtggtgagaatgaagccgcttggattgttcggtcctggcgacaggaaccgtgcgatgatccccgcgacaaaaccgacgatgatgacccagatgatgccgcccatgactgtcgtcctcctcagatggaatcaacgctgccgctagagccggccgcgcagctcgtcgccgctcggcagccgtccgtccggcgtcagatggttgatcgcgtcgggcaggtactggctcaagccctgcagcaattggtcgcgcgacatgccgctctgcgacgccagcgagtcgatctggtcggcgccaagcgcgttggcgaggtcgccgggcgagatctgcttgttggggccgttgctgacccaggaattcgccgcgtcgccatggcccttctgctgcaactggttgagcagatcgccgaggccgccgctgagcacggtgccggcggcgccgccggcgagaaggccgccaaggccgcccttgagcaggtcaccgagtccgccaccagcggcgccgccgggcaggccagcggtgacattgccggggagttgcggcgcctgcgcgggggtcggctgaggggcagtcgcgcccggctggccgccggtgaaatgcttgaccgccttccaggcgagcagtgccaggatggccatggtcatcggcgacattccgccgctgctcgaactgtcggatggtgtgcttggcgcgctcggaccgcgggggccgttctgcatgccgttgagtacgtcgagtaaacccatgatcgtctcctgccgcaaccgtgccccgtgcgggaaacatagctgcggcccatgacggttacaaggcgggccacccggcggcggcgcgccgaaaataggcaggcggcccgaggtctgctatcgagccttgatgaacggatgtttagccggatgaacgaggatcggccgatcggaattgcgggcgccggcagcatcggttgcttcgtcggcggcatgctggctgcgtccggctaccgcgtcgcattgttggcgcgcccgcggctgatccaggagattgcgggcaacggcttgcgggtcagcagtttcgacggctcggagcggagggtagccgccgatcggctcattctgtccgacgatccatcgatcctgcgcgacgcccggacggtgctggtgacggtgaagagcgccgataccggcgagatcgccgaattgatcgcgcgtcacgcatccaccgatgccgcggtggtcagcctgcagaatggcgtcggcaatctgtcgctgctgcgcgatcgcttggcgggccgcaaggtgctcggcggcatggtgccgttcaacgtggtcgcgctcggcgacggccgcttccatcgctcgacctcgggcgacatcgtgatcgcgcaggatgatgccggcaccgcggcacggctttcggtgccgagcctcgcgatcaaggcctccgccaatatcgatggcgtgcagtggggcaagctgatcgtcaatctcaacaacgcgctcaatgcgttgtccaacatcccattgcggcagcagctcgcgcagcgcggctggcggcaattgttcgccgaccagatggtggagggcctggccgcggtgcgcgccgaaggcatcgtgccggtgtcgccgacgccgctgccgtcgggctggatgccgcatctgctgcggctgcctgatgcgctgttcggcatgctgctcggccgcaccatgaagatcgatcccgaagcgcgctcctcgatgtgggaggacctgcagcgcggccgtcgcaccgagatcgattatctgcagggcgtgatcaccgagatcgcggatcgccgcggcctccaggctccgctgtcgcgccgcatcaccgcgctgatccggaaagcggaggccgacggcaagggcgcgcccgggctgacggctgagcagattcgcgttgggtaaccgaggaggtgacatcgtgaaacgatcttgcatcatgttgctcgcgctcgttgcgctcgccaccagcccactgcgtgctgcgccaccgaccgtggttccctcgccaggctatgatgcgcgtctgcaggagcagcgcgcggcagcgagtcaatcggccgcaacggcgcgcaaaccggtcacgcgccggcatcacaagcgcggtcgcgcgcattgattcattgcatggaaggcctcggatgaagctgctgttgctcgcactcaccttcgtactcggcatcgctaccgccactgacgccgccgactatgccggttcgatcagtgcctaccggcgcgccaaccggatgcccgcggtgacgctcgacgccaggctgaatgcgatggcgctgaagcaggcgcaggcgatgtcggcgaccggatcggtcagccattccgcgggcggcagcttcttcacgcgcattgcaccgctcaagaagcagcgcgccgcggaaaatatcggcgccggcttcatcgccttcgccgagatgctgaagcagtgggaggattcgccgggccatcgcgagaacctgctgatgccgggcgccaagcgcgtcggcgtcgcctatgtcgacaatccgaagtcgccgtaccgcaggttttgggcgatggtgatcaccgactagttgcgcttcgcgagcttggtcggcggcggcgatgccggcgtgaacagcttcttcaaatcgttcagcccgtcggacagccgcggccaatcgcaggagaacgtgcccttcacgcagctgcgtgtccgcggtcgcggctcgggaatcggcacggctgcgatccgcggcttgaccggctttgcggcggggacggggaccttcgccggctcgctgtgcagcgacgcctgctggatctgcggcggccgctcctgctgcttctcctgccgctcgagctgcttggcattgaacgccgcgacgatgctggagcggcgctctttctcgagatagccggtatattcctggtcgatcttcttctgctcgtccggcgtcggattgggaccggcgatgtcgaagctgcggtcctgcatgaagtcgtaataggtgtagccgccgccaggcttgcggcgcccggcaaacttggcgttgcagtcggcgagttgcgcagtcttgtcctgcttggtcttcgccctctcggcgaggtcggcgcaatcctcaaaatccttcggggcgctgcgccaccattgcgcgtgcgcgcgcatcggcgccagcgcaaccgcggcgacgaaaacggcgacagccaacgtcgatgatcgtgacggcatcacggacattgcaagcaaacccgaacgacacagagtgaccggattgtcgccattttagtgacgcttgtcaccctggaaccgaacgatttccctgaccaattaagtcgcagaccagccgtggggcctgatcaaataatcgcggcatgcaattgtaatatctcaagaattcttaccgtaacggcgcgtcggaagttgcaacaattcgtctcgaatcgttcacttgacccgatgcagcaacgccacgagttccgcctgccgatgcgtgccggtcttctggaagatcgtcttgagctgattgcgcgcggtggcaagggcaacgccggcttcctgtgcggcggtttcgacggaatcgccgcgcgcaagccgcgcggcgaggcgcgcctgcgccggggtcagctcgaacgtcgccgccagcagcgcctgatcgaaggcggcgttgccttcgagatcgcggatcaacaggatcgcgcgcgcgcccaggaacggtgaccgcgcggcaggaggcaccggctgcatctggatcacgatcggccgtttgtcgatcctgcgcaccacgatcggcgatgacggcaagggctgcagatccgagctgcgggctagctgatcgatcagcctggtcagatcggcattggcctgccggtcgagcaaagtgagccggttgttgcggatcgtaaggtcgtggccgaggcagctctccgcctggccgttcatgccgatgacggcgccgaagcggccgacggcaatcgccgcgatctggatcaggtcgagcgcactggtgatgcccgagatcgcggagcggccgacgacggcggagagcgtcgcggcttcggtgagccgcgccgacacccgcgagagcgccttgacctcgtcggcgtcgaacatgccctccttcggcgagcgctgaatggtcaatccccacaatgccggacccgagcggaagccgatggcggcaaaccatttcaatccgaactcgccgagcgaagcgtagagcggatcgcgcaacatgtcggcttcggactcgaacagatcggcgtcggtgatgacgttggtgccggcgaggatcagcggcacgccgcgtgccgcacggatgtccgagaggtgaaggttgttggggaagtagctcttggagaaatactcggtgatcgagtcggtgcggggaatgtcttcggtgcggatgtcgctctgaagcatcgcagccccggtcgcgccgacggcagcgcagaccccctccatgaaggacggccaggtcgcgggatcgagaaccacgtcgccaaggcgcgcggtcacgtcgtccagcctgtgcacgtcgaccaaaggcttaagctccgcctgctgcagactttcattgtttcgcaggcgaaacaggaaaagcctggttgcgcccggtaccgtgcataaaacaacccgcaccgcccgtcgtgcaagttaaatcagcgccacggtcgaggccgggcacgaaaaccccagcgaaacatcatcgaaaatcggcgagcggacggtcccgccgctacggcaaacgttgatcccagcggtgaccggcctcggtcagtgccacgcggcagaagccggcggcgatcgcgacgacgtcctcgacggcttgcggatattgcctcgagacccagcgcagcgcgatcgagatgaccgcgccgaccatgccgaccgagagcagcgccgctgccgcgcttccgtcgccgtgtttcggatcgcgcatcggcggcaccaggatgtcgctgaagacgcgcccggcgtcgagcttgacggcatcgaccgccgggctgatgccggagatttccagcaggaagacccgcgcgggcttcggatgctgcttcagccgggtaaaatacagcgtcagcgcggcgcgcagcctcgcttccgcatcgtcgccggcagccgctgcggcagccgccatctcctcgtgcagatggccgacgacatggttataggcggcgatcagcagggcttcgctgttggcgaaggactcatagaaatagcgctcggtgagctcggcggcctcacagatcgccttcaccgtcgcgacgcgatagccgacctcgccatagacctcgattgccgcgtcgatcagcttgagccgccgctcgctgcggcgttcgtcggcgtccatgccgccatagaggcgggctttcccgctgcttgccatgaagcctattgacatgagccattgtcagatgtcaagttatctgacaacaggcattgtcaattctaccgcgggagggtcgaagcatgtccgctcatttcgacgtgttgatcgttggtgccggactgtcgggcatcggcgccggctatcatctgcagaccaactgtcccgaccgcagctacgccattctcgaaggtcgcgattgcattggcggcacctgggacctgttccgctatcctggcatccgctccgactccgacatgtacacgctcggctattcgttccggccgtggaccgagccgaaggcgatcgccgacggcccgtcgatcctgaactatgtgcgcgagaccgcgcgcgtctacggcatcgacaagaacatccgcttcaaccaccgcgtcgtgcgcgccgactggtcgtcggccgactcgcaatggacggtggaggtcgaacgcgggccggagaaggcgatcgagcatctcacctgcaacttcctgttcatgtgcagcggctactacaaatacgagcacggctacacgcctgacttccccggcatcgccgatttcgccggccgcgtcgtccatccgcagcaatggaccgacgacatcgactatgccggcaagaaggtggtggtgatcggcagcggcgcgaccgcggtgacgctggtgccggaaatggccaagaccgccgcccatgtcacgatgctccagcggtcgccgacctatgtcgtggcgcggcccgatgaggacaaggtcgccaactggttgcgggcgcggctgtccgcaaaactcgcctacggcctcacgcgctggaagaatgtgctgttcgggatgtatttctaccggctctgcaagcgcgatccggagcgcgtgaagaagctgatcctcggcggcgtgcgccacgcgctcggtcccgattacgacgtcgcgacgcatttcacaccgcgctacaatccgtgggaccagcggctctgcctggtgccgaacggcgatctctttcaatccttgcgcaacggcggatcatccgtcgtcaccgaccagatcgaaaccttcacgcgtgggggcatcaagctcaagagcggcgaggtgctcgacgccgatgtcgtggtgaccgcgacgggcctcgatctgcaggtgctcggcgggctcgagatcaaggtcgacggcaccccggtcgatctgtcgaagaccatgaactacaaggggctgatgtattccggcttgccgaacctcgccgccgcgttcggctacaccaacgcgtcctggacgctgaaatgcgacctgacctgcgaatatgtctgccgcatgctcaatcacatgaaggcgcacggctatgcgcaggtgacgccgcggcggaacgaccctgatgtgaccgagctgccctgggtggatttctcctcgggctatatccagcgcgccgcggccaggttccccaagcagggctcgcgccggccgtggcggttgtaccagaactatgcgctcgatatcatgacgctgcggttcggatcgctgaaggatgaggcgatcgagtttctgccggcgcgccgggccggcgccacggatgctgccgcgaacccggcgcggcaagtggcgtaaggcacaacgcggcgaaccaggcacaacttcgcgcgcccgttggggcgcgggctggcgatcattcggcacctctgctatgggagggctgcgcctgcatgcttcgctgcgggcggtgcggtcccgtagctcagccggatagagcgacggtttcctaaaccgtaggtcggaagttcgagtcttcccgggatcgccattttccgcctgcctgtgttcaatgcacgccccaggttgtcgcgccttaagctgggccttggtgggggcgcgaccggcggagttgcaagcgacggagcgcagcactggactgtcgcagcgtgtgccgcgatgtcgcgcgcagttcctgaacggtggtaacattggacggcacgctgatgtgtgcgagtattcccggtcccggtgcgactttcgctggacgctccgttggcagcagtgataacggctgagaaagccatctcacgacggatcgcatgccgaaacctccgccccctcccgccaatcgcgggcccaatccgtccccggcgctgcaacgcgctgtggccgcattgcagatgggacagatcgtcgaagccgagcggctggcggcagaggtcttgaaggcaaaccggaacgatgtcggcgcggcctcgatcctggcgcgggcgctgatgatgcagaaccgcaacgaggaggcgatcgcgccgctcgagcgcgcgacccgccgcgtcgaggatgcgggcctcgagaccctgctcggcgcggcgctcggcggcgccggtcgccgcaacgaggcgatcgatgtgctgcggcgaaccaccgcgcggcggccaccatacctgcccgcatttcaggcgctggccgggcaattgcacgcggacggccgtatcgacgaggcggttgccgtcattgagagcgcaattgcgctcgcaccagggagcctcgagtttcagctcctgctcgcgcagctcctgccccagcgcaatgagcgcggccgtgcgcgccagattctggagaagctgcgcgctgcggcgccgggacatcccgatgttctgggcgcactcgcgcgcgtgctgctgctcgatggcgaatacgcggccgcggcggatctctaccgccaggtgctggcgcagcgccccgacgatcccctgacgcgtaccagcttctccgccactcttctcgaaatgggcgaccgtgctgccggcgaagccaatctgcgtctggcgttgcgcggccggccgcaaatgatcggccgcacgacggccgcgctggtcatgtcatcgcatggccgcttcttcttccgtcgcagcgcgtttgcggaattcttgagttaggcgatccaggctggatttgccggccgcgccacaaactcgccgtcgtcccggcggaggccgggacccatgaccaccgatgctgcttgttgcgcgatgttggaacgacgagtcccatcaatcatatctgctgcggcgtatgggtcccggctttcgccgggacgacgcgcggagagggtctcgcccactccgtacccgtcatcgcccgcgtgcgatccgcaacgcaatctcgtgcgtccagtctacgatcgaaactggcggcgatagagcccgggctcgcgggccatcttgttggacagttcctgcgcgcgcgctgtttcatcgggcgtcatcgccgcggtctgcgcgacccagttttcacgcttcaccgggaagcattgcgcaaccggcgtgcccctgggcagtacgccgttgaaattggtatcgtgccagtgtgccgggaaatgaacccagctgtcgtggaacagatcgcaatcgaccatgccggtcagcgtggtgaacggcaggtcgaaccggttgaccggatgtgtgaagaacagcgagtagcccgccggcgcctcgatggtccacagattgacgaacttgatgagaaggcggtccggcgtgaacagcggcgagccgaccacctggctttcgtcgtggaatccgatcggcgagcgcgggaattcgagcgccccgccggcgggaaggtcgttgtcccaggtcattgcgccattctcgaccttcagatcgcagaccagcggcaacaggaaacctgacgtcatcgcatcgacgaatggcgggcagcgcttgacggtatcctcttcgcgattgctcatcgcattgaaggcctgcgtcggcatcgccttgagccacccgggaagacccaatgatgcaggcaccggtggcggaatcttgccctcgagctccgccgggcagcggaatttgatggttatcgcttcgttgttattggacacggttctggtccttggttcgttcgatatcggcagcgccaatgcgccagtcggtgctgatctagcacgcgatgacggggcggagaaagcaatcgcgcctgtcgcccggcgagctccggcatggagccataagttgttgttatcgtgacggataaggctagtcctcgattcccggtgcggcgcgcatgtcgatgccgcttttccgcgacgttccgttcgccaatatgcaagactttgccgataggcattggctttcgatgtctgtcgggcgcatcatggctggtgtcgctgacgccaggatttgcagcaggtaaccggagggaccaatggccgaatcgaaggttgagaccgccaacactgcaggcgccgcgccaccctccggcgacggcggcggcgtgagcgaacttgcgatcgcaaccgtccgcaccgtgccgatcgagcaggcgcagtcccgcaccgagcacgatctgctcggcgaggacgatgtgccggccaatgcgctgtggggtatccacaccaagcgcgcggtgatgaactttccgatcaccggcgtgccggtcggccattttccggagttcgtccgcgcgctggcgctggtgaagcaggccgccgcccgcgccaacaagcgcctcggttatctcgcggccgaaaaggccgatgccatcgacaaggcctgcaccaaggtcgcgaccgacaaggtctacgccgagtcttttgtcgtcgacgcgatccagggcggagccggcacctcgaccaacatgaacgccaacgaggtgatcgccaacgtcgcgctcaagctgatgggcaagaagcccggcgattatcacacgctgcacccgaacgacgacgtcaacatggcgcagtcgaccaacgatgcctatccgactgcgctgcggcttgcggtgatcttcgccacccagccgctggtgcgcgcgctggacgatctcgcctattccttcaagggcaaggcggtggaattcgccgacgtcctcaagatgggccgcacccagcttcaggatgcggtgccgatgacgctcggtcaggagttcgacgccttccacgccacggtgaaggaggacgtcgcacggctgaacgagatctccagcctgttccgcgaggtcaatctcggtgccaccgcgatcggtaccggtatcaatgccgatccgcgctatgcggcgcttgcggtcgaggagctgtcgcggttgtcgggccagccgatggtgctggcctcgaacctgatcgaggcgacctcggacctcggcgccttcgtgctgttctccggcgtgctgaagcgcgtcgcggtcaaggtgtcgaagatctgcaacgacctgcgcctgctgtcgtcggggccgcgtaccggcatcggcgagatccggctgcctgcggtgcaggccggctcgtcgatcatgcccggcaaggtcaacccggtgatcccggaggtggtcaaccaggtcgccttcctcgtcatcgggcacgatctcacggtgacgatgtgtgccgagggcggccagctccagctcaatgcgttcgagccgaccatcggctactgcgtgctgagctcgctgcgtatgctgacggcggcgatcgacaccctgaccaagcgctgcgtcgacggcatcgaggccgaccgcgagcgttgccgcagcctggttcaaggctcgatcggcctgatcacggcgctggcgccggcgctcggctacgaggcgagctcgcgtgtggcgcgccgcgcgctgaaggagaaccgctcggtcgccgacatcgtgctggaggagaagctgctgaccgaggatcagctcaaccagctgctcgagctcgaggcgatgacgcgtccggcacgccgccagcccgtgcccaagttgaaggatagttgagagcaggcgttacggagcgcgaggcaggacacagcatccgtcgttcgtcgtgctcgggcttgtcgcggcgtaccccttcaatgccgcccgcgcaagagacgcggctggccgggccaagcccggtcatgacggcgggagtgtcgaacggcgacagctacagtgtcttgatgaactcgatcagggcgcggcgctggtcttccttcagccccggcccgatcacgccggtgcccttctcgtcggagaattcgtgcccggaattgctgttgccgcgcttggcggtattgagcatgaagccgtccttgatcttgtccttccagacatagccgagatccttgggctcatattcccggctgccgagatagaaggtcggcggacgctccctcaccggtgacagcagcgcatagatggtcgggaccgacccgttgtgcagatagggcggggttgcccagatgccgttgagcggccggaccttgtaggcgagcggcgcctggatctcgttcggccggtagccgttgatgcgcttgcgatcctcgggcggggtcttgttctggtcgtaccagtagtcgacggtcttctcgacgagttcgccgagcgccggcccgaagctgccgtccttgatgttcagattggccggcgtctcgacggtgcgggtctgcaggccttcggcctgcgcgctgtcggtgccgatatggctgatcggaatcatctcgacgtcgagcagcggttgaccggcgtcgttcttgatccagcgcttcttgtccttgaacagcgaaaaggcctcgctctcgggcagcgccttgctgttgatcgccgggccatggcagtcctggcagtgcgtcttgtagagctcgccacccttcctcgcgagatccatgttgatctgccccaggatgttctccggccatttcggcgatgccaagccgccaaagcccttatcctcgctgggcggctcgccggcgatcatccgttccatctcgtgcagcgtgtcgatccgcgcgctcgatttgaacaggcccttggatgcatcgagcagattgagttcggcgctgacgccgagcgcctcgccggcattgcgcaccatcggctgcatgatcgagccgtcatactgcacccagctgaaccatggcgcattccagatccgcgggaaatgcaccggcgccgaatgcgaggcgtagttgttcggattgttcaggtcgatcgcaaacacctggttgccgatccggttcagtgcgtcgagccgcgcatagccttcctcgacgctgttggcggcgaccttgctctcaagcgcattgatcttggcatattgctgcagcacgagatcgagctggccgcgcagcgccatgcgttcctcgacgctggcctccttgccgaggatctcgtcggcaaagcgcgcgaagcggccgggccagaacctggtcagcagcagcgagacgccgacgctcttctggaattcgaacagattggtgttggccggtccgccgtcgatcacaatctcggtgccgcgatagctgaggcttccggtgtggcaggcggagcaggtcagcccgacgccgttcatgtcggccttgctgtgcgggttgcgccacggcgcgccgttggcatccaccatcgggccgctcggcgcaaacccgatcggcagcgcatccggcttgcccgggatcacggtgtcgggaatgaaaccgaagcggccgagataatcggtctcgctgagcttcggcgctgccgtgaacaacggccagagcgtcggctgctccagcgccatgaaccattcattcggaatgaggaacgtccgcgtgccctggtcggcgtgatagaaccagcgcagccgctcggcgctgacattctgatccagccacacggtcttcgcaggcggctggtagtcgacggccttgacgcggaagccgctcgccaccgtctcgatatcgtccttgaaatagaggacgccggcgacaatcagcagtccgatgaaaaagatcgtcttgcgaggcatgcccgtcccccaattcgcggtatcagcgcgtcatattgctgagatattaaaagtcgccgaaacagattcgcgttaaacgtgtgttgcactgtgcactatcctatcgcggcgccgctcggtctaccaacggaaatgttgcaagggaaatgtcgcaaaggaaattttggttggctgtgagccagttcacttgcggcgtgctctcctcggcggcatttgcgcgcatcgacggctgcggctagaaatgccggggcaacaattctccgggatggcgtcttgaacgcgtctggcgcacaaccgctcacgatcacggtctcggacgtcagtacggtgtccgcgctgctgctgcgcccggaagcggcacgtgcggcctatgtgttcgcccatggcgccggtgccggcatggcgcacccgtcgatggccgcgctggccgaaggcctggcagagcgcggcatcgcgacgttgcgttatcagtttccctacatggagaagggcggcaagcggcccgatccgcccgccgtcgcgcaggccacggtgcgcgccgcagtggccgagatgacgcgccattgcggcgaactgccgctgttcgccggcggcaagtcgtttggcggccggatgacctcgcaggcacaggccaaggcgccgctcgaaagcgtacgcgggctggtgtttctcggctttccgctgcaccccgccggcaagccgtcgagcgagcgggccgcgcacctcgccgaggtcaagattccgatgctgtttctgcagggcacgcgcgacgcgctggccgagctcgagctgctcgagcctgtcgtgaaggggttgggcagccgggcgaagctgcacctggcgcaggaggccgaccattccttccatgtcctgaagcgctccggccgcgatgatcgcgaggtgatggccgaagtgctcgatgcgttcgcagcgtgggtggcgaagcactcgtaacgaggtcggcgttccgcatgtgacactgtcccggattgcgctgcgctccatccgggctacagcgtcaactgcgagacgctgccgccgtcagcctaacgccgcaccgccatagatgcggtcgcgcaggcggcgcatgccggacagccagcgctcgcgattggtggccttgcgctgcatgtattcctgcacctgcggatgcgagaggatcaggaagcgctcttccgccatcgcctcgatcaccatccgcgccacttcgcccggctgcagcacgccgtcgacgcgcgccgcgctcgggccgggcgtggtcattccggtctggaccgattgcgggcagagcacggagacgcggatgccgcgatcaccatactggatcgccagatgctctgcgagcgcgaccgcggcattcttggtcacgccgtagggcatcgagttcagcgacgccaggagccccgcggcggatgcggtgttgagcagatagccggaaccgcgtgccagcatgccgggcaccagcgcgcgcgcggcgaagacgtggctcatcacatgcacccgccaactcacatcccagtcggcatcggatgcggtttcctgtcccttgcgcgacagcccggcattggagaagaacacgtcgaccgggccatatttgtcctcggcagcggcgatcagcgccttgatgtcttcctcgagcccgacatcggcggtgacggcgagcccgtcgatatcgccggcgacgctggcgagccggtcgcgcgaggtcttgagatcggcgaccacgacgccgcgcgcgccagcctccgcataggcccgcgccactgcctcgccgatcccgctcgcgccgccggtgacgacacagaccttgtccttgacgtgcatggttcgatgcccctgcttgttatcgtgagatccggattgtcagccctgatacaggcccttgtcacgcgccttctggatcgcgagggcggccatcaggtcgagcatcggggtcggaatatctgctgcgcgggcaaaggccgcgggcgcgcgcaccagcacgtcgatctccatggcgcggccgagctcgtagtcctgcaggatcgacggcttgtggtcgggcgcgggtcccgaacgggtgacgcgcttgaccccggggatatagcgcgtcgccaccgcattggcctcgtcgagcagccgtgggatcacctcctgcatgtcgggatcgtcgcggacgccgcgcgcggtcagcccggtcagcagacagagcaccgacatcgacatgttggtgagcagtttcgaccagatcgtctcgcgaatctccgtgacgtcaggcgattcgatcgcagcctcattaagcgccgcgcgcagccgggtgatgcgctcgctccggagatcgtcgcattcgccgatcaggaggcggttgcgatccggcgacagattcgccaccaatccgggcgcgatcacctcgttggaggagaagatcacgccgccgatgatgccctcttgcgggacggcattgcgcagacgcccgccgggatcgaggaagccgagatcgggaatcgcgggatgctgcggcggcagaccgagaccgtaccaccagggaatgccgttctgcgcgaacacgattgcggtgtcccgctcaagcagcggcaacagtccggttgcgagcgcactgacgccggtggccttcagcgtgctgatgacgacgtcctgcggccccaactcggcaggatcggccgacgcccttacccgtgcggtgacgctgctgtcgccgaccttcagcgtcaatccgttggccctgaccgcatcgagatgcgggtcgcgcatcacgcaggacacctcgtggccggcacgggccagccggaccgcgaaatggctgccgacggcgcccgcgccgaaaatacaaatacgcatgagtggaactggtccttgcaacgtgccgcgtcagtttccacaagcgcagggcatcgcgcaacccgtcatgcgcatggcgcggtcgcgcccgcccgaaagtgatggatcaaggcctttgctctcgccatagtgcgggtaacagcaatgccgaacgagggagaaacgtcatgtcggccagcccagtcctgtggagcctcgatgcgcgcggggtcgcgaccgtcacgctgaacaggcccgaggtcaacaacgcctatgacggcgcgctgatcgccggcgtgctggccgcgatcgacgaactctcgaccaagccggtccgcgtcgtcgtgctcaagggcaacggcaagcatttccaggccggcgccgacctgaaatggatcaacggcgtgcggccgaaatcacctgacgagaacgaggcggcgtcgcgcgccaccttcgaggcggtgcagcggctcaacacgctgccggtgcctaccgtggcgctggtgcagggcggttgcttcggcggcggcaccggcgtgatctcggcctgcgatatcgtgatcgcggccgacaacgcgctgttctcgatcaccgaagtgcgctggggcctgacggcggcgatcatcatcccgcaactctgcgacgccatcggcgtccgccaggtgcggcgctacgcactgaccggcgaacggttcggcgccgaggacgcgcgccgtatcggtctcgtccatgaggtggtgcccttggccgatctcgacagcgccggcgccaaggtcgtggagcaattgctcggcaatgccccggatgcgctggccgagaccaaaaagctggcgatggaaagctcgttcggcggcatggccgtcgacgatgcggcctacaagcgtctggtccatctgcattcggccaagcggcagaccgccgaggccgccgagggacttgcgtcctttgccgagaagcgcgcgggccgctggagcggggcggcgtaagccagctcagcagccgttgcagatgccgcggatgctgcgatagacctccgcgtcgtcgcggcgcatctgctccagcgattcaaacgtcttcgattcgttcgatcgcgccgccggctcggacctggattcgggcttgcgcttggccgcgagctcctgctcctgccgatggtagcaggcctcgcgctctgccttgggctcgatgaagcggcaggtctcgatcgccgccgctggtgtcgcgacgaagatcaggccgagcgaggctgatatcaggagtttcaagcgggcgatcctttcgcgtccttgtctcaggtcggcgggcggcggggcaaggccgccatcgcatcacagcgatcgcgacagcgacttcttcaatgtcttcaacagcgcctgcaccgcggcggcgtcgatgcggcgttcgggaacggcggccttcacccacagttcgggaatcggaaactcggtgaggatcggctgcagcgtgcccgcgcgcagcgcgtcagcgaccagatagtgcgacagcagcgcgatgccgttgccggcgatcgcgctttgcgtcagcacgcggccctcgttcgacgagagaatcgggcgcacctggatgttgatgcggccgcgcggcccctcgaacggccattccggaccggtcggcaggaagctgaggcagcggtgatcgaccagatcgcgcggatgcttgggcgtgccgtgcttcctgagataggacggcgaggcgcacaatagccgcggcagccggcacagcggctcgtcgaccacgccgccgaaggaatgcggaaaggcgccgatcgcgatgtcgaaaccttcggtcaccggatcgaccgggcgatcgatcattacgatctcgagctttacgctgcggttttgccgctggaagatcgtgaaggcatcggcgaggcgtgccaccgtcagcgaggtcggcgccttgacgcgcaaatgatcggagaggtcgcgctgcttctcgcccatccgcgacaggagatcgccgacatcggcgacgacgccgcgggcgcggtgcacatattgttgcccggcctcggtcaaccgcaactgtcgcgtcgagcgatggaacagcgcagtgccgatccgctcctcgagctgggtgacgcgcttggcgacaaccgatgttgcaacgttgagcttgcgcgcggcggcggagaagccgccggcatcggcagtggcgaggaaggcttcgaggttcacaagcgtatccatctgccctccccaatacttctccgcttttctcgattcgcgaaagctgattacataatttggtggattgtactgcaatctgcatcaattcatagtcggcccaatcaaccctgttcagggcggaaatgatgcgagcgagcacgatcgaagaacctgcgcggcaggtccccctctatggcgaatatgacgtggtggtgcttggcggcggcccggccggcattgcagctgcggtcggcgcggcgcgcgccgggcggcggacgctgttgatcgagcgctacggatttctcggcggcatgggcaccgcggccggcgtgaccaatttctgcggcctgcacgccaatattttcggcgggatgcatcgggtggtgcagggcgtcgcctccgacctcttggcgcggatcgaccggctcggcgggttgaatgcgccgcatctgatcctcggcaagatttttgcgcaggcctacgacaccgcggcgtacaagatcgcggccgacgatcttctggcgcatcacaaggtcgatatcctgttccacgcgctcggcgccggcgtcgtgatggatggcacccatatccgcgcgctgatggtggaaaccaaggccggccgtcaggcggtgcgcgccggcatcttcatcgactgctccggcgacggcgacctcgcagtgtgggccggtgcaccctatgaagtcggagacaatgccggcgggatgctctatccctcgatgatgttccgcctcaacggcatcgatccggcgaaggccggcgatgcctggcggacgattccggagcggatggcgcaggccgaggccgccggcacccacaccttcccgcgcaaatccgcgatcgtgcggccgcagaaatcgcagatcgaatggcgggtgaatttcacccaggtgacgcgcagcgatggcggcgccatttccggtattgatcccgacgagatgacgcgcggcgagatcgagggccgccgccaggcggtcgaagcgttcaagttcctgcgcaccgtgcccggcttcgaaaattcctacatcgtcgatctgccgccgcagctcggcatccgcgagacgcggcgcgtaatcggcggctacatgctgtccggcgaggacgtgctgggctgcgcctcgttcgaggactcgatcggcgtcaatggctggccgatggaaaagcacgtgcccggcgatgtgaccttcgagtttccgccgatccctgagagccgcggctataacgaattgccgtaccgcatgctgatacctgacggcgtcgacaatctcctggtcgccggccgttgcgcgtcgatgacccatgaagggcaatcggcggcgcgcgtctccggtgcctgtttcgtgatgggcgaggcggcgggaaccgcggccgcgctggcactctcgggcaatacgattccgcgcgacatttccgtcgaaaagttgcaacaacagctcacgcagcagggcgcgttcatcggccgcgatcggcccgtgcccgaaggaatctagggcgttttcaggcgaagtggatcccggttcgcgtgaagaaaacgcgtcaaaacaggaatcgagagccccgttccgatttgatcggaacgggctctaggcggaggatgaaatgaagggttgggcgcggctcgcactcgcgggcctgctgatgtgggccgcgagcggtatcgcgcgggccgacgatctgctgaaggcgaagatcggcgtgctgcggctgtcgtcctcggcgccggtgttcatcgcgcaggacaagggctatttccgtgacgccgggctcgatgtcgagctgaagttcttcgacgccgcgcaaccgatcgcggtcgcgaccacgtcgggcgatgtcgatttcggcatcactgccttcaccgccggactctacaatcttgccggaaagggcacgctgaaggtgatcggcggcatgagccgcgagaaggccggctatcccctgatcgggtatttcgccagcaacaacgcctatgcggccggcctgaagaccccgaaggatctcgccggcaagcgcgtcgcggtgacccaggtcggctccagtttccactattcgctcggcctgctcgccgacaaatacggcttcaagctgtccgacgtgaagatcgtgccgctgcaatcgctgtcgaacgcggccgcggcgctgaagggcgagaccgtcgacgccgcgctgctgccgatctcgacggcgcggacgctgatggattccaacggcgcgaaattcctcggctgggtcggcgacgagacgccgtggcagctgggcgccatcttcgcgtcgccgaagacgctgacccatgcgcaactggtgacgaggctgctcaccgcgctgacccgcgccgaccgcgaatatcacgatgtggttctggccgcgatcaaggacggcgtggttccgatcaacgagaagacaagaccgctgctcgagatcatcgccaaatacaccaacctgccggtcgagcaggtggtcggcaactgcgcctatgtcgatcccgacggcaagctcgacgtgaagaacgtcgacaaccagatcaaatggctgcaggagcagggtttcgccgacaagggttttgatgcgaatgcgatcatcgccaaggactatgtgaaggcggattgatgatgagccgtatgcgcaattctcgacccgccatcctgaggagccgcgaagcggcgtctcgaaggatcgacggcccgaatgcagcagctcggccgtcgacccttcgagacgcgcgcaaatgcgcgctcctcggggtgacgggtcgggtcgtggggcactgaatggacctgatcgccgaccatatcagccatcgtttcggcgcgctcgacgtgctcagcgacgtctccttcacggtccgcgccggcgaggtcgttgcgatcgtcggtccgtccggctgcggcaagagcacgctgctctcgatcctcggcggcctgctgcggccgagtaagggcgccgccgagttgcgcggcgcgcctccggcaggaagcctcaatccgctgaccttcgtattccaggactttgccctgctgccgtggaatacggtcgaggagaacgtcgcattcccgctgctgcacacgggcctgagcgccggcgagcgccgcaccgtgatcgacgacgcgctgcgccgcacgggcttaacggatttccgcgcgacctatccgaagcagctctccggcggcatgcgccagcgcgtcggcattgcgcgggcgctggcggtgcgtcccgcgatcctgctgatggacgagccgctgtcggcgctggactcgcagacccgcgagctcctgatggaggatttcgtgcgtctgctcgccgacggcaccatgggcgcggtctatgtcacgcataatctcgaggaagcggtgcggctcgccgaccgcgtcgtcgtgctgtcgcggcgtcccggccgcatccgggagatcgtgaccattccgatgacgcgcgccgagcgcggcacggcggatgcgcgcgggcagatggccgcattgcagggcgaattgtggtctttgatccgcaaggaggcgatcgatgccgagcgcgaggtccagcatgcttgaccgcgcgccgccggacacgaaggaccaattgggcgaagcgacgcggccggtcgcgtttcgcggcgccggcttcacgccgggcggcagccgctatgcgggttggctcgcgctcgcactcgtcatcgcgatctggcagctcgccggcagtgccggatgggtcaatccgctgttcctgccggcgccgtcggcgatcgcggtcgcgatctataagctcgcgacgtcgggcgcgctgtggcagcacctctcctggtcgatcatgcggatcggcaccggctggatgatcggcacggcagcgggcgtcattgtcggctttgcgatcgggctgtcgaccatggcgcgcggtgtcggcatcaccttcatctcggcgctgtttccgatcccgaagatcgcgctgctgccgctcttgatcctgtggctcgggatcggcgaggagccgaagatcgcgaccattgcgctcggggtgttcttctcgaccgcgatctcggtttatagcggcgtcgatgcggtgccgcgcaacctgatccggatggcacagagcttcaacgtgccgttccacgccatcgtgcgccgcgtgatctggccgggcgcgctgccctcgatcctcgccggcttccgcatcaccgcatccgttgcgttgctgctggtggtcagcgccgagatgatcggcgcgcaatacggcatcggcgccttcgtgctgcaggccggcaatctgatgcagaccgaccaactgctggccggcgtcgtgatcctgtcgctgttcggcctcgcggtcgggaagctgatcaatctgctggagacgcggctgctgcactggcggtgaggggcgcgagggcggcaaactcaaatgtcgtccctgcgaaagcagggacccataaccacaggaggtcgtcgttaggaaaggctggggccccagcacctccaacaacacgaccctgtggttatgggtcccgggtcgcgcttcgcttgcccgggacgacggtggttccgggacgacgacgactacacgtttctggctacgcgttgccccgatcctcgcggaacaggtcgagcttctgctgcaccgggcggtcggagaacgagaacagcaccgagtcggtatcggcctcgtgggtgacccagtgccagctcggcaccacgaacaaatcgcgcgggccccattcgaaggtctgatcgccgacccgggtgcggcccttgccttcgatcgcggcgaacaccgtggcgtcggtcgaccgatagcgcgcggtcttgaagcccttcggcagcagctggatgaaggtgccgatggtcggcatcgcgaaatcgccggtctcggggttggagaatttcagcttgaggccgtggcaggcgtcccactcgtcgctggttctggccttctccagcgcctcgcgggtgtattcataggggtagttgaagatcggtgaggtcttcgatgtccgcttctgatcgatcggcaggagattgtgaccgtagcgcgcgaagctggcgccggccggcttggagatcgactgctggtcttccttggcgccttcggcaaacgagcagtcgaagaactgcaccatcgggatgtcgagcccgtcgagccagaacatcggctcattggtttcgttggaatggtcgtgccaggtcatcgacggcgtgatgacgaaatcgcccggcgacatcgcggtgcgctcgccgtcgaccgcggtgaacgcgccctggccctcgagcacgaagcgcagcgccgattgcgcatggcgatgggcgggggcgatatcgcccggcaccaccatctgcacgccggcgaaaagtgaggtcgtgatcttggactggccgcgcagcccgggattttccagcaccagcacgcggcgctcggcttccttggccgtgatcagtctgccggcctcgttcatgtaatcgcggatctggtcgaacttccacaagtgaggccggcaggcgctcttcggctccggcgtgatcagatcgttcatcacgttccacaacgccgagaggttttggccgtcgatcttcttgtagaacgcttcgcgctccggggtcttctgcacggcttccatggcaagcctcccatcgttcttgtcggtgcaatttaattgacagtatactcacaatatggctagcgtcaatctaacgaaatgcaagggaggttccgatgaagctgcatggctatttccggagcagcgcgtcctaccgggtccggatcgccctcaacatgaaggggctgacgccggagcacctgccgcatcatctgcgcaagggcgagcagtgcgcgccggcctatctcgccatcaatccgcaggggctggtgccgacattggagagcgacgccggcgcgatcctcacccagtcgctcgcgatcatcgaatggctcgatgagaccaaccccaatccgccgctgctgccgaaggatccgctgcggcgcgccaaggtgcgggcgttcgcgcaggcgatcgcctgtgacacccacccggtgcagaatctgaaggtgctggcgcggctgcgcaagctcggcctgcccgaagagcaggtgaccgaatgggcggcctgggccaatcgcgaaggacttgcggcctgcgagaccctgatcgctgacgaggccgggccgttctgcttcggcgatacgccgacgcttgccgatctctgcctggtgccgcagctcgccaatgcgcggcgcttcggcgtcgacgtctcggcctatccgcgcctgctcaaggccgaggccgcgacaaagcaagtcgaggcgttcgccgacgccgccccggacaggcagcccgatgccgagtagcaagccgacgcccgtcaccatggacgcggtctacaccgcgcccggctatctgttccggcgcatgcagcagatcgcggtcgcgctcttcatcgaggagtgcagggcgttcgacctgacgccggtgcaatatgccgcgctggtcacgatctcgacccatcccggcatcgacgccaccaggctctccgccgtgatcgcgttcgaccgctccacgctcggcaatgtgatcgagcggctgcaggccaaggaatacatcgttcgcaagccggcggcggaggacaagcgcgtcaagctgctctatctcaccaaggccggcgcgggcgtgctcaacgacatcatgccctcggtcgacaaggcgcaggcacggatgctcgagccgctgaagccggccgaccgcaaaacgctgctctcgctcttgacccagcttgtcgatctcaacaacgaggcgtcgcgggtgccgttgcgcgccgaggacgcgctcgaacatctggggaggtcgggctgatggcggagacgcgacctgtcctgatcgcgggcggcggcatcggcggccttgccgtggcgctcggcctcgcgcagaagggcatccgctcgatcctgctggagaaggcggccgcgctcggcgagatcggcgccggcatccagctcgggccgaatgcgttccacgccttcgactatctcggcgtcggcgaggccgcgcgcaacatggccgtctatatcgaccagctccggctgatggatgcgctgaccgccgatgagatcacccacatcgatctcggcgagacgtttcgcgcgcggttcggcaacccctatgccgtggtgcatcgcggcgacctgcatggcgtgttcctgcgcgcttgcgagaggcacgaactgatcgagctgcgcgtctccagcgaggtgacaggctacgagcaggacggatcgtccgtgaccgcaaagctcgccaatggcgcgcgcgtcaccggacgcctgctgatcggcgccgacgggttgtggtccaacatccgcaagcaggtcacggcggacggcccgccgcgcgtctccggccataccacctatcgctcggtgatcccgacagagcagatgcccgaggatctgcgctggaacgcggcgacgctgtgggccggcccgaaatgccatatcgtgcattacccgctgtcgggctggaaggtgttcaacctcgtcgtcacctatcacaacgacgcgccggagccggtcgccggcaagccggtgtccgagcaagaggtgatgaagggcttcacccacgtccacgaacgcgcgcagaatatcatccgccacggcaccaactggaagctctgggtgctctgcgaccgcgatcccaccgagcgctggatcgacggccgcgtcgcgctgctcggcgacgccgcgcatccgatgttgcaatatttcgcgcagggcgcctgccaggcgatggaagacgcggtctgcctgtcgcacatgctggccaatcacgatgatcaggcggcggcgctcgacgcctatcgcgcgcaacgcttcccgcgcaccgcgcgcgtgcagctgatgtcccgtgcgatcggcgagcacgtttatcacccggccggcgaccacgcccgcatccgcaatgcgatcatgagcgcgaagtcgcagaacgaatggtgcgacgatatcgcgtggctgtatggcggaacggggttgggcggttagctagtagtggctgacgtacgcgttcgccacaccctcagtcgtcgtcgcggcgaaggccgggacccaaccacgaatagtcgttgttgaggcagctggggccccgatcttcgcgccacaagcatttgtggttatgggtcccggctttcgccgggacgacattgaatgtgtggccgctgtggtgcgcaagccggcgtcgctacatccgcatcaccgcctgccggtcgatcttgcccgtgccggtcttcggcagttcgtcgatgaacttcacctcgcgcggatatttgtagggcaggagcttcgtcttgacgtagtcctgcaaccgccgcgtcgcctcatcgctgtcgaagccggccttgttcatcaccaccacggcccgcagcgtcatgcggcggtcgggcaattcggcgccgtagaccgcgcattcgcggacgtcggggtgatcggcgaggcagagctcgacctccagcggatagacccactggccggagatcttgataaggtcgtcggcgcggccgcggaagaagtggaagccgtcgctgtcgcgcacgaagcggtcgccggtgtagatccagccgtcttcgcgcacggtctcggcggtcttgtccggccggttccagtacagcggtgttgcggaatcgccgcgcacccacaaaatgccttcctcattgtcgccgacctcgcggccgtcgctgtcgcgcagcatgatctcgtagccgggcacgcgcaggccggcggcgccgagcttcttctgctccgcgcggttgctgagatagacgtgcagcacctcggtcgagccgaggccttcgatgatctcgagcccggtgagctgtttccagccgttgaacacatcggccgatagcacctcggcggcggagaccgccatgcgcagcgaggagaagtccgcagcgtccgcgccttcggccttggtcagggtgatgtagagcgtcggcagcccgaagaatacggtcggccgatactgaccgatcgccgcgaagatcgcggcgggtttcggttggcccggcagcagcagcgtggcggcgccgaccgagaagggaaacgtgatcgaattgccgaagccgtaggcgaagaagatcttcggcaccgagaagcagatgtcgccgggcttgagcttcagcacgttgcgggcaaaggcgagctcgctataggccatgtcgtgctgcaaatgcacgatgcccttggggcggccggtcgagcctgacgaatacatccagaacgccatctcgttgcgatgggtgtcggccgcgtcgagctcgctccgaaatccttgcagccattcgccggcatcacgcgtctccgcaacggcatgaccgcccgcggcgccgttgaccacgatcagcgtgcgcagcggcgtatccttgcaggcctcggcgttgaagcgcgagcagaactccgcatcggtgacggcgacctgcgcgccggcatcggacaggtagaattgcagcagctccggcgtcgtcagcgtgttgatcaggagcggcacgagaccggcgcgcacagcgccgaagaacgccgccgggtaggccggggtgtcgtcaaggaacagcagcacgcggtcgccgcgcttcagcccgagcgacaggaatgcgtgaccccagcgtgctgcgtcggcgcagagctcgcgatacgtccgtgtgccggccgggccggtcagcgccaggcgttcggcattgccgttgccgagattgtcgaacaggatgcggctcgcattgtagtgcgcgggaatcgcaaagccgatctcgcgcgcaccgggactgtcctgcggaacctggtcggcgatcaggctcatgacggtccctttgcggcttcgtaccgggccatgaaggccggcgacatcgcgcgcagccgcgcgtcgtcgatgcggccggagcgggtgatgtagctgtaggcgaaatccagcaggtcgcgcttcatgtgcgcggggaaatgctcataccagtcggcgctggtccgcgccgcggtgacgagcttcttcacgatcggcttacgctcgctctcgtagcgcgctagtgctgcggcaacgccgctttcgctctccagcgccttggtcagcgcaatcgcgtcctcgatcgccagccgcgtaccggagccgatcgagaagtgcgcggaatgcagcgcgtcgccgatcagcaccatgttgccgtgcgaccagcgctcgttccagatccacgggaaattgcgccacaccgatttgttcgagatcagccggtggccatccagtgtctcggcgaacacctcctcgcagatcgcctgcgactcttcgatgctcctgtcggcgaagccgtaggccgcccaggtcgccgcgtcgcactcgaccaggaaggtgctcatgtccttcgcatagcgatagtgatgggcgttgaagcagcccacgtcggttgccacaaaggtctgcgacaacgttgcgaagggcttcgtggtgccgtaccaggcgaatttgttggtcgagtgcgagaccgatgccccgaatgcggtctcgaaaccgcggcgaaccatcgagttcagcccgtcggcagcgacgatcaggtcgtaccccttgagctcaccgaccgattgcacagcagtgtcgaattgcggcgtgacgccgacactgcgcacgcgctcctgcaggagcgtcagcaatgccagccgcccgatcgaggagaacccgacgccatcgatctcgacgctctcgccgcgcagattgagggtgatgttcttccagctctccatccgcggggtgatggcgtcgaccgtctcggggtcgtcggcgcgcaggaagtccagcgcctgctcggagaacaccacgccgaagccccaggtggcgccggccggattctgctcgaacagatcgatctcggcgtcgggatgacgcttcttccagagataggcgaaatagagcccgccgggccctccgccgatcacggcgatccgcaacgtctgcctcccagattgacagtgtacttacaatttggatcgagactaatctccctctggcgggaacgccagagggaaaatgcgcgcagcggctacaagcgtggtgccgaaaagttcagtagcagcggcggaccttgaccccgtcgacccaaatccagcggcagccggcgacgacgggcttgcggacgacgaccgcgccgcgatggccggcgcatcccgcgcgataggggccgcgcccgcacacgaccgcgttggcgtcggcggactcgaaggccatggtcgcggcaaaggacagcagggctgcagcgatcagcaataatgagcgcatgatattccctctcccggagtgaggactggttggcctctggatgacaacaaggtgctgcggcttcgtgcccgacagtcgccgggcacaggtcgtcgcgccgcttgtgcggctatttcttttcggcttccgccagcaccttcttgcaggcgggcgtcagcttgtcgctttccttggcgaggcaggcgatgatgcgcccgccgccgggcgtcacgctcttgcagaacttctggtagtcgcccatgcaggcgtcgcgttgcgccgtagtcagctcctgggcaaagacggcggttgagccgcacagcaaggcggcggtcaggacaatacgcagcatcgatcgctccctgttccggtcagtcgggtgaaaacggcatcagcgcgccgcgaacggcgctagcacgtcacggcacgccggtgacagcgagccggcattggtcgccaggcactgcacgatccgcccgccgcccggctggacgccgccgcagatcgagcggacgtcggcgccacaggccgagcgcaacacgaacagctcttcgcgtggtcgcagtggccgcagcgtgatcgctgccggcgcggccgccggggctgccgccgtcgccgcgccttcggccggtgcggcgccgccgccaccggccgccgcaaccgccttctcgcaggc

SEQ ID NO: 39 - DNA, 82727 bp, Bradyrhizobium enterica
cgccaccggccgccgcaaccgccttctcgcaggccggtgaaagcttcgccttgttcttctccaggcattgcaatgcaggcgcgccgccggtcggcaccccggcgcaaaccttcggatagtcggagcggcacgcactgcggatcgcggagatttgcgcgctgctcggcttgcctgcggcggcagctttcggtgctgccgtctccgcgggcttggccgcggtggtcgcgggcgccgcatcagtcttggctgccgcaggcgcggcggccggcgcttccacggccttcaccgcgctggcacaggccggggcaaggcttgccatgttcttctgcaggcattgcagcgacgcctcaccgcccggtggcacgctcgagcaatgtgcgatgtagtcgttgcggcattgcgacttgatggcgtcgcgctgggcctgggtcggcgcctgcgacagggccggcgcggtgctgatgaatgtcgcgagcccaagccatgcacacagcttcgttgcacgtgtcaacgcgttgatcatttgaataaatcctctcgttgcgccggaagctgccggcccaactgaactgcgttctgaaatgtcttgctgtacgcgagcgacatcattttcgctttcgagttccgctgcaagcggattgttgctatggatgaagcagactgaattttttgcgcctaccacgtttgaattaggtcatttgaactgaggctcggaaatgaggcatgcgcgcgcgtccgcacatttcggtcagagcaattttgtgcggctgcgaaatgcgccacttatgcgcacggtctgcgccatagcggccttcctcagtttaagtgcctgcgagcaaaacagttttgttccgccgccgccgccgaaggtcgacgtcgcgccgcctgtgcagcgcgccatcacgcgttatctggacgcaaccggaaacactgcgccgatcaagaccgtcgatctggtcgcgcgtgtgcagggcttcctgcagtcgatcgactatcaggacggttcgccggtgaagcaggggaccaccctgttcacgatcgagccggagacctacaagctgaagctggagcaggcgcaggccgccgaagtcggtgcgcaggcgacgctgaagcaggcggagctcgacttcaagcggcagcaggatctggtgcagcgccaggcagtgtcgcaggcgacgctggatacttcgaccgcgacgcgggacaacgcccaggccggcctgcagcaggcccaggtcaacaccaagctcgctgcagtcaattacggctacaccaatgtcgccgcgccgttcgacggcatcgtcagcaaccatctggtctcggtcggcgaactggtcggcgtggcgtcgccgacccagcttgccaccatcgtgcagctcgatccgatctatgtgaatttcaacgtcaacgaacaggacgtgcagcgggtgcgggacgaagcgcgccgccgcggcatcacgaccaccgacctcaggcagctgccgatcgaggtcgggttgcagaccgagaccggttatccgcacaagggcaagcttgactacatctcgccgaccatcaaccagtcgaccggaacgctcgccgtccgcggcctggtccccaatccggagcgcgtgctgctgccgggtttctatgtccgcgttcgggtgccgatcgacaagcaggacaatgcgctgctggtgccggacgttgcgatcggcagcgaccagagcggccgctacgtgctggtcgtcaatgccgacaacgtggtcgagcagcgcaaggtgacgaccggtccgctcgacgagggcctgcgcgtcatcgagagcgggctgaaggcggacgatcgcgtcgtgaccgccgggctgctgcgcgcgatccccggccagaaggtcgatccgcagatgcagaagggcgacgcgacgccggccgcggccaagtgaggggcgcgccatgatctcgaaattcttcatcgagcggccggtcctgtccaacgtcatcgcgatcctgatgatcctgatcggcggcgtcgcgctgttcaatctcgcggtcgcgcaatatcccgacgtggtaccgcccaccgtgcaggtgacgacgcgctatcccggcgcatcggcaaagaccgtgatcgacaccgtggcgctgccgatcgagcagcaggtcaacggcgtcgaggacatgctctacatgcagtcctacagcggcgccgacggcacctacacgctgaccgtgaccttcaagatcggcaccgacctcaacttcgcgcaggtgctggtgcagaaccgcgtctcctcggcgctgtcgcaactgccgaccgcggtgcagaaccagggcgtcacggtgcagaagcggtcgacctcgatcctgctgttcgtgacgctgacctcgccgaacaagacctacgacagcctgttcctgtcgaactacgccaccatcaacatccgcgacgagctgtcccgcctgccgggcgtcggcaacgtcaccgtgttcggcgccgggcaatattcgatgcgggtctggctcgatccgaacaagctgcaggcacgcgggctgatgccgcaggacgtgatccaggcgatccagcagcagagccagcaggtcacagccggccaggtcggcgcgccgccggcgccgcaggggcaggcgttccagtacacgctgaacgtcaacggccggctcgacgacgcgagccagttcgagaacatcatcgtcaagaccggcaatgtcggcgacgtcatccgggtccgcgatctcggctcggtcgagctcggcgcgcagacctacagccaggtgttctcgctcaaccagaagccggccaccggcatcggcgtgttcctgtcgccgggcgccaacgcactgcaggtcgagaaggaagtgcagaagaaggtggcgcagctcgccaagcagttcccgcaggacatcaaatacgacacgccgttcgacaccaccaaattcgtccaggcctcgatcgacgaggtctaccggacgctgatcgaggccggcctcctggtgctggtcgtgatccttgtgttcctgcaggattggcgggcgatgctggtgccggcgaccaccgtgccggtcaccatcatcggggcgttcgcggcgatggccgcgctcggcttcaccatcaatttgtcgacgctgtttgcgatcgtgctggcgatcggcatcgtggtcgacgacgccatcgtcgtggtcgaaggcgccgcgcacaatatcgagcagggcatgtccggccatgacgccgcgatcaaggcgatggacgaattgttcgcgccgatcgtcggcatcacgctggtgctgatctcggtgttcctgccggcggcgttcctgccggggctgaccggccggatgtacgcgcaattcgccttggtgatcgcggcgaccgcgctgctcagcgccgtcaatgccgcgaccctgaagccgacgcagtgtgcgttgtggctgcgtccgccggtgccgcccgagcagcgcaacttcttctaccgcggcttcaacgcagtctatgatcgggtggaacggggctacacgcggatcatcggtggcattgccgcccacgccaagacctcggtcctcgttgcgctggtcctgatcggaattgccggctacgggctgtcgcgggtgccgaccggcttcatcccgatcgaggaccaggggtatctgctggccgccgtgcagttgcccgacggcgccgcgatcgatcgcacccagcaggtgctcgacagggtcaccgagatcgcccgcaagacgccgggggtcgagcaggtggtttccatcgccggcatctccgcgctcgacaattcgtcgagccttgccaatgccggcgtcgcctatgtgatcctgaaggactggggctcgcgcggcccgggcgaggatctgcgctcgctggtctacggcctcaacgaccggcttgcggtgatcccggaggcgcgcattttggtcatcccgccgccgccgatccagggcatcggcaatgccgccggctttgccatgcaggtgcagctgcgcgacggcaacgccgactacggcaagctgcaggcggtcaccggcgccgtcgtcagcaatgcgcagacgcaaagcgcgctgcagcgggtgcagtcgtcgttccgctcgatggtgccgcagttcgacgtccaggtcgatcgcgtcaagaccgagaccctgcacgtcaccaccgaccagatcttctcgaccctgtcgtcctatctcggcgccagctacgtcaaccagttcaccaagttcggccgcaccttccaggtctacacccaggccgatgcgcaataccgcctgaccttgcgcgacatccagaacatgatggtgcgcaacagcaatggcgacatggtcccgctcggcacggtggcgaacatcacgccgtcggtcgggccgtcgctgatcagcctctacaacctctatccgtcggccaccatcatcggcctgccgtcgcagggctacagttccggccagtcgatgagcttgatggaggagatcgccgcgaagacgctgccgccgggcaccggctatgagtggacggcgatgtcgtaccaggagaaggaggtcggcagccagatctacttcgtgttcgcgctggcgctgctcctggtctacctcgtgctcgccggacaatatgagagctggtacgcgccgatctcggtgatcctggcggtgccgctgtcgctgctcgggccgatgctggtgctgactgcgctccggatcgagaacaacctctacacccagatcggcaccatcctgctgatcgcgctgtcggccaagaacgcgatcctgatcgtcgaggtcgcgctcgagcatcacatccgcgacggcaagccggtgctggaatcggcgatcgacgcggcgcgcgcccggttccggccgatcctgatgacctcgtttgcgttcatcctcggcgtcttgccgctggtgatcgcgaccggcgccggcgccaacgcccgcaagtcgatcggcatcaccgtgttctcaggcatgatcgcctcgacctgcctcgcggtgctgttcgtgccggcgttcttcgtcgtggtgcagaatttcgagaactggcgcaaggcgaagaagggcaaggcggccgggccgcaagccgcgcagcaggcgccgggcacggcgcattagccccgcgcacctacctatccccgtcacccccgcgcaaaggcttcgcctttgtcgcgggaggaggccgcaaagcggccgtctcgaagggtcgacggctcggcgccatctgcgccgccaaaccggggccgtggatccttcgaggcgcgcaagagcgcgcacctcagcatgacggaaccgagagcttttgcccctacaccttcaccatgcgcttgccgcggttctcgccggcgagcagcccgatcagcgcctgcggcgtgttctcgatgccgtcgatgacgtcctcctgcactttcagtttgccggaggagacccaggactgcaggtcggcgagcgcggcgtcgcgctggtccatgtagtccatcacgatgaagccctgcatgaccagccgcttcaccacgatcaggccgggcacgccgcgcgggccgtgcgcggagggcacgccgtcatattgcgagatcgcgccgcagcaggcgatgcggccgcggttgttcatctgggagaggcaggcctccaggatgtcgccgccgacattgtcgaaatagacgtcgatgcccttcggcgccgctgatcgcagtgccttgtaggtggcgccgtccttgtagtcgaccgcggcgtcgaagccgagctctgacgtcagccagtggcacttgtccttgccgccggcgatgccgaccacccggcagcccttgatcttggcgatctggccgacgatcgagccgaccgagccggccgccgccgacaccaccacggtctcgccttccttgggctttccgacatggagcaggccgaaataggcggtcaggccggcgatgccgtagacgctgagcaggtgcgtcatcggctcgagcttcggcatcttcgaaaggtgtttggcgggcacggtggcgtaatcctgccagccggtgtcgccgaacacgatatcgcccggcttgaggcctgggtcattcgacgacaccacttcggcgatgctgccgccggccatcacggtgttggcttcgaccgcagcacggtaggtggcgccgtgcatccaggcgcggttggcggcatcgagcgagatgtagcgcgtccgcaccagcgcctcgccctccttcggcgcggggatggtggcgttggtcaggcgaaaatgctcggggccgagtttgccggtcggcttttcaaccagcaggatctggcgattgatggtgtcgttcattggcgatgtctccccctcgcgttggtcgtttcgcatgcagtttgactgcgacgcgcgcagcttagtgcacagattgtgcgctgcatgaacgctagtcccggcgctggcattccacaacgggaacagatcggcaaagtcccgctggacgcgaagcgtgttgcgtagctgcgtaaatctgccacacttgccttacgccgggaacttacgggggtaagagaatgtcgaacaggtttacgcagtacatcctgattgcgatggtccttggcatcgcaatggggacgatcgtcttcaactatcttcctgacagccgtgccgagatcgccgccgacgtcaacctgatcgcgatgctgtttctgcgcctgatcaagatgatcatcgcgccgctggtgttcgccaccctcgttggcggcattgcccatatgggaagcggcgccaagctcgggcgcatcttcgccaagaccatgggctggttcgtctccgcctccttcatctcgctgctgctcggcctcgtgatggtcaatctgttgcagcccggcgccaatttccccggcacactgcccgacaaggcgcagtccaccggcctgccggtctcggcgttctcgatcgagaaattcctgacccatctgatcccgacctcgatcgcggatgcgatggcgcagaacgagatcctgcagatcgtggtgttcgcggtgttcttcgcggtcgcgctcggcgccatgcccgagcggtcgaagccgatcatgagcctgatcgacgacctcgcccatatcatgctgaaggtcaccggctatgtgatgctgttcgcgccgatcgcggtgtgggcagcgatcatggcgaccgtctcgaagaacggcctcggcgtgctctggaagctgatcgtcttcatgggcggcttctatctgtcgctgctgatcctgtggggcatcctggtcgcggtcggcttcatcgtgatcgggccgcgctacagtcacctgctgcggctgatccgcgaaccgctgatgatcgcgttttcgaccgcctcttcggaggcggcctatccgaagacgctggaggggctgaacaagttcggcgcctcctcgcggatatcggctttcgtgctgccgctcggctattcgttcaatctcgacggcacgatgatgtactgcaccttcgcgagcatcttcatcgcgcagacctaccatatcgagatgtcgctcggcacgcagctcgcgatgctggcaaccttgatgatcacctccaaaggcgtcgccggcgtgccgcgcgcgtcgctggtggtgatcgcctcgacgctgtcgcagttcggcatccccgaggccgggttgctgatgatcatgggcatcgacaccttcctcgacatgggccgcagcgccaccaacgtgatcggcaactcgctggcgaccgccgtggtcgcgaagtgggagggcgagctgaaggccgagcacgagctcgggcccgacgacgcggtgccgcaggacgcggtgcccggcgccgtgatggccggccattgacgggagggatgcatgcatcgcgcccgctggaggccgatccgggctgagcgccggttgctgtcggcatgtctgctggcagcaagcctgctcaccggaccggcgtccgcacagccggcgggcgaagggctcagccccacgctcgccaacatcaaggccacgcacacggtgcggatcggctatcgcgagagttcgccgccgttctcgttcctcgatcactccaaccggccgatcggctacagcctcgagctgtgcgatgcgatcgtcgacgagatcggggccgaggtcgacgacgccggcctcaaggtcgactacatcaaggtcacctccgacgaccgcattcccgcgttggtcgacaagaagatcgatctcgaatgcgggtcgaccacggcgaatgcggagcgtggcaagcaggtcgcgttctcgccgctgatgttcgtggccggtaccaagctgatggtgccgaaagcttcgggcgtcaaccaggtggccgatttgaagggcaagaccgtggtggtcaccaagggcaccaccaacgagcaggcgatccacaatgtcgacgccaagcaacagctcggcctcaacatcgtcaccggcggtgaccacgagcaatcctaccagatgctggtggacggcaaggcggatgcgttcgcgaccgacgacatcctgctctacggcctgatcgcgcggcacaagtcgcaggacaaattccgcgtcaccggcgactatctgtcctacgatccctacggcatcatgtaccgcaagggcgagccgcagatgaaagaggtggtcgagcgtgcgttccgcaagctcgcctcgaaccgcgacatcatcccgctctacaacaaatggttcgtcgcgcgcctgccgaccggcgagaagctcaacgtcgcgctgtcaccgcagctcgaggaagccttcaaggtgctcgacgagaaccagtagcttcggtatgtcacccgtcgtcccggctttcgccggggcgaccaacttgttcaaacaccgcgtccagcgccgcgtgatacgcagcttcgaccaacgccggatgccggcggcccagcgcctccatcttcacgccggaattcacctcgagcactttccacgcaccatcggcacgcacgacgtcgatggaggcgaagcggatgccgacagcctgcgcggccttgatggcgagcgcggtgcaggcgtcgcgtgtcgcatcatcagcgatcagcatgggctcggcaccggcgtcgagattgtgccgccagttcagcaggagccgctcgccggccggtggaatggcgtcgagcgcggcggcgtcgaaatcctcggggagagtcttgagctgctcggcggtcgcgctcgcctgcgccagcgcgcggagcgaatggatgccgtcgccgaccaccatcgggcgcgtcttgccgtagacgatcagtgcgtgcgcatcgagcagcacgacgcgcacctcgtgctcgatctcgacatagggcgagatcgcgagacttggatgtgcggcaaggatgcgcgcgaccgcggcctccagctgcgcccgcgtcgtgacgcggaagacgagctcgccggatgtcccctcgttaggcttgacgacaagcccgcgcggatgctggtcgagcagcagccgcatcgcctccagcgagtccgatcccgggatgtgcttgctgagcctgccgccgagaaacaacgtgtgcgcaatggcgggaacgccggccgatgccagcacctccgcgcaggccgatttgtcgttggcgacctgatgcgcgactgcgctgttcagcccgatgtcgtaaccgatcgcgagccgccgccgacggcccttggtcatgatgaccagccagccgcccgaccgcacctcgaccgcaatcgagcgcgccagacaatattttttgatggtttccaggaagattcgctggctgatcaggaccacgagatcattttcccttcaccacagtattcatagcaattatttgccagatcggcgtcgatctcagcaagtaaattacgtgcagcgccacgcgttaacgatggtcgtggttgaacccctgcgcgaaatcgaacgactgccattctgagatcgcaattgcacgccagttgatcttgactatctcatgcgcaggggcgatggacacgcgagatcttcaatgatttcggccacttctgcgccgtcgcgagcagtctagaaatcaaatcattctaaacctggtcagtcgagaaaacgaaaacacatgagcgcgttctatcgagagaaggttctttcggttcagcactggaccgatacgcttttcagcttccgggccacccgcgattccggtttccgcttccagaacgggcagttcgccatgatcggcctcgaggtcgacggccggccgctgctgcgcgcctattcgatggcgagcgccaatcacgaggaagagctcgagttcttctcgatcaaggtgcaggacggcccgctcacctccaagctgcagaagatccgcgagggcgacactatcctggtcggccgcaaggcgaccggcacgctgatcaccgacaatctgatccccggcaagcggctgatgctgctgtcgaccggcaccggactggcgccgttcgcgagcctgatcaaggaccccgaggtctatgatcgctacgaccagatcctgctggtgcatggctgccgccaggtctccgagctcggctatggcgaggagctggtcgccaagctgcgcgacgacgagctgttcgggccgctgctgtccgagaagctgtcctactatccgaccgtgacgcgcgagccgttccgcaaccgcggacgcatcaccgacctgatcacctcgaaccagctgttcaccgacctgcatcagggtccgctcgacatcgagaccgaccgcatcatgatgtgcggcagcccggcgatgctggaagagctcaagcagctgttcgagacccgcggcttcaaggaaggcagcggcaacacgcccggtcacttcgtgatcgagaaggcgttcgtcgagcgctgagaccgcttaagactgtcgtcctggcgaaagccaggacccattaccatcactctcggttttgcgaaggctggggccccatcaggcttcagctttttgcatttggggttatgggtcctggccttcgccaggacgacggctgtggtggtggcgtgcaccatttgtgtgttgctataactcaccccaacgccgcgcagccctttccgaacgcggcgaccagggagccgcgccttgtccatcaccgatccggatgcaccgaagaccgcctttgtgtttgccggcggcggcagctttggcgcggtccaggtcggcatgctgcaggcactggcggcgcatggcgtggtcgccgacatggtggtcggctccagcgtcggcgcgctcaacggcgccttctatgccggtgatccgacggtctcgggagtagcgcggctggccgagatctggcgcggcctgaaccggcaggacgtgtttccggtgacctggcggacactggtcggcttcctgtggcggcgcgatttcctgatcccgcatgacggcgtccgcaagctgatcgacgattacatcccgttccgcaatctcgaggacgcgcggatgccgatccacatcgtcacgaccgacattatcagcggcgacagcgtcgtgctgtcggaaggctccgccgcggaggcgatcgtggcatcgaccgcgatccccggcgcgttcacgccggtgcattaccgccatcatttcctggcggacggtgcgatctccagcaacacgccgatccgcgttgccgtgaagcagggggcaaaacgactgatcgtgctgccgaccgggcatgcctgcgccaaccaggcaccgccggtcggtgcgctcgccaacgcgctgcatgcgctgacattgctgatcgcgcggcaactcgtcaacgagctcgagaatatcggctccgatgtcgagtacttcgtggtaccgccgctctgcccgctggtcggctcgccctacgatttctcccgaacctcagatcacatcgcacgcgccctcgacaccaccaatgcgtggctggccggcgatggcctcaaggcggggcacatcccgcacgaattgcagccgcatggccattgagggggcggcggctgcgctttttcctccacctcccccgcaagcgggagagggagcgcagtctttacgcggccaccttagttgcactgcagcaggtgggatcaagttgaacgatcatggcacccgcacccgcccatccgggcggttgtcacatctgtgactgctcggccgtataaccgtagtgcacttgttccgcgagttggattaggctcagcgtcgacgggatattcaaggcagaccggaggattcaatggatacgatactgcttccgttctcgccgcgcttcatcgtgctgacgatctgcgccgttgtcacggtgctcctgctgctggttgggattttcgaccacaaggtcttcaagatcattctgatcccgctggtgatcttcggcgcgctgaccctgctcggcatccgcgacttcacgcagaagaaccacgcggtgctgcgcaactacccgatctctgcgcatgtccgcttcctgctcgaggaaatccgcccggagatgcggcagtatttcttcgagagcgagaaggacggcatgccgttctcgcgcgacacccgcgccgtggtctatcagcgtgccaagatggtgctcgacaagcggccgttcggcacccaggaggatgtctaccgcgagggctatgagtggatgcatcattcggtggcgccgaagccgcgcgccgacgagaaattccgcatcacgatcggcgggcccgattgcaccaagccgtattcggcctcggtcttcaacatctcggcgatgagcttcggcgcgctgagccccaacgcggtgcgggcgctgaatgccggcgcgaggaagggcggcttcgcccacgacaccggcgagggcggcgtcagtccctatcaccgcgagatggggggcgacatcatctgggaggtcggctccggctatttcggctgccgcaaccgcgacggcaccttcaatcccgagctgttcgcaagcgtcgcgggcgacgaccagatcaagatggtcgagctcaagatcagccagggcgccaagcccggccatggcggcgtgctgccggccgccaaggtctccgaggagatctccaagatccgcggcgtgccgatgggcgaggactgcatctcgccggcctatcacaaggcgttctcgacgccgatccagatgatggaattcgtcgccaacatgcgcaagctgtccggcggcaagccggccggcttcaagatgtgcatcggccatccctgggagttcctggcgatctgcaaggcgatgaaggagagcgggctgtatcccgacttcatcgtggtcgacggcaatgagggcggcaccggcgctgcgccgctcgagttcatggaccatctgggcatgccgatgcgcgagggcgtcaatttcgtccacaacgcgctgatcggcatcggcgcgcgcgaccgcatcaagatcggcgcgtccggcaagatcgcgaccgccttcgacatggcgcgcgcgatggcgatcggggccgattggtgcaattcggcccgcggcttcatgttcgcgctcggctgcatccagtccctgagctgccacaccgaccgctgtccgaccggcgtcacctcgcaggacccgatccgcaaccgcgcgctctatgtgccggacaagatcgagcgcgtgtacaattaccaccactcgaccctgcacgcgctgaccgagctgctcgccgccgccggcctcgagcacaccaaggatctgcggccgatccacttctcgcagcggacctcgaccaccgacgtgcgcaccttcgcgcagctgtatccgacgctgcgcccgggcgagctgctcgacggcacccaggatccgcgtttccgcgaagcctgggcgatggcgcgcgcggactcgttccagccggcggggtagggcgtccgacttacgtcggcgcgccgaaccatctggtcaacgcttccgtgaggccggcgcgggtccggtctccgacccacgccacgtagccgtccgggcggaccaacactgcgctgggtgccgacaccgctccgagcgcgggcagctcccaggtgccggcataggcggcgtcgagcagctgaacccggtcggcccacccggtgatgtcgaagctgccgggctcgccaagattgagcagcgccggccgcgcctggtgcagcagtgcgaagacccgtcgcgggccgctcgccgtgaccagatcgagatcgggcatgcggcgtccgagcaatggatgaccgtcgccgagctcgtaatgcaggtcgaggcccgacatcatcgcggcaaagcggcggcgcggctcctccatgcgcagcaattcggagaccacctcgctcagcgccttgctgcgcgcatcggtgcggttgagcgcgacgtgcgccatggtgttgcgcagtacgcgggccgccaccggatgccgctcggtctgatagctgtcgagcaggctgtccggcgatgtcagcttgaccacctgggcgagcttccagcccagattcaccgcgtcctgcacgccgatattgaggccctgtccgcccatcggcggatgcacatgggcggcatcgccggccagcagcacgcgctgcctgcgatagctcaccgcctgccgggtcatgtcggtgaagcgcgagatccagaccggattgtggatgccgaaatcggtgccgtaggcggcgatcagcgtctcgctgacgtcgttgagggtgggctcccggtccgtgccgagctgccgctcggtcaacacgacccgcacccgcccgctgtcttccaccttgccgatcgcgaaagtgccggtgtcgtcctggcgaaagccccagtgcggttcgccggacatctcggcctcggcgatcagccagcttctggtcggatcccatccggcgaagtcgatgccggccgctttgcggacggtgctccggccgccgtcgcagccgacgagatactgcgcccggagccggccgtccgacagctcgacatcgacgccggcgtcgtcctgggcaaacccggtcacgtcgcgttcgcgatagatcggcaccgcgagttcgccgacccattcgccgagaatgcgctcgatatggctctggaacagcccgagcgtgaaattgcgccgggtcggaaagtcggtgatatcgagcggaaccagatgcgagtggaacagcaccgcgggatgccgcgtcccctccgcgacgaatcgatcgccgatgccgcgctgatcgagcacctccacggtgcgcgcatgcaatccgcccgcccgcgcgccgatcaggtccgctcccgcgcgccgctcgacgacggcgacatcgatcccggccagcgccagctcgcccgcaagcatcagcccggtcggacctccaccggcaatcaccacagcatgttcccgcatcccgcactcccttcgttcgattgggcgcgcgttctacgggatgaccccgggcttgcggcaagcccggggggtctacatatatttgagtggggagagggcgttttgtcgctcgaaccaatccaaaacatcattgcgaagaccggcgcggcaaactcgctgtcgtcccggctttcgccgggacgacagttggaggtagcagccctagaactcgccgtgcagacggccggagatgatgtgcaccgggccgcggtcggcgttgtaggcggggttggcgatgaactgatagtctgcggtcaccgtgaagtgcttgttgaccgaataggcgtagtagctctcgaagatgccctcattgcggtagttgagcgcgccgtcgccgatcaataggccggtaccgccggcggcgaggaagtcgcgatgcgaggcggagagcccgttgatcgcgccgccgatgccgatggtgtcgtccggccgcccccatcgggcgcccttgatcgacacgccgcccgaaaggctgcggtcgacgtcggtgaacgacaggatctcgttctggccgtcattccagctcaggcgaccgaacacgccgacatcggttgcgatctgctgctcggcgttgagatagaagccgtatttcaggttgtccttgcggatgcccgccatcacggcgttgatgtcgagcgtcgggtcggcggcgaccgtgccgagcgcctggctgtaattgccggtgaagccgcggttgccgaacacgccgacgcgtatcttgccgggctggtcgaagatcgagtagcgcccctcgaactcgacgacggcgccgccggtcttccaggtcaggacgtcgctgttcggcgcatccggcacctggaacagggcgccgcgcaccgcccagtccctgcggttgaaatcgaccacggcgccgcgggtgtagccgggcaggtcggccgggaaatcataggcggccgacgaccacatcgcccagttcatgaaatcggcgcgcggatccttcgcataggaattgccgtcgaagaagtcgccgactgcgaagcggccgacgatcagcgtcagccgatcgatgtcgcgcttgcccgcgatctggtttgggccgtcagggacgtcttcctgctcgccgccgaagccgaaggtctgcttgatgtagtagcgctgcggccggatcctcggatattcggcgccggccttctgggcttccccgttcgggaagccggcgatgccgagcgtgccgttgaggccgaagccctgcgcggtctccgggttgaagtagagctcgccgccctcccacaaccgcacaccgaggaacgcagtcgtggtccaggtctgctgcgcctgtccgcccgccggaaggctgttggtgccgctaaaggctgaacggaacgccgggtagccctgtccgatcaacgtcgtctggccatggatcgtccaattgtcggagtccggcaaccgcggctgggtcggcgtcgccgaccatggcgagtcgccaagctggtagttcaggccgaacttcagcagatgaatccgcgggtccatggtgacgccgggcatgccgaaatcattgagcccgagcgtccgccgcgacaggtcgatatattcgtattcgatcttggcggtccaattgccgctcagcgcgaactcggcgccgacgccggcggtccaaccggtctggtactgcccaggctcggagacgacactgcccgaatcgtcattgaccctgacctgggtgtgtccccaggcgaagccgccggtgacatagggcatccagctgccaaagctgtagccggcgcggccgcgcacggtgccgacatagtcgatcgaggcattgaaggggccgagcgtgcgccgcggcagatcgaccgggctcacgaaggtcgcatcggtctcgacgccgagcacgaagcggttggcgaactggtgattgtatccgacctggaagccgccgaccccgcccgtgacgctgtgcggaaagaagaccgcctggaggggaagcggattggtatcgggaccgaggctgccgtcgccatagccgacatggccgccgacgtaaaagccggtccagttgtagaccgccgtgttgatggccggtgacttgacggccatgtcggccgcggccgcgggcgtgccgaaggctgcagcgccgagcgctgcgccggcggcgatccggacccgaaacaggcggacgcaggtcatgacgcgacaatctcccccgcgcggttggaggtattccctgccatcactgcagatttggcggccgcgtgccacccgagatttgaagtcatcgcccgccgtccccggtctgatctgcatcattccatccaatgccagatcagcaactaacacccccagttccttattgcaaatggttcgcaatagcaactgagactcgccggatgcctcccggtgtgcactgcctctatgacagtcgtgtaacgaggtgaagccgccggcgcgcttcgctgcaattggctgcgcgggtgtggcagtccggtcgagggcccaccgctcattcgatgccgtcatggtctttaactttccttgtcgaggtgaattccggccgcggccttcgtcccagcgcgatcagcgcgccggctcgttcgaaggtccgcgccactgagagcgccgcgcgcagctcggcgctcgagattgtgcgtttcaggtagagcgcggttgcgccgcgcaggatggcgctcgccagcctcagcagcacgaccgcgccccatcgacggccgcggccgaggggcacgaccgtcacgcccccaccgtggcgagctgcacgatccgcaacagcacgagcccggcggcgacgaccagatagccgcgcagcacgatcatccagatccggctcaacgggctgagccgcgccggcggcagccgatcgagcggcggcatccgccaggtgtcgcggtcgaacagcggcggctggtgccgcttgaagcggaacgaggcgtggcggcgcgacgacatctcgtacagcttgaccagcgccgtgacggcgacggcaagtgcgctgccgccgaccaggatgccgatgatccaggcctcgctgaggtcggggaacagcaccgcggcggtcaggatcaccgacagcatcaccagccccgccacgacagcgccggtgaacaggttcagcctcgtcgaattgatccagggtccgaggatgtgacggtcgttgcagagcaggagcaggaacacggtcgcgctcggcagcagcacgccggccagcgtctgcaccgcgttggtgagcagcccgagcggcgtgcccggcgtcagcaccaacacggcggcgagcacgatcaggccgcaatagacgctgtagaagcctttggcgtcccacagcttgcggtgcagcgagtgcttgaccgcgaatacgtcgccgatcgcataggcggtcgagagggagaccgcggcggcgccgatgatgcaggcatccagcaaagcgagggcaaacagcacagccggcagccgcccggcatatttctcgagcccgaccgcggtcccgagcgcgtcggtgtagttgccgaattcgggctgtccggagaacacgtgcgcgcagaacgagatcatcgccaccgcgccgaccacgaccagcacgatgccgatgcacagatccatccgctcatagcggatgaagcgcggggtgatccgcttgtcgacgatgtagctctgctggaagaacaattgccatggcgccaccgtggtgccgacgatggcgacgatcagcagcatcacttcgctgagcttggcgccctcgggcatcttcggcacgaagaagtcggaggcgatctgcccgatcggcggatgcaccatcaggatcacaggcaccagcagcaggctgcccgcgaccagcacgatgccgaagcgttcgaaacggcggaagtcgccggtcgataccgccagcatcacgatcgcggccgaggccagcacgccccagaattgcgacaggccgagatagctcagcgcgagcgtgatgccgatgaattcggtgacgatggtcagtgcgttcagcaccagcaggtcgatcacgctgaaggcgccccagaattttccgaaccgctcgaagatcagccgcgcatggccgacgccggtgacggcgccgagccgcaccaccatctcctggttgacgtaaagcacgggaatcagcagcagcagcgtccacagcagcgtggtgccgtagttctggccggcctgggtataggtgccgaaggcgccggcatcgttgtcgccgaccatcacgatcaggccggggccgacgatcgcgagcagcgtcttcaaccgcgccgtcaaggtcgcgcgcggcgcgacatcatcttccgcgatgctgccgagcgcgccgtggatatcgccgagatgcgcccggtccaggaccgcggtccggctcgaggcgagagccgcttgatcgggggcgtgcatgtccaagtcattgacgacggtcatgactcattccttcttacttgcgtggtttggtggttcgggctgctggaaagcggatgatgttggtcgcatcaggcgcgggcgttggcgttgcggcgcgtcggcgcttcggcgcggtatcggtgtccagcaccagcacgacgccgagtgcggcgacgtggcgtaccaggcccgcgctttcgctgatgatgccgatgacgcttcgcatcacgggcgcgagcggatcgtaggcttcaccggtgttgcggacggtctgcgtggcggtcggccggcggcccggcccgaagatgtcatttgccttgctcatgttcgtctcctgtccgcttcggtgctggcatggacgggtctgaatcccggtgacgggatttcggcggcttctcggcaatcccgagttcgtcggcgcggcggcgcatctcgatccagaccgagccgggttcgatgccggcgcgatgccacaatgcgacgaggtggtagagcaggtcggcgctttcgctgacgatcgcctgcgtgttgtgcttgacggtctcgagcgcgacctctccggcctcctcgatcaccttctgggcgatcttgcgggtgctcgaggtgagcagccttgcggtgcgcgggtgattatccggcgtcaccgcgtcgagtgacgcatgcagccgatcgagttcaccctgcgaggccgtcgccgcgcgcggcccgtcgccgaccggcggcgctccggcctggcggcgcaagcgtccctgccggcggggcggctctgtctctgtttgtctggcggtttcagtcatacctgctccgatcgtctccgcgctgcctgtcaggcacggcgcgagggacgcggagcggctttacgcgcgcgcgcaacctccgctgccgtgagcagcggcattctcaaacgtgatgtcgttccccgaagggtgtcccgttgcagcgccggaacggcgggcaacgggacgactaggtccctcgtccatgttcgtcccctagggcatgatccggaaaactgcgaagcggttttccggaacgatcatgcctaaacaagaatccagagcgcgatgacgattcaagctgatctcatcgcgcttcaggcgctcgccgccatcttgagcttggcggcacgcgcgattgttgtgcgcgggccggaaggccggtccgcgcatcgctcaccgttggtcggttcggtgctggtttcgacggtccaccggcattccaggtggccgtcgatcaagacccaatgacatgccggtgccggggttggacgccggcctcggccctccgggtggcgaaaacccgggaggttgtcattggaatgggtggccgcaatcggccgcggcgccatgcgctgcggctcgaacggccggaattttgcgagcttttcgaacatcgctcacctccacttccgctgtcgcgcggcaggccggtgaggagcggcggtcagctaaggcgcgaccacccatccacgcaggcgaaatctgcgcgatcagttttgctatgttgcggcgtcaacagtcccgtcgagggtctactgtcgcctgagttgctactgcccatgtgccttctgtgttggctcgtggtcgggttggtctttcggggtaggaccccggcgcggaacgaatgttccgacaattgggcactacgcctgacacaaacacgtgtcaagccgaatttgctatcctcctgggaggatcgcgattatcctcccgggaggataggagaaccatatgtccgacgaccatccgcatgttgccatcgcccggcgcctgaagcgcgccaacggccatctcgagaccatcgtcgagatgatcgagcagggcaagccatgcgcccagatcgcccagcaattgcaggccgtggagagtgcgatcgagagcgccaagaaggcgctgatccacgatcacatcggccacagcctggaggagacgttgaaggcatcgggccccaagggccgcaatgtgctgcgcgactttcggctgatcgcgaaatacctgtgacccaacatacctgtgacccaagatacccgtgatcaaaggccgcatgcggcggactgacgaagcttgacccgtccggggggatcaccggacgggtcggttgcgacacggggtggatgaggacccgtgccgaacgcaggatccgcagcctttagaaaagcccgtcgatcagtagcaggtgcgcacgcggccgatgtagttgccgtaggcgtcgaactggcgcacccagccgcagcggcgatagccggtgtcgtagtagccgtcgctggccgcgatcgcgctgccgacgatggcggcgccgaccagccccgcgccaacgccccagccccagccatacggcttggcttcggcctgcgaggtggtggatgcgatggtgccggtcacggcgagcgcggcgagggcgagggcggcaaacttggtcttgatcgacatgggatactccatcctgtttgagcgcggtccggtgtggtccgcatgcccgttggacggaggctttccggttccggttcgagcgccggccgggaaatatggtttcgtggattgtttcgtcgcgaataaagctctgcgagatgggtctaaatggctcgccgcgagctcggtgcacctctccccgtcggggagaggtgaaccatccacggcgcttcctgctcaaaccttatccatcatgcgtcagcaagacggagtcagttgcccgcgaatacgcccggatcgaacctgtcgacgtccgcaagcagctcgcagaacgcacgcgcgccatgctcgagcagctgctcgcccttgtcggcagaagccttggtggcatcgccgatcgcgccgcttggattgagatcctgcgcctgccaggcgaacggtgccggccgctgggtcgacagcaagcggtgatcctgctcgatctgaatgctcgcgggcttgaagtccgcgatcgcatccttgcgcacatgctgcggatacttcgccagcatgatcgaggtttcgaccgcgccgccatggatgccgtggcgcagttcgtcggcatcgaacagcccgtcgggtgtgccgaagcgcgaccagctcgtggtgaccaccagcatcttgtgctgcgcgcgcagatcctgcgcgacgagttgcatcgcggcggagttgccgccatggctggtcaccatcacgagcttcctgaccccggcgcgtgccacgctctcgccgagcgccatccagctgttcagcgccacctcggtcggcagggtcagcgtgcccggaaaatcgatgtgctcggtggagatgccgaccggctgcacgggcaggaacgtcgccgggatggccgctggcagcagcgcctgcacccgcgccagatacgcttcaccgatcatgacgtcggttccgagcggcagatgcggcccgtgctgctcggtcgcggccagtggcagcaccacgatccagcgcgcggccgcgcccttggcgatgtcgggccaatggatggcggtccagtcacggggcggaagcgtcgaggtcatcaaggctgtcgtttcaatacaagcgtttcatgggatggatttgcaggctagtttgtttaacatcgtgaggcgttcgcgtctccgggcgcggtccacctcctgccgccttccatcatgggccattatatcagacggagtccaaccatgatcccggcctttttgctgcgagcgttaaccacagccctgctggccgccaccctcggcgtttccgcaggtgtcctcccggtgcgggcgcagagctcggacaagtctttggacaaggtctcgttcggcaccaactgggtcgccgagggcgagcatggcggcttcttccaggcgctggccgacggcacctacaagaaatacggcctcgacgtcaccatcgtgcccggcggccccaacgagaacaaccgcatgctcctgatcgcgggcaagctcgacttcttcatgagcgcgaactcgctgcagaccttcgacgccgtcaccaacaacgtgccgctggtcgccgtcgcgaccatgttccagaaggacccgcaggtcttcctcacccacccggaggtcaaggtcagcaagatcgaggatctgaagccgctgacgctgctgatctcgaaggaaggcatcaccagctacttccagtggctgaaatctgagtacggcttcgacgagaacaaggtgaagccctacaccttcaacccgcagcccttcatcgtgaacaagcagacggccatgcagggctatgtcacgtcggagcccttcgcggtcgagaaggccgccggcttcaagccgaacgtgctgctgctcgccgactacggcttcaactcctattcgacgctgatcgagacccgccgcgacctggtcgacaagaagccggacctggtgcaacgcttcgtcgatgcctcgatcgtcggctggtacacctatgtgtacggcgacaattcggccggcaatgcgatgatcaagaagctcaatcccgacatgaacgacgagctgctggcctattgcgtcgccaagatgcgcgagtacggcatcgtcgattccggcgattccatcaagaacggcatcggcgccatgaccgacgagcggatggcgagcttcttcgacaagatggtgcgcgccggcgtggtcaagagcaccatcgactatcgccagggctatacgctgcgcttcgtcaacaaggcggtcggcgtcgagctccggcccaagaactgacggtgcggacgcgatgaactttgacgcgaatgttgcagcgtcggtagtccacctctccccctgtgggagaggcataggccgcccatggcggccgtacctagcgacgccgaagcaacgcttcggctatgtcgcatcgccagatgcgatccgggtgaggggtgacgctctctcgtgggacctgcgccccctcacccggcgcttcgcgccgacctctccccgatggggagaggtgctccccgcggcacgatcgcgctcagcaaaatccagccgtcgatggtagagagcatcgtgtcggaaatcgccgccagcagctccgccgtgcgcctgcgcggcgtcaccaagacctatgacagcggcgtgatggcgctcgggccgctcgacctcgaagtccggcaaggcgagttcgtctcgctgctcgggccctccggttgcggaaaatccaccgcgctgcgaattatcgcaggcctcgccacaccgagcacaggcacggtcgagctcgcgcatcacgacgtcgagcggcgcggcagtcaccgtatcggcttcgtgttccaggagccgacgctgatgccgtgggccaatgtgcgcgacaatgtccgcctgccgctgaagctcgcccgcgcgccggcgaccgatgccgatgcccgcatcgaggcggcgctcgatcaggtcgggctggcggagtttgccggtgcctatccgcgcgaattgtccggcggcatgaagatgcgggtgtcgctggcgcgcgcgctggtcaccgatccggatatcctgctgatggacgagccgttcgcggcactcgacgagatcacgcgttttcgcctcaacaacgatctcttgtcgctgtggcgcgatttgcacaagaccgtcatcttcgtgacgcactcggtgttcgagtcggtctatctctccgagcgtgtgatcgtgatgacggcgcggccgggccggatcggcgccgagtttcatatcaactcggccgagccgcgcggcgaggagttccgcacctcggccgaatatgccgcctactgccgcgaggtctcgcatgcgctggcgccgtcctatgcggggcaggccggcgcatgaagtctccgcaagacctcatccgctttctgcttccggtcgcggtgttcgctgcggggctcgcgctctgggaagcgatcgtccgcgcctatggcatccagccctacgtgctgccgagcccgctattggtgctgaagacgctggttgcagactggccgatcctgtcgcaatcgctcggcgtcacgctgctgaccacgctcgaaggcttcgttgccgccgcggtcggcggcgtggtgctggcgctgttgttcaaccaatcgaaatggctggaatattcgctgtttccttatgcggtggtgctgcaggtcacgcccgtgatcgcgatcgcgccgctgctcctgatctatctgcagcagcagaccgcggtgatcgtctgcgcctggatcgtggcgttctttccggtgctgtcgaacaccacgctcgggctcaactcggtcgatcgcaacctcgccggtttgtttcaactttatggcgcgtcacggctgcaaacgctgttgttcctgaagctgcctgcggcgctgccttatattctcggcggcctgcgcatcgccggcgggctgtcgctgatcggcgccgtggtcgcggagatcgcagcgggcagtgcaggtgccggctcgggcctcgcgttccggatcgctgaatcgggctaccggctgaatattccccgcatgtttgcagcccttctgctgctatcgctggccgggattgtcatctatggggtgctggcgctagtttcgcacctcttgttgcggcgttggcatgaaagcgcgttaggaaaggacagttgatggccccgatttcttccgaaaagatcgatctgctgatttacggaccgatccggccaatcctcgaaaacggcttttccgatcaatacgtgctgcacaaggccgagagccgcggcgacctcgaacggctgacgatggacacgatggccaagatccgcggcatcgccgtcacctatcacacgatggcgaccgacaagaccgcgatggcgctgtttcccaagctggagatcgtcggcagcttcggcgtcggctacgaccacgtcgattccgcctatgcgcgcgatcacaatatcgtggtcaccaacacgcccgacgtgctgaccgaggaggtcgccgacgtcgcgatgggtctgttgattgcgaccttgcgcgaattcgtcaaggccgaccgctatgtgcgctccggcctgtggcagacccagaattatccgctcagcgtcggctcgctgcgtgatcgcaagatcggcatcgtcggcatgggccggatcggccaggcgatcggccgtcgcctggaagcctcgcgggtgccggtgtcatatcactcgcgcaacccatccaaggacgtttcctacaagcactatcccgacctgatcgaaatggcgaaggcggtcgacaccctgatcgtcatcgtgccgggcggcgcctcgaccgcgaagatgatcaatgccgacgttctgaaggcgctcggcccgcgcggtgtgctgatcaatgtggcgcgcggctccgtggtcgacgagccggcgctggtcgcggcgttgaaatccggcaccatcctcgccgccggtctcgacgtgttcgcggccgagccgaacgtgccggacgaattgaaggcgatgcagaatgtcgtgctgctgccgcatatcggttcggcctcggtggtgacgcgcaacgcaatggaccagctcgtggtcgacaacatcaggaactggttcgccggcaagccgccgctgacgccggtcgccgaaaccccggtcagggatcgctgatggcattgtcccgcttcagcgtcgtgctgctcgcgctgctggccgcatccggtccagccgccgcgcaggacgtcacgacgttgaagaaggacatgatcggacagtgggagctcgccaccaccgagcgcagcaagacctgcgtcgtgacgctgaagagcgacgcgacgccgcaaggcttcaagctcgagctcgagccggcctgcgccgccgcgctgcccttcaccaaggacatcaccggctggagcatcaagggcctcggcgacatcgtgcggctacacaacgcggccggcgaggcggtgatcgatttcacagaagtcgaggccggcatcttcgagggcatgcgcaccaacgagggcgtctacatcctgcagaatctcgccgccgcccgctcgctcgccaagtcgatggaccagatgatcggcgactggtcgatggtccgtggcaacggccaggcgatctgcgcgctggtgctgaccaacaccgacgccggcaacgacaatttccaggtgttcatgaaaggcaaatgcgatcccgcggtcgcgaccttcaacccgacgctgtggcggctcgaccacggccagatgatcctgatgtcgcccaagggcgagagctggcagttcgaggccgacgacaacgcccagtggcgccgcatccccgacagcgccgatccgctgatcatgttgcgggagcaatagggggccggcgaaatatcaccgcctccgcatgcggtactcgccgacaaatttgcgcgatttcggaatattggaaatatctccctgatttgcccgacgtgtcaaggtccccgtatcggacgccggcagcccgccggctgctttgcatggggttgttttcgatatttttgaccccgcgcatccgcggcggcgtaaagccgccgatgcgtccgcagtttgccctgttccgtcgtccagcccgaaaataattccccactccctgtcgatccggttcgcgccggatcgtcgtcaccagtagcgagccggttttgcggcggttatcgtcgcttctcgcctaaaacaggagttttccgatgcggttcatgtatatcgtcacctcgtcccagcccccgcggccgccgacgccggcgctgatggaggcgatgggcaagctcgccgagcgggaaatcaaggccggccgcatgatcgacaccggcgggctgctgccggtcgcgatgggcgcccaggtccgcatcaccgacggcaagctcaacgtcatcgacgggccgttcgtcgagaccaaggagatgatcggcggttacgcgatcttcgagctgcgcaacaaggaagaggccgtcgcggccgccgtggagttcatgcagctgcaaaaggagcatatgccgggctgggaagggacctgcgaggtgcgccacctcgcgaccccgggcgttgacgtcgcctgccaggtcgatgtgtccgccgtcgcctgacgggccgcggagggagcgttttcgagcgaagtggcttccagcccgcgtgaagaaggcgcgacacggcaagacgtcaagtcggcggcgatgacggccgccgacatccagtccacgatccttgcggtgtggcgcatcgagcagccgcggctgatcaccagcctgtcgcggatgctgcgcgacgtgccgctcgccgaggatctgacccaggaagcgctggtcgccgcgctcgagcactggccggccgacggcgtgccggagaagccgggcgcctggctgatggcgaccgccaagcggcgtgcgctcgatcacatcaggcgcaacagcatgctgaccggcaagcacggcatgctggcgcatgatctggcgtgggagcaggagaccatgcccgatttcgattccgcgctcgacgacgacatcggcgatgaattgctgcggctgatcttcaccgcctgtcatccgctgctgtcgcgcgaggcacgcgccgcgctggcgttgcggatgatctgcggcctcaccaccgaggagattgcgcgcgccttcctgcaggtggaagcgaccgtcgcccagcgcatcgtgcgtgccaaacgcacgctgtcggagtcgggcctcgcctacgagacgccgcgcggcgaggcgctgtccgaacggctcgcctcggtgctcgaggtcgtctatctgatcttcaacgagggctacaccgccgcacgcggcgacgaatggctgcgaccgcagctctgtaacgaggcgctgcgcatcggccgcgtgctgacctcgatcgcgccatcggagccggaagcacacggcctgctggcgctgatggagttcaacgcctcgcggatggcggcgcgcaccgatgcggccggcgagccgatcctgctgatggaccagaaccgcgcgctgtgggatcgcctgcaaatccgccgcggccagctggcgctggcgcgcggccgcgagctcggcggcgccggcggcttctatgtgctgcaggccgcgatcgccgcctgccacgccgaggccgatgcgcccgccgcgaccgactggcgccgcatcgccgcgctctatggcgatctcgctgcgctgctcgattcgcccgtcatcgcgctcaaccgtgcggttgcgatcggcatggccgaagggccgcaggccgcgcttgcgatcgtcgacggtctcgccgacgagccggcgctgaaatcctatcacctgctgccgagcgtgcgcggcgatctgctgcaacggctgagccgcttcgcggaggcgcaatcagcgttcgaggccgccgccgcattggccggcaacgcacgcgagcgtgagttcctcaagcgccgcgccgcggccgccgcgcgcgcggcgcaggagcgcgagcagcactgacggtggtcgtcaggagagatcatcgcacgtcatggacaagcgccgccttgccgcgcagcccccagagcagcagggccgatgccgcgatgatcgcaaggccgatcgagacgaacccggcggtgaccagcgtctcctgccacggcggggcactacgcccgggcgcggtgaccggcgagagcgcgccggttccgagaatggcggcgagcgtcgtcaccgcccagttgccgtaggtgccgcagggcagcgcccaataggcgacagcgcgcgggcccgacgccagcctgacctcgctccagatcgccccgaccgcgagcaggaaggtgccattcatcaccccttcgagatgggccgcgagtcccatccggacgttggtgaaatgctgctcgacaagtccggtcaacagcccgatcaggaacaaggccatgccgtgaaacagcagccgtcgccgataatccattcccgccccctcaaatgatcgcccggtcaatggccgatcatagcagacgggacgaagccgtccgtcagtgacctggggtcgcagcggccgtggctgccccaaaaccgggacggaccacggcctgctgcagaagcccggcggttgttgccggcggcaacctatgacaccatcccgattccggtttgttcttgacttttggaagcccatgccgcgccgcaaatatgcctgggagcagctcacggacgaacagttgctcaagcaacgcctcagcagtctgagggttgcggtcgaaggcacctggctcgcggattgcgtcggcacgctctacgaagagctcgaggagcgcggcataaggctgcggccgcacacctggatctcgagcgaatggttcagcccggcggatgtgcccggcatcgcgattccgttctatctcgcccatccgcgcctgatgaagctcgagaagaagatgatgctcgacgtcgagggcgcctcgtggtccgagtgcatggccattctccgccacgaggcgggccacgccgtgcagcacggctaccagttgcaacgccgccgccgctggcagcagctgttcggtccatcgtcgcagcactacccgcgctactaccggcccaatccggccagccgcaattatgtccagcatctgcggctttggtacgcgcagagccatccggacgaggatttcgccgagaccttcgcggtgtggctgcggccgcgctcgaactggcggacgcgctatgccggctggccggcgctgaagaagctcgaatatgtcgacgagctgatgggcgagatcgccggcaagcggccgctgcttacgacgcgcgagcgcgtcgatccgttgcgcgagctcaagcagacgctcggcgagcactacaagaagaagcaggcgttctacgcattcacgccgccgaagacctatgaccgcgatctgtccaagctgttctccgccgatccgcggcatcagcggtatcagccggctgcagtgttcatcaggcggcatcgtgctcacatcaggcagctggtcgcgcgctggaccggcgagaatcagttgacgctcgatgccgtgctcgacgacatgatctcgcgctgccgcgagctcaatctgcgtgccgtcggccccgagcagaagctcgtgaccaacttcatcatcctgctgaccgccaagaccatgcacgcgctgttcggtccgtcgcgccgcaaatggatcgcgctatgaagcatttccgcatcctggtgctgatgcatcccgactgtgtgccgcccgatagcagcgatggatattccgcgcgggaaatcaacgagtggaagaccgaatacgatgtcgtcagcaccctgcgtacggccggccatgaggttcggccgctcggcgtgcaggaggagatcaagccggtgcgcgacgcgatcgaaggcttcaagccgcacatcgtgttcacgctgctggaggagtttcactacgacgtggtgtatgaccagcacatcgcgagctatctcgagctgatgaagatcccctataccgggtgcaacccgcgcggcctgatcctggcgcgcggcaaggatctgtccaagacgctggtgcatcatcgccgggtcccggtgccggccttcgccgtgtttccgatgcgccgcaaggtcaagcggccgccgcgtctcgaactgccgctgatcgtcaagagcctgagcagcgacggatcgctcggcatctcgcaggcgtcgatcgtcgataccgacgagaagctggtggagcgcgtcgccttcatccacgagcggatcggaaccgcggccatcgccgagcagttcatcgagggccgcgagctttatgtcggcgtgctcggcaacaaccggctgcgggtgctgccggtgtgggaattgaagttcggcagcatgggcggccccggcgcgcggcatatcgcgaccgaaaaagccaagcacgataccaactatcaggagcgcatcgggattgcggatggcccggccgacgacctcacgcccgaactatccgcgcatattcagcggctggcgaaacgcatctaccggacgctggggctcgacggctacgcgcgcatcgacttccgcctgtcgaccagcggcgtgccgtatttcatcgaagccaatcccaatcccgagatcgccaagagccaggagttcgcgatggcggccgggcatgtcgggctcgattacccgggtctgttgaaccggatcgtgacactcggaatcagccgcgccaaggccggcgtatcgctgggctgaaccggaggccctgaagcatgatccggaaaagtgcgaagcggttttccggaaagatcatgctcaagaaggggctaaagcgcgatgacgattcaacccaatctcatcgcgctttagaggctgcgctgcatcgtgtgacgtcgcgcgtctctggggatgaacatcgcaaacgtttccctaacgcgcgccgccggcgtcgcgtcgggggcggtcgcagaagcaggggcggccgcgacacgaaattcatccgggttaggccatcgccgtacaaagatgtcgccgacgggtgccgccatgagcaggccgtcgctgcggcaggtgtcgtagacgtacaaaacggcaagaaaaatcgatacgacaacaaggatcgttctgaaaaacggcattgtgtttgcgccttcttgattgaggcggacaatgcccggcgacggtgaaccgcgcgtttagctgcccggccgatcggccggtaaggttctcaactcatgaatgcggacgtaaacggctcgcttaccaacgccctcaaggttacggcaaccagctttgctcaccagcctgcaaggagtctctggcatcaagggatcaagaaaaagactgaggaggccaccatgttcgtcgccattcgagtcatgatcctgatcgccagcgcctatgcaggctcggccgtcgcagagatgcaattcgcgccgctgccgagccttgcggcaccgtccgcgccgtaagactggcgggccgcatttcctgatgtgatcgaagcgagcgctgcgccgatcattgacgatcatggagcctccgctgccgatccagttcaacctgatcgcatcacgcttcaggtcagccgctttcggttcaggaattcctgcatcgcgtcgtgactggccggcaggctgtcgtccagcaacaggaagtgcacgcagccttcgacggtttgcgacgtacgcgcgaattgttcggcaaggctcaggacgattgcgcgcttgtccggctccatgatgcaatagaacgccagcgtgagccgcagggcttccttgtcgtcggggcgtccaagcattcgagtctccgggagttcgcagcagtctgcatctagggaccttccggcggcgtcggtgcgtgacgagcgctggaggccgtcgctctggagagcatctcgatggtcgtcgataggctcttgaatgcggccatgaactccttgcgggagatccacagtctttcgagcaactcgtcgcgcgacctagggtcagcctggcgctcgattagttcctcgatggccgtcgtgacctcgagaatgccaccgatctggcgccggaccgagaggcaggccaacagggccgcagagatatctccctgcggccggctcgccgatgaagccgtctgcttcgacagatgggcgcgattgcggaactgctggagatcgatgatgcgtcccattcaaagcatagtcccgctcgtccgcgtacaaaagaagagttcggccaatgcgttgcgctgagtgtttcggagcggaaacatcaggccgcgatcggcaccaagaaatcggaacagcccgaggccggtcacgaaatcggaaacatcgcgcggagcgtaatacgtcgcgtgcgcaattcacctcgtaactttactagttctgcgcgccgtgatcgtgccgcacatcctacaacagcttcaggcggatcgcgatggttgcagcatgcaccttgttcgtcgcattcaatttgcgcgtggcgttgcgcaggtggaattcaactgttctggcgcttctgcctatgattgctgcagtttctccagcggtcttgccagcgctgacccatttcaagcactcgcgctccttgtcggtgagatcgccttcgacggtctcgcggcgatagtcgtctgccgcatttcgagcggccggcgggtcgttgggctcgtcgggccatcgcgcggcctgtcctgctgcggccgtccggaattcggtgatgtcggtgacgcagccgatcgcgcgacggtgatggctggaggaatccaggatcaggcaggcgaccgaacgcagccaacgtatttctccggatggccgcacgatcctgaattcgacgcggtagtattcgtttctcgcgagcaacgcggatacttcggcgtcgtctattctggtcgcgatctccagatcgtcaggatgaatatagggcttgaaagcctctatcgacgtgatcgggtgcgtcgcctgatccagccccaaaatctcgtaccagcgctcgttgcagaacagcatgtcggcgtcgatatcgtaatcccacaggccgcctcccatggccttgaacgagagtgacaggcgttcatattcgagttgatcgactgccttttccttggctggcttccgcatcgtgcttggcctcaaacgctccgttgactttgccagtgcacttccgcgcttttaaaaagcgtagcttgatcgcgtatcgaatctcccggatttggcggagttacagatcgatttgcaagtgccgagtggtcacgatcgcagatcggtgcgacattgatgaacaaaggtttggatcgcagtcggcgatgcgcaggattgcggcattggtcgtccttgccgcgggtcttctcgtatcgaacgcagacgcgacgacctgcatttgttcgaacaatctgtccggatgtggtttctccggaaggctggcgttgaacttcaacccatcgaacttcaacgggggtgtatcgccggtcccgggagatgcaggcacggcttggcgctgccacttgcctggatattccggccggtacgcccgctggaaagcggttgcggccatatcgacggaagcccgatgctcgtcaacggcagtgtcacggcgtgcattgccagggccaattatccgaatattagcgagggcggagattgacaggaacgcgatgcgtcgccgatggtgcggcggcacggccgtatcgcagcgagacaccgatgcaagttcaacgatgggctctgtcgatgcttgccgggcttgcggtcctggctctgtcgggtgctgctggcgcacagggtggtgcccccgatccgatgtggccgagccggcaatggcagaccgcgacaccggaagaacaggggatggactctgcggcgctggcgaggctcgtcaattatggcgcggtgcgcagcttcgatagcctcttgatcgcgcgtcacggccagatcgtgctcgacgcctattatgcgccgtacacgcccgagatcccgcacctcctcaattccgtcaccaaggcggtgaccggtacattggttgcgatgttgcttaaagagggcgtgctcgatagcctcgaccatcgcttggtggatttcttcggcgaccgcaccattgcaaatctcgatgaccgcaagcgggcgatcacggtccagaccatgctcgacatgacttccggcatggcgtggaccgaaggcgtcgagggcgggcggccggactcgctgatcgaatgggagcgtagccccgacgtgatccagttcatcctcgaccgtccaatggcgaaggcgccgggcgaggcgttttattacaacaccggcaatccgcagctcctggccgcgatcatcaacaagctcaccgggatgagcgcgcgggactatgcggtgacgaagctgtttcgcacgctcggaattgccgcgccctattggcacagcatcgggccggggctgacccagggcggcggcggactgctgctcgcgccgcgcgacgccgccaagatcgggttgctctatctgcatgacggcgaatgggagggacagcggctgctgcagtcgggctgggtcgatcgcatcaggcacgcgacgacagacatgcacgcttcattcgatccttccctgcattatgccaatttcttctgggtgatgccgaagcgccaggtcgtcatggcggtgggcgatcgctgccagctgatcatgatatttctcgcgctcgacatcgtcgcggtggtgaccgcgcgtgactactgctcgttcggcagaatggccgacgacatttccggcgcggtcaagtccgacaccgcgctgccggtgaattccgccggcggcaatcagcttgctgccgcgctgcgcgagatcgcgacggaaaagccatcggccgtcggcgccatgcccgagaccgctgccgccatctcgggcaagacctggcgcttcccggccaacggcctcaacctgcgggcgctgacactgcatctgaccgatccgtccgcgcgctacgagctggaaacggcgacgccggatccggcgcggccggtgatcaaactgacgggaccgatcgggctcgacgggacctaccgtctcggccagccgacgccgctcggcgtgatggcgctcaaggggacgtggctggacggtgagaggctcgcgatcgacctgcgcctggtcggcggcgacaccgatcgcaaatggctgctctcgtttggcagcggcaaggcgaggctcagcggcaaggatcgcttcggccacgacgtgcaggtcgatgcggagacgcccggtgcgcaatagcgtgattgaggcgccggcaaaggcgagaatccggaatcgggaaggcgctgaaggggcgaaacgaaatgcaatgctcggacaattcctgtcttgagaatgcgaacatacggctcacgaacaatgccacacgctcactgtcgtcccggcgaaggccgggaccgataaccaccgatggtcattgttgagcgatgccgggacgacgagtccgcttcacgacatccgccgcggactatgggtcccggccttcgccgggacgacgcccgcgaggagtcatggactcacttgatggatcacccgcgcagcatgcgcgggtgatgacaccgagaacatggggctgtttgacagtcgaaccggtagcagactctagtggtcggtcttcggcgtcttggccgacatgtcgagcccgagctgaagggcgcgctcctggcgttcttcggacaagaacctcagctcccgttccagcgaccgcgcaacctcgtcctgggtttgctgggagtggcggcgggagccgccatgcggtttggccggttgggcagtcacggggatcctttgtcatcacagtgtcacaggtgcaggcatgccacggccagagtcgcggcgacaatcaaaaagaattcagcggacgccatttggaacgtttgttgggcatctgactccaatttgagcaggaaattctccctggcctcgacctatgccttggttcgaatggagtcgcgtccggtcgggcttgcgctctcatcaattcggatgagagtgcccggttccctcgaaatcatttccgaaatcgcacgaagacgtcctgaaaccgacaaggtctaaccttagtagcgttgtgaacaacgggtgcctgatgagacgctgacaatgcggtcgtgagattcacgaccgaggtcgtgcaatcagtactcgtcagacgctggggatgatctcggaaatgaagaagccgaatgctgtgccatatgtctgggcggccgcgctgatcgcggtcgcgatctggggcgtgagcggcgcgccgcagatggcacatacatctgcccccacgcatctggcgcgggctcgctagagcttcggccgcagcgagcgctgcatatccatcgtgtaggtgtagcgcccttccgggtgcgtggtgatggtgacctcgaacagttcctcgcgcaggccgtagtagcggcggaccacggtgagcgccggcgatccggtcttgacgtcgagcgccttggcgatcggcgccggcatcccccgcacgaagatttccatctgcgcacgctcggtgacctggccgtacatcttcgcgatctgctcgtgcaccggggtgcggccgtggtcgctgcgggtcacgacatcggcgaatcggcgcagcacgtaaatctcggtccagccgagcggggcggcgaactggtcggagcggcgcaccgcctcgatcaggaaccagctcttgccgggctcgcatttcaactgcgcggccagcttccgatcggcgacgatgtcgctgctgccaaccacgtcgcggtaggtttcgttggaatagcgcagccattcgccgagcgacttgacgctgtgggtgaacagcaccggcggctcggaggcgatcaccaccgaaccgaggccggcgcggcgcacgatcaggccttgatcgatcaggatgcgcagcgcctcgcgcacggtctggcggctcgcctggtagctcgccatcagttcggtctcggtcggcagcagattgccgaccgcgtaggtgccgaggcggatatccttctgcagcccggtggcgatgtcgcgatagcgggacgatctcgccctgtccggttgttcagacatggcagatcactggtatgccaaatggcaggcgactggatgtcccgactgcatcgattgcagcgcggcctcgaatgccgcgagcgtcgccagcacgtcagcttggggcaccgggaacggctgcttgcgttcgaccgcgtcggcaaaggcggtaagttccgcggtcagcgtgttgactgccggatagcgtgtcgttgcaggcgcctcgccggatttccgtagcaccatcgtcccctcgtcgagcacttctgcggatcccttcatcccgaacacatgcacgcgccaatagaacggtgttgcgcggaccgtagcaagggttgcactcacgccattcacaaattcaatcgctaaagttgcagcgtcgagcggcggcggtccggcctcgcgttcattcaagcgggcataaacctgtcgggcaggaccaaggaggctgacgaagccgtcgagcacatgcaggcccgcgccggtcagcccgccgccaggcgactcctcgggcgacaaccgccagccctgcatgatggcctgcgagttctcgttgctgttgtgcccctcgacatgcaggatcgtgccgagctcgccactggccgtgatcgcgcggagcgcctgcatcgacggccagaaccttcggttatgcccgaccgcgagcaacacaccggcattgcggcaggcagcgaacatctcggccgcatcgtcgcgccgcagcgccagcggcttctcgcaaaacacctgcttgccggctccggcggccgcgatgacctggcgcttgtgcagcgaatgcggtgttgccagcagcacggcatcgatgccgggctcggcgaggacatcgtccaggctgggggtgagggagaggccatgcgtcgcgcaaaagcccgcggcgccgccgacatcgggttccaccgcgctggtgatcctcagtcgtggctcgccttgcgcagcctcgaccagcgcgcggccccagcggccgaggcccgcgatcgcacaattgatcatgaatgttccttgtcctgactgcgtccggcccggatcgcctcgatcactgcggcgctgtcgctgtccgggccccgaagcgcgatcgccgcgcgcagcaactcggcctgcactgacgtcagcggcaagcgcaggccgcatcgacctgcctcgcgcagaatcagctcggcgtccttcaaggtctgcgcgagatgcgattgcggcgagaagtcccgcgccagcatctttggtcccttgctgtccatcaccttggaatatgccgccgattgccgcgcggtcgcaaggaacgtcgccccgtcgaggccgagcgcttcggcaagggcgaggccttcggccaaagcggcgcggttgttctgcaggatcaggttgatggcgagcttggtgcggctcgcattaccgatcgcgccgacattgatccgccgcgggcagaggacgtcgagcgtcgctgctgcggcggcgatgatgtcggcgtcgccggcgaccagcgcggtggcggtgccggcgccgacctcagcgctggtgcccgagatcggcgcttcgatgaagggcaggcgtgagcgcgccgcgaattcggcgatgacagtgatttcgcccggcgcacacgtggtggtgcagatgacgagcggcggcggcctggtgttcgcaaggtccggcagcaggccctcgacctgggccgcgtcatacactgcgatgacgatgacgcggcagcgcgccgcgacgtcggcagcgaaggccgcgaactcggcaccgctggcccgcagtccatcctgcttcgcagcatcgacgtcgaagccgatcacgccgatgccggcatcgatcaggcgtgccgagagcgctgatcccatcaggcccaggccgatcatgccgacaggtgtctcgcgagccatgatgcgccgccgcttcgcgctattgcggctggatgccggccgccttgacctccgccgaccagcgcacgacctcgcttttgacgaaggcgccgaactcggcgggcgtcagcggtgccacgatcaccccgacatcggcgagcttcttcctggtctccggcatcgcgaggtacttcgcgcactccgcatggatcttgttgacgatgggggccggcgtgccggccggcgcgaacagcccgtaccagatcgtggcctcgaagcccggcatggcttccgacagcgcgggcaggccgggggtgagctcgttgcgggccgccgacgtcactgcgatgccgcgcagcgtgccgccctgcatctgcgggatcgcgaccgagaaatcgccgaaggtcaggtcgatcacccccgccatcacgtcggtcatcgcctgcggcactccgcggtaggatgccgcgatcagcgacaggccgccgcgggactgcagctgcgcgaccgagatctgcgatgcgccggagccgtagcccgcggtcagatttggattggccttggcgtagctgaggaactgcggcaggtccttggccgcaagcttcgggttgaccagcagcaccatcgccgtcgtggtggtgcggatgacaggcgcgaaatccttcaccgggtcgtagggcaggctcttcaacgtcgcgacgttgctggcatgggtggtgttggtgcccatcagcagcgtgtagccgtcgggcgcgctgcgggcgacttcctgggtgccgatgctgccgagcgcgccggcgcgattctcgatcagcacggtctggccgaacgcatcctgcagatgctggccaaccagccgcgcgacattgtcggggccggcgccggccgggaagggcacgatgatccggatcggccgttgcgggaaatcgtccgcggcgaccgccggcaggacccgaagcgcagcgagcaggacgacgagcagccccagccgtaacttcatcccggtcccttcccgtgcctgcttttcccaaatttatacggacaaataagtctgaaatgcaagcagatggcccgtcggaatattgagacgcggcaaatttatccgtataaatagcccattcagaggagccagatgacgatggtggacatcagcgatctccatgcgcgcgggctgcgccggcgccagaagatgttcggcgaggtcgatgtcgccaagcggatggcggccgccggcgattttggcacgccgctgcaaaacatcatcaatgcctacgtctatggcgacgtctgggagcgcagtgggctgtctgaccagatccgcagcctcgtgatgctcggcatcaccgcggcgagcagcaagcccgccgagttccgcgttcatgccaagggcgcgttggccaatggctgcaccgccgcgcaggtgcaggacgtgctgctgctggttgcgatgtattgcggcattccggctgcgatcgagaccagcaagatcgcggccgaggtgttcggcgaggcgcctccgaaggcgtagggttcgcgccggggccaaacaggcggacacgcgccggagcggtaaattcgacgcgaatgctcgctgccgcgtgatcgggcgcggcaggctggaaccttgcggatgcggatcgaattggactacgaatcctgaagagatcctcaaacgacacggcgcttcatgaccgcacatcaacgcaacctttccgcctcgatcgatccggtgaagctcgatcggctcgccgaagtcgcgatcaaggtcggcctgcagctgcaaccggggcaggatctgctgctgacggcgcccgccgcggcgatgccgctggtgcggcgggtcgtcgagcatgcctacaaggccggcgcgggtctcgtgaccccgttcttctcggacgaggagctcacgctggcgcgctaccgctacggcaacgatgcgagtttcgatcgcgccgccggctggctctacgagggcatggcgaaggcgttcggcgccaacaccgcgaggcttgcgatcgtcggcgacaatccgatgctgctgtcgggcgaggatccgaccaaggtggcccgcgccagcaaggccaattcgatcgcctaccagccggcgctgcagaagatcgtcaatttcgacaccaactggaacatcatcgcctatcccagcacgtcctgggcgaagcaggtattccctgatgatgccgaggacgttgcggtggcaaagctcgcggatgcgatcttctccgcctcccgggtcgatcaggacggcgccgtcgccaattgggaaaggcacaacgcgagactgcgcgagcgcaccgaatggctgaacggccagcgcttccacgcgttgaaatattccggccccggcatggacctgaccatcggcctcgccgacggtcatgaatgggaaggcggcgcctcgaccgcgaagaacggcatcgtctgcaatgccaacatcccgaccgaggaggtgttcaccacgccgcactgccgccgcgtcagcggccatgtcgtcagctccaagccgctgtcctatcagggcacgctgatcgataatatctcggtcaggttcgaagagggccgcatcgtcgaggccaaggcctcgcgcggcgaggaagtgctgaacaaggtgctcgacaccgacgagggcgcgcgccgtctcggcgaggtcgcgctggtgccgcattcatcgccgatctcgaagagcggcctgctgttcttcaacacgctgttcgacgagaacgccgcctcgcacatcgcgctcggccagtgctactcgaaatgcttcgtcaacggcgacagactgacaccgcaacagatcgccgagcagggcggcaacaagagcctcattcatattgactggatgatcggctccgcccataccgacatcgacggcatccatgccgacggccgcagcgtgccggtgttccgcaagggcgagtgggcgtaacagcccgctagcggaacctccgctcccgcgcggcgagcaggtcgccccgcgtggcgctgaagcggcatgtctcgtgctgcggtcggaagccgagccggcgatagatcttcagcgcgggggcattgcggctcgagacgttgagccagcagggatgctcgaccgagacgtcatgcgcgctgagtacgcggtagaccaggagttggccgagcccgcgtccctgccgcgccgggtcgacggcgaccgactcgatccacatcgagttccgctccggctcggtcaggcagtagcccgacatctgtccgtcttccgacgcgatccagacctcggtctcggtcaggacctgcgccatctcctccggcgagtacaggcggaaggcggcgtccgaggcataggcggcgttgtggatgcgcgcgacctcggccgcgcaggcggtcacgtcgctgacctgttcgatggtggcgcgggccgccgcgagggtgcgcgccggctgcaatggctcgacgcatttcatcccgatctcggactcgagatgaacaaacccgaaagcggagacgaaggccattccggccggccagtcactgctcaccaatgtttgcacgatcaggtcgggatcggtctcgattgcgatgatgtcgtcgaacagggccagaccaatccggcgccgccgcatctcgggcgccacgacgatcttgaggaaccgggactgatgcgcgccctgatcgcgcaacgaggattcggcgagaccgaccagtcggccatttcgctcggcaacacggaagtcgcgcccgccacggttctgcggcagtttcaggaactggtcccactgcggcagcgcaacagggcccagccgcggttccaccacagctgcctttgcgtagagttcgaccaccgcttccgcatcagcctctcgaagcggccggatggtgatgccgtcatccatgagtcgcaagtttacccgatgtcgagccgatagacatcctttgccgtattcaagaacaacgccgtcttctcgacttcgctatattgtgatgcaagccgtttaaaggtgttgaagatcacctgatagctgcactgtcccttgtcaggtgggaagttgctctcgaacatgcaacggttcggcccgaacgcctcgatgcaggtctccacataaggccgccaggcggcggcgagttcctcggacgagggcggccgggggcgaaggtggaagtcgtagcccagcaggcacatcgccagcccgccgagcttgaccacgacgttctggcaccgggcgatctcctggatcgaggccctccagaccggaaaggtctcctcgcgcttgccggcgaagcggccggtgccgaccggcccgccgcaatggtcgagcacgatccgggtgtcgggaaaggcgcgggcaaggtcggtgagctcgccgatctgcgggtggaacaaccaggcgtcgaagctgaggccgagcggcgccaggcacgcgaaccccctacgaaaggtggaatccagcagaatgcccttcggccggttcgcatacatgtgcgcgacattcggatcctcgtcccaggccgaggagtggcggatgccgcggaaccggccgttgccggcggcaatctccgcctccagcaccgccctggcctggtcgccgatcaggaggttaacatggctgacgatgccggcgcagatcgccgccctgccgtagccgccgctcgccgccatcgccgcgacgccgttggcgaactcgacctcgccgaccgggcggaatgcctccggcccgtcggcgcgatacatcgaccggcagtcgacatagacggtggcgacgatgttgtggcccgaggcgatgtcgtcgcgcatctcctcgatcagatagcgcaagcctccgcgatcccagagatggtggtgcgggtcgacgatcggcctgtcgggatcgatgatcgcctcggtgtactgggcgagccagtcttcgcgcggattggcatagagcccgctggcagaggcgggcagggtgctggccatggatttttcactcccgtttggttttgcttcttcttgaacagagaccttacacgccgtcgaggatgatgacagtcggcgtcatgggcagcgtgtcgcgcgagatccttaaagtccgctcgccgccgcggcggtcgatctcgaattgctggccgatcaggtgcatgaactcgtcgagcggggtggcgaagcggtgcatcggcagcaccaccgatgcccgcagccgcttggtgatcgcggagatgccgtcgagtgacatcgtgtaggtgccgtcgatcggcaccatcacgatgtcgagccggccgatcgccgcgaactggctgtcgtcgagcttgacgtggaggtggcccagatggccgatgcagaggccggcgacctcgaagatgaagatcgagttgccgtccttgatcatctcgccgccggggtcctcaccctaataacggcggatgtcggtcgtgacgttgcggatatagacgtcgccgatgcgctcggcgtaatgcgcggcctggccgttctcgccccagccatgcagcacgtgggcgatcctgggatcggggaacagcgtgtaatgcgtcgcatgggcgcggttcatggtcgcgacgtcgggcaagcgcccggtctggtaaacgccgttgtagtcggtcgcgatccggacgccgccgggcgtgtcgatataataggtcgaatggccggcataggtgatcgcgacctcgtcggctttagccgctgcgacgcgccgataattcaccgggacggcgcgcggcggagcattggccatcgccaggcattcgctgcgctgggcgtcctgcgcgaaggcatggacggtcaatgatcccagcaagacgagcgcggcaagcaatctcagcatgagctgttccgtcttcggcgatatcggccgatacgagactatcgcgcaattggcttgccgtcatgatgaggccggcgcatcgctccatggcgctgactgcaacacgatccaggcgattcttgctccgggacgcgctaccatgccgcgcagacatcggagatcagggagttctgcgtgaccgacgttgcccctacgccgcgcgcgtcatcgaccaagcggctcgagccattgcgccatgtcgacgcaggcgtgctcaacatcgcctattacgaggctggtccggccgacggccccgccgtgatgctgctgcacggctttccctacgatatccattcctttgtcgacgtcgcgccgatcctggtcgggcagggctgccgggtcatcgtgccgtatctgcgcggctacggaccgacactgttccgcgacaaggcaacgccgcgctcgggcgagcaggccgcggtcggcgccgacctgatggcgctgatggatgcgctcggcatcgagcgtgcggtattcgccggctatgactggggcggccgtgccgcatcgatcggcgccgcgctgtggccgcaacgctgtagcggactggtctgcaccaacggctacatgatccaggacatcgcgcacgcaatgcagccggcgccgccggagcgcgaagtgccgctctggtatcagtattatttccagctcgagcgcggccgggcggggcttgccgcgaaccggcgcggcatcgcaaggatcctgtggtcgcaatggtccccgacctggacgttcgacgaggcctgcttcgagcggacggcagtggcgttcgacaaccctgattatgtcgacgtcgtgatccatagctatcggcatcgctacggcgttgtcgaaggcgacccgcaatatgccgctgtgcagcggcggctcgacgccttgcctgtgatcacggtcccagccatctcgctcgacggcgccgatgatggcgtgacgtacgtgagcgacggcagccgcaccgcggcaaaatacacaagccgcctggcctatcgcgtgattccgggcgccggccacaatgtcccgcaagaggcgccggaggcatttgccgcggcggtaatcgaggtgatgagggcctaacctcggtctcacgcctgtcgcgggctgatcttccaggcgatggcgagcgtcaacagcgtcagaatgccgctggcgagcgcgaccaccgggatcgtcagggccagcgccgcggtcgcggcccagccgatcgaggagaaggcttcggcgaaggtcgcgatgcgggaggaggtctggcgccggcggaactggctgcgcttggcctgcgcgcggaaccagagctggaccgcggcggcggatgcggtcgcgatgatgatcgcgatcgccgtgaccacggcctgccctggcgaggcgaaggccagtgcggccaccagcggcgcgaacacgacggcgatggcgatcaggacgacctcgaccttggcgcgggtcacgcgtgacggcggcagcggcgcggtcgccaccagatcgggcgcgtcctcgcccgagatggtcagccacgcgagcccgccggcgagttggcccgcggccatcaccacgaccggcgtgatcagcacgatcgcggtcgacgtgccggagaagcttcgccacagcatcagcgccggcggcagcagatagagcatctgcatcaggctctgcgacagtagccacgggtcgcggcgcagcagcaggaactcctttcggcgcagcgcctgctgccgcgagccgggccggaacgtgcgggcacggccctgtgcgaccgcagccggattggcggcaacgcgggcgaccgtgtcggcaaaccgcggcgcgaacgccgccatcacggcgccgagcagcacgaggcttgctgcgagcagcagcagcatgatttcgcgatcgccgagcgctgcgcgcgccggccaccagagcgggctatcgggggcaggggcgatacgtgccgcggtatccgaggtcaggaaagcaaagcgcgacagcgtgccgtaggacagcacggcgacgacctgcagggcgatgacgaacccggcgccgatcacggcggagacgatctgcgccaccagccgcgtccggctcggcccgatcacgcgaaacagcaacgcggtgacggcgatcgccgcggcagccgccgatagcccgatcgcaaggacgacgccgaaaccggcgagccagcgcgcgccgccgagatagaccagcacgtcgatgaacggcgtcgacagcaagagcgccatgctgctcaccgtcagcgcgatcgcggcaatccggatcgagaagatgttggtgagcttggccggcgacgacatgatcagatcgagatcggcacgggcatagaatacccgcgtcaccgactcgatcgcctgcgaaagcatcagcgcccaggacaggaagatcgtcgcggtcagcacgatcagcgaggacggatcgagcggaaaccgcaagtcgacatagcgggcgaccacggcataggccggcagatgcaggatcgccgcgaagaccaacaggccgatcacggcgtgattgcgccgccgccggccgccggtcatcatcgccagccattcgcgccaggccaggcggaattcgtggcgggcgaaccaggtgagatgggcggtcgagctcacgcggccgccgcttcggtatcgaccagcgcgatgaacatgtcttcgagcgtggtgtcgttgcggccgttctgctcgcgcaactcggcaagcgtgccctcggcgatcagcctgccggccgcgatcacgccgatccggtcggccatgcgttcggcgacttcgagaatatgggtcgtcatgatcacggtgcagccggcccggacgcgctcctgcagcagccccttgacgtgacgcgccgacagcgcgtcgaggccggtcagcggttcatcgagaatgattaggcgggggtcgtgcaccagcgcgccggcgagcgccaccttctggcgcatgcccttggagaagccttcgcagcgctcgttcagatgcggctcgagcccgagcgagatcaggagattgcgtgccgacttctccgaggtgcggggatcgatgccccacaggccggcgacgaattcgaggtattccagcggcgtcagcttgtcgtagatcatcggctcgtcggacacccaggccatgatctgcttggcggcgaccggatcggccaacgcatcgatgcccaaaatcgacactgagccggcatcgggccgcaatagcccggccaccatgcgcagcgttgtggtcttgccggcgccgttcggcccgagcagcgcatagaactcgccgacacggatggtgagatcgagcgcgtcgaccgccgggcgatcaaaacgcttggttaaccctcgcacggccagtgcggacagttgcgacgtcattgtgtggcgatcccggatttcgctcgtcggttgcgcaacttggacaaaaaccgtttcggtgcagtgaatcgcacggggcaaatcgcaggcgatatccgtattactccgtgctgcggcatacctccgcaaatgtgatgatacagcgggatcaggggtttgttgacagggatcgggccatttggctcaatccgggcggacgtaggtggctttcagcgcttccgacacaagggcgtgaaggcgggatgcaacgagcgatcggataagaatcgccgggcatcggggagggaacgatgctggacttcgttcagcagctcgtcagcggcatcgcgctcggctgcgtttacggcctgatcgcgctcggcttcgtgctggtctacaaagcgaccgaagtcgtcaatttcgcgcaaggcgatttgatgatgctgggcggctttttcgccttcactttcatcggcatgctcgggctgaattactgggtcggcttcgccggcgcggtgatttgcatggcgctgttcggcatgctggccgagcggctcgtggtgcggccgatcctcggctatccgcaattctccatcatcatggcgacgatcgggctcggctatttcctgcgctcggtcgccggcatgatctggggcaccgacgacttcaagatcgagacgccgttcagccagggcgtgttgcggatcggcagcctggtgctcgcctacgacaaattgtcggtgatcgcggcgaccatcatcctgtgcgcgctgctctatctgttcttcaatcgcaccacgctcggcaccgcgatgcgcgccagctccgagaacatgctggctgcctattacatgggcatcccggtcaagcgcgtggtctcgatcgtctgggcgatctcggcggcggtggcaacctgcgccggcgtgctgctggcgccgatcaccttcatccattccaatgtcggcctggtgctgggactgaaggcgtttccggccgcggtgctcggcggcttcggctcgatcccgggcgcggtggtcggcggcgtcctgatcggcgtgatcgagagcatggccggcttctatttgccgcaaggatggaaggacgtcgcgccctatatcgtgctgctcgcggtgctgctgctcaagcccgaaggcctgttcggccttcacgtccgaaaaaaggtttgaggagcgacatatgcggtttctcttcaagaccgattacgaagacgacatcaggctgttgccgcattccggctacgtctattcctacggcctgctgctcgcggtgctgctgatcgcgccctacgtgctgtcgagctatctgatgagccagctggtcttcgtctgcatctatgcgaccgtcggcgtcgggctgatgatcctgaccggctttaccggacaggcctcgctcggccacgccgccttcctggcgatcggcgcctacaccgcggcctatctgcagcagttcaacgtgccgtttccggtctacttcctcgccgcggggctgttgaccggcgtcgtcggcgcactggtcggatttccggcgctgcggctgcagggcatctatctggtgatcgccacgatctcgtttgccttcatcgtcgaggaaatcctggcgcgctgggaaagcgtgaccaacggcaatgagggcatgcggatcaaggccatgcaactgctcggcaccacggtgtcgcgcgacggcccgaccttctattatatctgccttgcggtgctggtgctgaccatcgtcggcacgctcaatctgctgcgctccccgaccggacgggcctttgtcgcgatccgcgacagcgagaccgcagcgcgcagcatgggcatcaatgtcgcgctctacaaggtgaagtcgttcgcgatctcggctggtatcaccggcttggccggcgtgctgttcgcgcacaagctgtccttcatctcgcctgagatgttcaccttgcagctctcgatcgagttcatcatcgtgatcctgatcggcggcaccttcagcctgcacggcgcggtgctgggcgcgatcttcctggtcatgatcgatccgttcctgacctacctgaaggacgacatgcccagcgtgatcgctggcaccgcggccgcactgggcgcgggcacggagcgcgccggccgcatccaggatgcggtcgcagccttcgcctcggcaaacgggctgaagggcgcgatctacggcatcatcatcgtggtgttcgtgctgtttgaacccctcgggctctacggccgctggctcaagatcaaactcttcttccagctcttcccgctgtacaagcgcgccaccttcaagcggcagaagatctatgtgaaatcggagcggaaccgatgagctatttccgcgccgagaacctgtcgttgcatttcggcggcctcaaggcggtcgatgccgtcagcttcgcggtcgagaagggcgagatcctctcgatcatcgggccgaacggcgccggcaagagctcgatcttcaacctgatctcgcgcatctacccgccgacctcgggccggatcttcttcgaggatcaggacatcacccagcagccggcctacgatatcgcgaaactcggcatcgcgcgcaccttccagaacatcgaactgttcgagaacgcgaccgtgctgagcaatctcctggtcggccggcatcgccattcgaccacccggctctggcaggagctgctattcttgccgagcgtccgcgccggcgagaaggcgcatcgccgccgggtcgagcaggtgatcgaattcctcgacctcgagccttaccgcgacaagctgatttcgggcctgccttacggcgtgcgcaaggtgatcgagttggcgcgcgcgctgtgctcggagccgaagctgatcctgctcgacgagccgtcgtcaggcctcaatgtcgaggagaccgacgacatgtcgttctggatccgcgacatgaagagcgagctcggcatcaccgtgctgatggtcgagcacgacatgacactggtcaaccgggtctccgatcgcgtcattgcgctgaattacggccgcgtgctggcgatgggctcgccgtccgaggtgcagcaccatcccgacgtcgtcgcagcctatctcggcgcatgaggatgatgccatgagcacaccggacatcatcctgaagctttccaacgtcgaaagctattacgggccgatcatggcgatccgcggcatcagcctccaggtgccgcgcggccagattgtgacgctgctcggcgccaatggcgccggcaagaccacggtgctgaagacgatctccggcatcctcgacccgcagaagggctcgatcgaattcctcggcaagccgatccagcgcatggaggccgatcggatcgtgcggctcggcctcagccatgtgccggaggggcgcgaggtgtttccgttcctgtcggtgcgcgagaacctgatgatgggcgcctatctgcgccgggaccgcgacggtgtggcgcaggacctcgagcgcgtctacggctattttccacggctgaaggagcggctcggccagcccgccgggcagttgtcgggcggcgagcagcagatgctggcgatcgggcgggcgttgatgaaccggccgacgctgctgctgctcgacgagccgtcgctcgggctgtcgccgatcctggtgaaggagatcttcaccatcatccgccgcgtcaatcaggagcacggcatgtcgatcctgctggtcgagcagaacgccaagatcgcgctggagacggcgcattacggctatgtgctggagatcggccgcgtcgtcatgaacgatacctgtgagcggctgatgagttcacccgatatccaggagttctatctcggcgccaaggaagccggcgcgcggggcgagcggcgctggaaaaagaagaagacgtggcgttagggaggtttggtgctgactaaagttggtttggcactgagagcgagtcggagttagatttcaggcctgtttcgcgaacaagaccggcaacaaggccggcgcgtgagacgggcggcagaggagggagcgcgcatggcaggaccagcggtgctgacggtcgccgacacgatcgcgaggagctttctgctcgcggtgcaaacgcgcggcgacaggcccgcgatccgcgagaagaagttcggcatctggcagccgaccagctggcgcgaatggcttgagatatccagggacatcgcctgcgccctgcatgcgaccggcttccgccccggcgacgtcgcctcgatcatcgccaacgcggtgccggaatgggtctatgccgacatgggcatcctgtgcgccgggggcgtctcctccggcatttacccgaccgatgcggcggcgcaggtcgaataccttctcaatgattcctgcacccgggtgatcttcgtcgaagacgaggagcagctcgacaaggtgctgacctgccggtcgcgctgtccgacgctggacaggatcgtggtgttcgacatggagggcctctccggcttctccgatccgatggtgctgtcgctcgccgagttcacggcactcggccgcaatcatgcgcagggcaatgatgccctgtgggatgaaatgaccggcagccgcaccgcgtccgatctcgcgatcctggtctatacgtcgggcaccacgggcccgcccaagggcgcgatgcactccaaccgcagcgtgacgcaccagatgcgccacgccaacgatctctacccttcgaccgacagcgaggaacggctggtgttcctgccgctctgccatgtcgccgagcgggtcggcggctactacatctcgctcgcgctcggctcggtgatgaattttgccgaaagcccggagacggtgccggataatctgcgcgaggtgcagccgaccgcgttcctcgcggtgccgcggatctgggagaagttctattcgggcatcaccatcgcgctgaaggacgcgaccccgttccagaactggatgtacgcccgcgcgctcgcgatcggaaaccggatgaccgaatgccggctggagggcgagacgccgccgctgtcgctgcggctcgccaaccgtgccgcctattggctcgtgttccgcaacatccgccgcatgctcgggctcgaccgttgccggatcgcattgaccggcgcggcgccgatctcgccggatctgatccgctggtatctcgcgctcggcatcgacatgcgcgaggtctatggccagaccgagaattgcggcgtggcgaccatgatgccggcggaccgcatcaagctcggctcggtcggcaaggccgcgccctggggcgaggtgatgatctgcccgaggggcgagatcctgatcaagggcgactacctgttcatgggctatctcaaccagccggagaagaccgccgagacgatcgacgcgaagggctggctgcacaccggcgatgtcggcacgatcgacaatgaaggctttgtgaagatcaccgaccggatgaaggacatcatcatcacgtcaggcggcaagaacatcacgccgtccgagatcgagaaccagctcaaattctcgccctacgtctcggacgcggtcgtgatcggcgacaagcggccatacctgacctgcctgatcatgatcgatcaggagaatgtcgagaaatacgcccaggaccaggacatcccgtttaccaactacgcgagcctgtgccgtgcccgcgagatccaggacctgatccaccgcgaggtcgaggcggtcaacgcgaagttcgcgcgggtcgagaccatcaagaaattctacctgatcgaacgtcagctcaccccagaggacgaggagctgacgccgaccatgaagctgaagcgcagcttcgtgaacaagcgctacgcggccgagatcgacgccatgtatggcgaacgcgcagtcgcgtagcaggcgataagacgtttggcgaaggagcgagaaggcccgacccttcgctcaccatgggccgttgtgaaggaggagactgcaatgtcgaaatcgctgaaggcgctgggctttgcggtcagcgcgctggcgctgacctgtctgccggccgcagcccagaccaaggtcaccaatgaaggcatctcgccggccgagatcgtgatcggaacgcatcaggacctgtccggcccgatcaaggtctggggtgttccggtgtccaacggcatgaagatggcggttgaggagatcaacgccagcggcggcatcaacggccgcaagatcaggatgattctggaggacaatggctacgacccgaagaagggcgtgctggcctcgcagaagatggtcgagcgcgacaagatctttgcgatgatcggctcgatgggttcggcgccgacgctggccgcgcaggacatcctgttcgatgccggcgtgctgcagctgttcccgctgacagccgccgaattcaccttcaaattcgatccgagcaagccgcaggaacggctgaagttcaacaacctgctgccctatgtcgaaagcacgcgcgccgcgctcaaatacatgatggactggaagaacttcaagaagccctgcatcctgcatcaggacgacgagtacggtaagaacgtgctcgacggcttcaatcagcagctcgctgcgatgaaggtgcagccggcttcgaccacaagctacaagcgcggcgcctccgacttctcggcgcaggttgccaagatgaaggccgacggctgcgatctcgtcgtgctcggcaccgtgatccgcgagaccatcggcgcgatgaacgaggccaggaaactcggctgggacgtgaccttcctcggcgctacgccgaccaacgtgctcgaagtgcccgcgctcggcaaggaagccgtcgagggcctctatgcggcctcgggcttcgaaattccctacgaggacaccgccaagggcaaggtgaaggactggctcgtcaactacaagaagatgttcaacaccgacgccaacacccaggcgatcatcggctacaacgcggtgatgacgttcgcgttctacgcccagaaggcgggcaaggatctcaccggccagaagatgctggatgcgctggagtcaggcgacaagttcctcgacattttcagttcgccgccgaccaagttctccaagacggatcatctcgccaacaccatcacccaggtgcagcaggtcaagggcggccgctgggttctggtgaaggataacctgatgttctagtccagagcatgatccggaaaagctgacactggattcccgagaggatcatggcgttgtgggaagaggccgctcaagcgaagcggcctcttcgtcggatgggatcgagctagcaaccatccgaactgaggaggacaactccgccggcctcggcgaagccctgcatcagacccggggcgaaagccttgtaggcgggagtatccatgttcctcatgccgccactgacggcctcgaactgctcagcggtcaacgcgaggcgaggatctgactaggacgtggtattcgaacgcatgttgttctcctgagatcgtgggatgatggaggcaggcgaccggccgtcagcagccctgtccgcctacgacccagacggttgcgctgggagcggtgcttgcaaagcctctcaggaacgccctgcacggccgcgcttgcggcgaggcgcgtggccgcgcgtgcgctccatcacaaaactgcgctctccatcgccggcctgcaggtcgtgcaggggatggcgatgctgcggctcgagggcctcgcggaatacaggcttcaggcggcgctgatcgatcggctgctcaggttgccggcctccctgtttcgcgattacacggcaggcgatctggtggatcgatcgatgggcatcgacgccgtccgcaagacgttgaccgtccataatctccgcggcctcacggcgcttctgttctgcctcttcagcatcgccctgatgttgtattacgacgtcaagctggggagcatcgccgttctgctggtggcggtgcgtgcggccgcgatcatggccgccggcgggctgcgtatctattacgaagcccgctacctcgatctgcagggaaagatcggcggcttcgttctccagttgatcaccggcgttggcaagctgcgtgtggcccgggcgaccggacgcgcgctcgccctgtggtcggaacgcttctcggtccagaagcgctatttcaccgcgtcgcagaaggtctcgaatgcgctcagcgcgttcgagagttcctatccgacacttgcgacgctcgtcatcttcgcgattgccttccatgacaacagcgagatcctgcgcgatctcggcgctttcctcggcttcctggcggctttcggccagaccttggcatcggtcggcaactgggcgtcgagcatcagtgaagcgctggttgccgtcccgcagctggcgcggttgaagccattgatgtcaactgccgccgagatcggcgaagagcgcaggccacccggagcgctgtccggtgagatcgagctttccggcgtcggcttccgatatgcgcaaggtggtccgccggtgctcgacgatgtcacgttgaagattcagcgcggagaatatgtcgccatcgtcggcccgtcgggcagcggaaaatcgtcgctgctgcgattgctgctcggcttcgagcagccggagacgggctccgtcttctatgacggcaaggcgctcaacacgctggacatcagtgcggtgcgccgacaactcggcgtggtgcttcaggacaccaaattggcgacgggcagcctctacgagaacatctgcggcggcatcgatctgtcgcaggacaaggcctgggaggcagcgaggcaggccggtctcgacaccgacatccagcagatgccgatgggtatgcatacgctggtttccgaaggcttcaacacgctctccggcggccagcggcagcgggtcatgatcgcccgggcgcttgcgcgggcgcctcggatcctgctctttgacgaggcgaccagcgcgctcgacaatcggacacaggcgatcgtcgcagcttcgctggagcggcttcctatcacgcgcctcgtcatcgcacatcgattgagtaccgtacgccaggccgaccgcatcatcatgctgtcgggcggcaaggtggtccaggtgggaagttacgccgaacttgtcgcgcgccctggcccgttcgcggacttcgcggcgcgccagctgctctaaagcatgatccggaaaagtgcgaagcggttttccgaaaagatcatgctcaaacaaaggtctgaagcgcgatgatgattcaaccaaatctcatcgcgctttaggtccggctcagcattccgatgtcgccgccggcggcaggcgtcgcctcagttcaccgcgcttgaggccgccacgcggtctcggcgacgagccgcgcatcgccataccggttgacgccgttctggtcgatcacaaaggtcggccggaagctcctgatatcggtgtcctcgatcatcgccatgcggcggttgtcgagcatcagccagtggccgtcgagccgcgccgcgactacggcgtggtcctcgccgccgagcaggtcatgcatgaccacgatgcgcaaatcgtccggcgcgacgccggccttggcgagcgcgacgaacttcgcgatcgcatagtcttcgcaatcgccgctgccgcgggcgaatgtggcgagcggcgtggaccagacgtctggctcgccgtaggtcgcaagatcgctgcccgggcggatcgccagattgatcgcgcggttgatctcaccgaaccgggcgcggccatcgcgtgcccggccggcatcgacgatcgccaggaaccgcagcgcctcaggcgatgcgcagcccgcgcggtcgctttcgcaggctgcaagctgcgccaattcgtcggccagctggcgctgcaccccgcgccatttgtcatgcaggccgccgccggcaagcaggttggtcgccaggccgaacggttcggttgattgtctgagcagggtcgccgggccgggcgacaggagcgaggcggcattgagctcgacaattggcgcggccagaaccaggccgaagcctaacacgacggagcgcagcgcaaacgagcgaagcgagaatcccatgtgacaccccctgtccgctcatcggcgggtggagattacaccgcgcacgcgacggatcgtttgatgccgacagcatcgcaaacgacccttcgaatcgacttaagaggtgggaaatccgggcaggaggctgaagggcgcgtggcccgggtcccgaaaactttaccggtttgtgaaacgaacccgcgaacctttttccaccgcgaaacgcctcatccttgcctactggttaacccggccaatccgcgcatgggatagctgcgatttgtaagccaagtcacagctttagccggaaaaatcgggtcaaatgccctctcggggctgcggggaaataaaggcaagtacagaaatgccagtcaataccacgaatacgtggctcactacccatcttggctcaaatcccatctcatggtaccgtcaggcgagttcggaatacacgactcatgtgagagtgagccaagtcacatccgctcaaaccgcgcgaccggagcaccttgcgaaagcaaaggatggtttcgccaagctttatccgatgatatgcaggcgtaatcattcggatattttaccaatattaaccctcgtgcggtgatccgcagtgaactttgtcgagaaattcgacggccatttgccgagcgcggacgcttacgcccgcggatcggcatacgtcgaaagcgttacctcgaatgctccgcctggcgcgatcacggtcgacgacgggcaattgctgttcaccggcgacttcaagcgaaccgggctcgatctcgtcatctcgaaggacgatcgggaactcgtcctgcacgactatttcaagggcgagaagcgcgcggcgctggcctcgcctgaaggcgcgcacctcaccggcaacctcgtcaacgcactcaccggttacacccaatatgcccaggccggcggcgcggcggagccggccaaggtcatcggccatgtcaccaagctcacgggcggcgccaccgccatccgcaacggcgtcgctgttgtcctgaaccagggtgacaacgtcaacaagggcgatgtggtgcagtcgggcagcgactcgacgctcggcatcaccttcatcgacggcaccgtgttcggtctcggaccgaacgccaagatggtgctgaacgagatgatctacgacccgaacgggtcgagcaattcgtcgctgatgagcctcgtctcgggcaccatctcgttcgtcgccggcgccaccgccaagcatggcgacatgaaggtcgatacgccggtcgcgaccatgggcatccgcggcaccgcggtgctggtcgagatcgatttcgacgtgcagggctcgggcggcgtgccgccggccaaatttcaggtgctggtcgagcccgacggcagcaccggctcctacatcctgttcgacaagacgacgctcaatccgatcgcaaccgtcgatcaggccggcacccagaccatcgtcaacggccagggcagcgtcagcttcgtctcgtcggcgcagctgtcgaccgatgcgcagaagctgatctcggacgtcttcgcgctgaagtttaccgacaacaacaatcccaacaccaagcttacgacgaacttcaccgacagcatcgtcccggtcacgacaatcctcaagctcgcgaccggcgatgtgatcctgccgacaagcttgctgctggccctgaccggcaatgccgggccagaggccgcttccgcgaagcccgaccacgctcccggtgcgccgcatgtcgtgacccagaatgcttcgttcaccgaacaggccgggctgacccatagcgcgctgcccgacacggtgaccggccagatcacctggacggacgtcaatctcggcgacaggcccagtgcggcggtcagcttcagcacgttcagctaccacgacgccggcggcaaggacgtgacctcgcagctgacggcggcggaactggcggccatcaaggcggtcgagatcccgttgctgctgcagagcgatccgaacaacaccaatgtcggctcggcgacctggacctacagccttgccgacggcgccttcgacttcctggccgccggcgagaccttgacgctgacctatctggtgcgcgtcgataacaactatgcgccgagcaacgagaccgcgttcaagaccatcaccatcacgatcaccggtaccaacgacacgccggtggtgacatctgcgccgcaggtcgcttcgatcaccgagctgccatggacgacgaattccgccgcgccggataccgcgcacggcgcgatcacgttcaccgatgcggatctgaccgacacgcatacggtcaccatcaccggcgtcaccgaagccggcgtcaccacgggactcgccgaccacgccaccgtgctaagctggctgtcgctgggcgcgctgaccgattcgaccgatggcgtgatgggatcgcgcgcctggacgttctcggcaaccgacaagagtttcgattatctcgccgccggcgagacgctgactctggtctacacgatccagatcgatgaccagcatggcggcgtcgtcacggtccccgtcacgatcacgatcgtcggcaccgacgacaagccggtgatcacgtcgccgacgcaggcggcaaccatcaccgaggtgccggagacgaccggttcggtgagccacgataccgcgtccggcacggtgaccttcaccgacgtcgatctcagcgacacccacagcgtcaccgtcgccggtgtcaccgaagccggcgtcacgtcagggctccccgatcaggcgacggtgctgagctggatgtcgctcggcacgctgaaggattcgaccggcggcgtgaccggaacggacgtctggactttctcggccgccgacaagagtttcgactatctcgcggccggcgagaagctgacgctgacttacctgatccaggtcgacgaccatcatggcggcgtcgtcacccagcccgtcaccatcaccatcacgggcaccaacgacgttccgacattcaccaccgagccgcagaccgcgaccatcgccgagcagcccgatacgacgggttcatcgaagccggacgtggcccagggcgtggtgggatttgccgacgtcgatctcagcgacacccacaccgtgtccatcaccagagtgaccgagcaggggacgaccacgggcctgcctgagagcgagccaacgatcctgaactggctgtcgcttggggcgctgacggattcgaccggccatgtgaccggatcgcaggcctggacgttctcggccgcggacaagagtttcgactatctcgccgccggcgagacgttgacgctgacctacacgatccaggtcgacgaccatcatggtggtgtggtcagccagccggtgacgatcacgatcaccggcagcaacgacgtgccgacggtcacgtcggcggcgcagacggccagcatcgccgagcagcccaacaccacgggctcatccaagccggacagcgcatcgggcgtggtgaccttcaccgatgtggacctcagcgacacccacacgatgaccatcaccggcgtcgccgaagccggggcgaccgcaggcctgcccaaggatcaatccaccatcctgaactggctgtcgctggggacgctgacggattcgacgaacgggatgaccggatcgcaggcctggacgttctcggccgcggacaagaatttcgactatctcgccgccggcgagacgctgacgctgacctacacgatccagctcgacgatcatcatggcggcatcgtcaacacgcccgtgacgatcaccatccacggcgccaacgacgcgccgacgctcgccgacgtcaatgccggcacgctgaccgataccgccgcctacgacacgttcagcccactcaccggcacgctgcacggccacgacgtcgacgacggcgagacggcgacgctgacctatgccgccctcaattccgaccacgccgcggtcacgcagatcacaggtctctacggcttgctcaccgtcaaccccaacggcacctacagctacgttcccgatgctgccgcgatcaacgcgctgcccaaggggacctatgccgacaccttcaccgtcgagacggtcgacgtgcacggcgccgtcggaacggcgacgctgacggtcgacgtcatcggcgccaacgatgcgcctgtgatccacaccgacaacatcagcatcaccgagaatccaaacgggacggacacgatctccggcctcaccgtgacggatatcgacgccacggctaccgagaactttctgctggcggcgacgacggtcggttcgggcagcagcgtgacaccgcccgcgcaagcggggcacctcgccgacatcaacgcggcgctggtatcgtcggcactcacctatcaccccggcaccgcgccgaccgacaccgtcacgccctccgtgaccgacggcaacggcgcgagcgatacggtcaacctgatcttcaacgtccagcaaaatccgaccgcgccggtgaccctgaccagcaccgctggcaaggacgtgctgttcgggacggcgggttatcaggaccagttcgtgttcgcgccgaacttcaaccacgacacgattttgaacttcaagcccggcatcgaccatatcgatctcaccgcggtggtatcgacgggcgatgtcgatacctggatcagccagcacgtcgcggcatcgccgaccaacgcggcggataccctgatcacgatcgacagcgccgacaccatcacgctgcgcaacgtcagtcccgcggcgctcggccacaacgacttcctgcttcacgtcacgtgacggctgtgcggccgtgccgccatcggcggtgcgccggatctggctggttgtgcagcgcgcatgcctgctccattggaacaactcgccgtgcgtgatatccagatggcatgagacggctgaaggcgatacgaaggtggttcggacggcgcttcggctatgcgcggctggcctgcgtggcgctattggtcggctttgccgcgctgcgggccgccgatccggctccggtgcaggagattcgcgtcaggacgttcgacacatttcaggtgctcgaaccccggaagaagaccgcgcggcccgtcaccatcgtcgatatcgacgagaagagcctcgccgatccccggctcgggcaatggccgtggccgcggacgcggctcgccgacatcgtcatcaacctgacccggctcggcgccgtggtgatcgcgttcgactcggtgttctccgagcccgaccgcctcaatcccgatatcgcggccgatacgttcagcagcctcgatgaggagatgcgcgccaggctgcggcagctaccgagcaatgacagcatcctggccgacgccatcaagaactcgcgcgtggtgctcggcgaatccggcgcgcccaatgtgcgcgccgacctcaacgaaaagctgccggtcaccgggcttgcaatgctcggcgaggagccgcagcagttcatgttcgagtttcccggattgttgcgcaacgtgccggtgctcgaggaggccgccgccgggcggggcctgttcacgatcaggccggagcgcgacggcatcgtcaggcgggtgccgatgatgatggtcgcgcagggcgtcaccatgccgtcgctgacgttcgaaatgctgcgggtggccggcggctccggcaccatcctgatcaaggccgacaagggcggcatccagagcctcggcatcacgggctttgcgatcccgaccgacctctacggccagctctggatccattatgcccgccgcgacccctcgatctatgtttcggccgtcgatgtgctggatgggcgggtctcgccggacagaatcgccggcaagctgatcctgatcggcacctcctcggtcgggctgaacgacatcaagaccacgccggtgacgccggccatgcccggggtcgaggttcatgcccaggtgctggagagcgcgctgaccggcgacgtcgtttcacagccgagctacggcatcgccatcgagttctttgccgcgatgatcatggggctgctggtcatcgccttcgcgccgaaattcggtccggtgacgctggtcgtcgtcggcggcctgtttgcctcggtgctgatcggtacgtcctggtatttctattcgcagcaccggctcctgatcgatttcacctatccgctgatgtcgaccacggcgatctacctgacgctgatcttctccgccttcgtgcgcgagcagcagcagcgtcggcagatcaggtcgcagttcgtgcagtacatgtcgcccgcgctggtcgagcagctggcgcagtcgccggagcggctcgtgctcggcggcgaggagcgcgagatgacaatcatgttctcggacatgcgcggcttcacctcgatctcggagacctacaagagcgatccgcagggcctcacggcgctgatgaatcgtttcctcacaccgctctccaacgcgatcctcgcccgcaagggcaccatcgacaaatatatgggcgacgccatcatggcgttctggaacgcgccgctcgacgacaagcagcaccagctcaacgcctgcgacgctgcgctcgacatgctggagcgcgtcgacgacctcaaccgcgcgcgcgagcaggaggcgaaggagggtggccacgtctatgtgccgctcaacatcggcgtcggtctcaacaccggcacctgcgtggtcggcaacatgggctccgatgtgcgcttcgactattcggtgttcggcgacagcgtcaatctggcctcgcgtctcgaggggcaatccaaggagtacggcttcccgatcatcgtggggtcgaagaccgcgctcgcggtgaaggagaagttcgccatcctcgagctcgacttcatcatggtgaagggcaagaaggagcccgaggtgatctatgcgatcgccgggcgtgaggacgtcgccggctccggccgcttccagcggctgcgcaacctgaccatcgagatgctggcctgctaccgcagccgcgattgggatggcgcgctcgccgcgatcgagcgtggccgcaagaccgacgaggcgcaggccttgcaatatctctaccgcctctacgaggcacgcatccgcgccttccagaaggagccgccgccggatgattgggacggcgcatttgcgttgacgacgaaataggcgtcgcaaactcgctgtcgtcccggcctgcgccaagcatgatgagattagatcgagctggaacggcgttgaaagttcacctctcccttgggagaggtcgatttgcgcagcaaatcgggtgaggggttgcggtctatcgcgagagcgggagccctcacccggattgctgcgcaatccgacctctccccggcggggagaggtgaaccaagaccgcgccaaggcgattcaaccaaatctcatcgcgctttagggcctgcgccgggacgacgatggggagatctactccagcccgatctgcgtcaggtcctggaaccagtgctgcgcctgcacgaaggtcttcaccttcggcgacagcgcgtgcggattggtgtcgtgcaccacccagaccagcgcggcgtcgtcgacgatcagcgcgtgcgcctgcgccagcagtgcgtcttgtttggcgctgtcgaaggtctgcttggcctcgtcgatcaaggcgtcgaccttcggattcttgtagccgccccagttgacgcccgtcggcgccacttggccggaatggaagaaccgcacgatggcgtagagcgggtccgaggtgacataggcgatgttgttggcggtgatgccggcattcatctcgtcggctgcgcccttgcgccaatgcgagtacaacgtctcgagctcgaccaccttgaagtcgatatcgatgccgatctccttgaagctttgctgcaggaattcgttcatcggcagcgacagcatctgcccggtgccgccttgggcgatgatgaaggtcgtcttcagcggcttgtcctttgaatagccggcttcctccaccagcttctttgcggccgcgagatcgtatttcagctcgaaggtcggcttgccgaaccacgggctcgacgggtcgacctggcccttggccggcttggcgaggccgctcatcaggccgaccacggcgtcgcggtcgatcgcgaggttgagcgccttgcgcaggcggatgtcggtccagggcgagcccggaagcacgctcagatgatagttccagacatgcggcgtcacattgtcgacgatcctcatgccggcggccttgagctgcggtacggcgtcgggcgccggcgtctcgatcagatcaacctgcccggcgagcagcgcgttggtgcgggtcagcgcctccggcatcgggatcaggatcagcttgtcggcctttgccagccgcttcttgtcccaatagtccgggttcttggtcagctcagcgagctcgcgcggcaccagcttggtcagcttgaacgggccggtgccggagggctggcttgcgaacttgtcccagtccttgccgagcttgtcgtattgcgccgggctcgagaccaggaaccagagcatctggtagggaaagaaggaatcgactgtcttggtggtgatctcgacagtgaagtcgtcgatcttggcgtagctcgcaaccgagggcaggcgggttttcacctgcgcgctctgccgcttgtcgaattgcggtgccttatcgttcagcaccttgtcgagattccagatcacggcatcggcgttgaagtcactgccgtcatgaaacttgacgcccttgcgcagcgtgaagcgccacttggtcttgtcggcatcgtcgaccttccattcggtcgcaagcccgggcaccagtttgccgggccggtcggcaacatccatttcccaggccaccagcggatcgtagatcgtgtaggcggtgaactgataggcgccggcaccgcgatcgggctggccggtcgtcagcggaatgtcggccatcgaaatgccgtagcgcacaacggactccgcccgtgccgacatgccgggccagcccgcggtcagggcaagcgccattgccgccatcaggatcgaattgcgcgcacgcatgtgaaaggctccgttggtgggaagtcggagccaaaacttgcaagcatgatgccagaataggcagcattgccccgtcttagcctaaggtaggaagaaatgacgcgcccggcggttatttgctgaagaactattccccttggcacaggcattgcatacgcttgcccaagaaataatcaccaaaacgtcaccagacttcgaaggggttgctgagatgcgtaacaacaagaccaatgcgacggcattcatgctggcgctcgcgattgctgccggcgtgccggcgatcgccggcgccgagaccgtgctgcgtattggcatgacggctgccgatattccgcgcacgctcggtcagcccgaccagggttttgaaggcaaccgcttcactggcttgacgatatatgacgcgctgacgatgtgggacctgtcgtcgtcggacaaggccagcgcgatgatcccgggccttgccaccgagtggaaggtcgacgatgccgacaagaccaagtgggttttcaagctgcgtcccggcgtcagctttcatgatggctcgccgttcaatgccgacgcggtggtctggaacgtcgacaaggtgctgaagcaggatgcgccgcaatacgacgcgagccaggtcggcgtcaccgcttcgcgcatgccgaccttggtctcggcgcgcaagatcgacgacatgacggtggagctgaccaccaaggagccggacagcttcctgccgatcaacctcaccaatctgttcatggcgagcccggccaagtggcagcagttctacgacaaggccgaaggcgccgacgccaaggcgaagtcgcaggccgcatgggccgcattcgccaaggacgcgtcgggcaccggcccctggaagatgtcgagcttcaccccgcgcgagcggctcgagctggtgaagaacgagaactattgggacaaggcccgcgtgccgaagactgacaagatggtgctgttgccgatgccggaggccaatgcgcgcaccgcggcgctgctgtccgggcaggtcaactggatcgaggcgccggcgccggacgcattgcccgagatcaagcagcgtggcttcaacctctattccaacgaggagccgcatgtctggccctggcagttttcccgcgtcgagggctcgccgtggaatgacatccgcgtccgcaaggccgccaacctctgcatcgatcgcgaagggctgcgcgacggtctgctcgcaggcctgatggtgccggcgaccggcacgttcgagccgggccatccctggcgcggcaatccgaccttccagatcaagtacgacaagccggccgcccagaagctgatgcaggaggcgggcttcggtccgaacaagaagctgacggtcaagatccagacctcggcgtcgggttcgggccagatgctgccgctgccgatgaacgaatatctgcaacaggcgttggcggagtgctacttcgatgtgcagctcgacgtcatcgagtggaacacgctgttcaccaactggcggcgcggcaccaaggatccgtcggccaacggttcgaacgcgatcaacgtcacctatgcggcgatggatccgttcttcgcgctggtgcgcttcctgcagtccggcatggcgccgccggtctccaacaattggggcttcaacaacaatccgaagtttgacgagctagtgaagaaggcgcgccagaccttcgagccggcggcgcgcgacgcggcgctcgccgagctgcatgcggcctcggtcgatgatgcggcgttcctctacgtcgcccacgacgtcgcgccgcgggcgatgagcccgaaggtgaagggcttcgtgcagccgaagagctggttcgtcgacttctcgccggtcacggtcgcgccgtgatgccggcaacgtgatcggtgcaccctctccccttttgggagagggtggcctcgctgaaagcgaagccggtgagggttgtctccgcggacactccttattgtcgtgaactgactgtagccgcggacagaacccctcacccggcgcgcctcgcgcgccaccttctcccacaaagggagaaggaagagagaacgcaacgtgctcgcctatacgtccagacggatcgtctacgtcattccgatcgtgctcagcgtggcgctggtgtgcttcctcctggtgcacatcacgcccggcgacccgctggttgcggtgctgcccgccgatgcctcgcaggagctcgccgcgcaactgcgcagcgcctacggctttgatcgcccattgcccgtgcaattcggcctgtggctgtggcgcgcgatccatggcgatctcggcaattcgattgcgaccgggcggccggtcctgtcggaggtgatgcgcgcggtcggcaacaccgtgatgctggcgatcgcggccgcgatgatcggcttcacgctcggcctgctgttcggcctgatcgccggctatttccgcgacacctgggtcgacaaggtcgcgacctcgatcgccatcgccggcgtctcgctaccgcattactggctcggcatggtgctggtcatcatcttctcggtgcagctcaactggctgcccgcggtcggcgccgggcccggcggctccggagcctgggcgtgggactgggagcatctgcgctatctggtgctgcctgcgatcacgacttcagtgatcccgatgggcatcgtcacccgcacggtgcgtgcgctgaccggcgacatcctgagccaggatttcgtcgaagcgctccgcgccaagggcctgcgcgagaccggcgtgtttcgtcacgtcatcaagaacgcggcgccgaccgcgctcgcggtgatgggacttcagctcggctacatgctcggcggctcgatcctgatcgagaccgtgttctcctggccgggttctggcctgctcttgaactccgcgatcttccagcgcgatctgccgctgctgcagggcacgatcctggtgctggcgctgttcttcgtgctgctcaatctcctggtcgacatcgcgcaggccgcgatcgatccgcgcatcaagcggagctagagcatgatccggaaaagtggagaccggttttccgcggagatcatgctccaaccaagaggcttcgcatgagtgcgatgagcgataccgcattgcaggccgcacccgcgagcaaggcgcgcggctactgggcgacggtcgggcgacggatcaggcgcgacaaggtcagcatggcctgcgccgtcgtcctgctgctgatcttcgcctcggcgctgctggcgccgtggctgcatctcgccgatccctatcagggctcgatgatccggcgcctgcgccatatcggcacgccgggctatccgctcggcaccgacgaactcggtcgcgacatgctggcgcgcctgatctatggcggccgtctctcattggtgatcggcatcctgccggtgatcttcgcctttgcgatcgggacctcgctcggcctcgttgccggctatgtcggcggcaagctcaacaccgcgatcatgcggaccgtcgacgtgttctacgccttcccctcggtgctgctggcgatcgcgatctcgggcgcgctcggagccggcatcaccaattcgatcgtgtcgctgaccatcgtgttcgtgccgcagatcacccgcgtcgccgaaagcgtcaccaccggcgtccgcaacatggacttcgtcgaggcggcgcgggcctccggtgccggtcccttcacgatcatgcgtgtgcacatgctcggcaatgtgcttggcccgatcttcgtctacgccactggcttgatctcggtgtccatgatcctcgccgccggcctgtctttcctcgggctggggacaaagccgccggagccggaatggggcttgatgctgaacacgctgcgcaccgcgatctatgtcaatccctgggtcgcagcgctgcccggcgcgatgatcttcgcggtctcgatctgtttcaacctgctcagcgacggcatgcgcagcgccatggacatcaggaactagtgcgatgaccatactcgcaatctctccccgcaacgacggttcacctctccccttgtgggagaggtcagatcgcatcgttagatgcgatctgggtgaggggttataccctctcgtgagacctaaggccctcacccggcgctacgcgccgacctctgcccggtgggcaggggtaatccccgcgtgctcgacatgatcgatacaaccactccaatcgacatgctggagccggtcgccgacatcggcggcgccgcgcagccactgctgcacgtcaacgggctgacaaagcacttcccggtgcgcggcgggctgttcagtccgcgcaagaccgtgcgcgccgtcgacgacgtcacgttctcggtcatgaaaggcgagaccgtcggcatcgtgggcgagtccggctgcggcaaatcgaccacggcacggctgctgatgcatttgatgacgcgcgatgccggcgacatcatctatgacgggaggcaggtcgggccggcgctctcgctgcgcgatctgcggcgcggcgtgcagatggtgtttcaggacagctacgcgtcgctcaacccgcgcctcaccatcgaggagtcgattgcgttcggaccaaaggtccatggcatggccgacgacacggcgcggacgctggcgcgcgaactgctcggcaaggtcggattgcggccggagatcttcgccaatcgctatccgcacgaagtgtccggcggccagcgccagcgcgtcaacatcgcccgtgcgctcgcgctctcgccgcggctcgtgattctcgatgaggcggtctccgcgctcgacaagtcggtcgaggcgcaggtgctcaatctgctcgccgatctgaagcgcgaattcggcctgacctatctgttcatcagccacgatctcaacgtcgtccgctacatctctgaccgcgtgctggtgatgtatctcggcgaggtcgtcgagctcggcccggtcgatgcggtctgggacgcgccggcgcatccctatacccgcgcgctgctggcggcgatgccgtcatccgatcccgacaagcgcaccgaggtgccgccgatctccggcgatccgcccaacccgatcgatccgccgccgggttgccggtttcacacccgttgtccgtttgcggagccgctctgcgcaaacgacacgccaaaactcagcgatctcgatacaatgggccatcaagcggcgtgctacatggccattgctggctcggggcacagccgcgcgccggcaaaagcaaaaggagaaaacgcggcatgaccagacccacgccaaaagatgtcaaggtgatcgcgcacgttgccgacgtgcccgctgacgacgaggtcgccacccggatcgccaattcgatcgggccggcattcgacggcttcgcaccgatcgccggcacgttgccgttcgatctcgaacccgcgagcttcctgctggcgcagatcgcaaaggtgtcgaaatgagctctgatccggccctgatgacgctgaccgcggttgccaaggcgatcgctgagaagaaggtctcctcgcatgaggtgacgcgcgccgtgctgcatcgcattgccgagtggcagccgcgcctcaacgccttcatggcgatcgaatccgagcaggcgctcgccgctgccaccgaggccgacgcctccctcgccaggggcgacagccgtggcgcgctgcatggcgtgccgctggcgcacaaggacatgtattacgacgccggcaaggtcgtgacctgcggctcgctgatccgccgcgacttcgtgccgaagacgaccgcgactgcgttgcagcggctgaaggatgccggccaagtccggctcggctcgctgcagatggtcgagttcgcctatgggccgactggtcataacgtgcattacggcccggtgcgcaatccctggaacaccgagcacatcaccggcggttcgtcgtcgggttcgggctcggcggtcgccgcgcggctgaccttcgccgcgctcggctccgacaccggcggttcggtgcggatgcctgcgcatttctgcggtgttaccggcctgaagaccaccgtcggccgcgtcagccgcgccggcgcgatgccgctgtcgcagtcgctcgataccgtcggtcccctggcgcagaccgcggaggattgcgcgctgctgcttggcctgatggccggtgccgatcccgaagatctcaccgcgtcgacgcagccggtgccggactatttggctgcgaccaggcagtcgctgaagggtctcaagatcggcgtgccgacggccttctacgtcgatgacctcaatcccgaggtggcacgcgtcctcgacgagacggttgccaccctcaagaaggaaggtgccgagatcgtcacggtcgagctgccggatcagcgtcagctcagcggggcgtcgcaactggtgctcgcggccgaggccgccgccttccacaagcgctggatgatcgagcggccgcaggattacggcgcgcaggtgctgatgcggctgcagaacggcctgaccattcccgccgtcacctatctcgaggcgatgcgctggcgcgggcccgcgctcgccgcgcacaatgcggcggtcaccgggatcgatgctgtcatcgcgccgtcctcgccggtgccggcgccgacaatcgccgagagcgatgtcggtaacggtccgggtgcggaggcggtgatccagcggctgacgcggttcacccgcccggtcaactatctcggcctgccgtcgctctcgattccctccggcttcaccaggacgggtctgccggtcggcatgcagctgatcggccgctccttcgaggaggcgacgctgctccggatcggcgctgctttccagcgcgcgaccgatttccacgccagggtacccaagctcgcatgaccaatctcgtcgagatcaacaacctcaacatccgtttcaccggcgatcgcacggtccatgccgtgaatgatctcagcctgtcgctcggcgagggcgaggtgttggggctgctaggcgagtccgggtcgggcaagagcgtgaccttgcgcgcgctgatgcggctgctgccgcgaaagcgcacgcagatctccggcagcgtcaaggtgctgggccgggaggtgctggcgatggacgacgaggcgctgtccgcattccgcggccagaccgtctcgatgatcttccaggagccggcgctggcgctcgatccggtctacaccatcgggcgccagatcgccgagacggtgatgcggcacgagggcaagagcgagcgcgaggccacggcccgtgcgcttgagatgctcgaagtggtgcggatcccctcggcgaagcggcggctggagtcctatccgcacgagatgtcgggcggcatgcgtcagcgtgcgatgatcgcgctggcgctggcctgcaagccgaagatcctgcttgcggacgagccgaccaccgcgctcgatgccacggtgcagatacagatcctgttgctgctgcgcgagttgcagcgcgagttcgggatgtcggttatcttcgtcacccacgacatcggcgttgcgatcgagatctgtgaccgggtcgcggtgatgtatgccgggcagatcgtggagcagggcgccttgcgcgagatcgtgcgcacgccggtgcatccctatgccaacgggttgctggcctcgaccattcacggcgcgatgcgcggccagcggctcgagaccatcccgggcacgccgccctcgctcgaccacgcaccggcgagctgctcgtttgcgccgcggtgcaagttcgccgaaccgcgctgcagtgaaagcctgccgccgaacgtgcaagtcgcgcccggccaccaggcacgctgcgtcctggcagagcctgtacccgccacggtctagctcgcgcgcgccaccgcatcggcgatccagcgccgcaccgccgcaatgcggcgatcgcgggcctgctcggtgcgggagaccagatagatcgtctcgctgtgcgtgggctcgaacgcgaatggcgctaccagcttcttgccgaagcccggccgcgccttgatcaggggcgccaacgccagtgccacgccgagcccatgctcggcggcttccagcaccgccggcacgctgtcgagccaaagatgcccgcgcggggcgaggtgaggcaaaccggcctccttcagccaggccggccacgcccgcggttgcgtcgtgacgtggatcagcacctcgcgcgacaggtccgccgggctgcgcagcccggccttgaccagcgccggcgtgcagaccggcaatcccctgacctggaccagcggctcgaccctcagcccggcggcatgttcccggccgtagcggatcgcgacgtcgacgcgggagccgttgaagtcggcatattgatgggtggcctcgatccgcagcgtcagttgcggatggcgccgcttgaactccggcagcgccggcagcagcaccgcgccggtgaagaacggcagtgagctgatccacagttccccgccgctctcgccgcgctgccgcagcatgtcgcggctcgcctcgtccagcattgccagcgccgccgacacctttgcgaggtagcgttcgccgtccgcggtcagccgcaccgagcgcgcgccgcggacgaacagcctggtgccgaactgttgttccagcccgcggatctggtggctgatcgccgacgggctcagcgacaggtcgcgggcggcgcggcggaagctgagctgcgtcgcggcgcgctcgaaggcgagcagcgccgcaagcggcgggatgacccgcggatccggggcatccaatggatgaatcctgttcacctcgagtgatgaatggccttttgtcatggccgctattcttggatcagatcggccgaacgctcaatcccgctcacctcaggaccattcgccttggccatcttcgaacctgcagccacgccgcatcactggaggcccgccgcgctggcggccgggccgtttgctggccttcagggcggcgcggtcgcaagcctcctgactgccgaggtcgaggccatcgccaatgcgcgcaactggggcgtcgcgatctcggcgtcggcctggttcctgcggccgacaccgatggcggagttgcgcacgcatgtcaccgtggtgaccgaaggcggccgggtcagcgtcgtcgacaacacactctggccggcgggggagccgcagccttgcgcgaccgtgcgggtgacgctgtcgcgcgaacgtgcggccgaggtccccggttttcaggccggcgcggccgactagatcgatccgatgcgctttccgctgcgccgcccgcacgccgtccacggccgcagctggttcatggacgcgatggaagcccgcgccggcggcgacgtcgcctggttccgcatgcatcacgacgtgattgcggatgccggcccgctcgcacgcgtgctcggtccggccgactggacccatggcatcgcgcgcccggtgcagaacgtggtggccgatcccaatccgaacctcacagtgcagctgttcaggccgccgcggggcgcgtggatcggtgttcgtgccgaggcccgctggcgcccggaggccgggctcggcgtcggcagcggggtgctgctcgatgtcgatggcgagatcggccgggtctcgatgtcggtcgttctcgtgccctttccgagaagcgcgtccgccgcaagcccgggttccgcggccggttaaccctgtttattccgtcaactgtctgtgggatcacaaaaatagcccgcgaaccgtgctttggtcggcgcgacttgaaatggacggtggtcgcaaacgcctgtacaacgtggtgatcacgtaactctttcgttttgcagagatcttttttatggcagccgcgcccgctgtccggcgttccgaactggctgaggcgctgcgcgcatgccgcagtgccttcatcggcgtcggcctcatcagctgcatgatcaacctgctgtatctgacaggttcgatgttcatgctgcaggtctacgaccgggtgctgccgagtcgcagcgtgccgaccctggtcggcctcgtcgtcatcgcggccgtgctctacatcgcccagggcgtgctcgatctgttgcgcgggcggatcctcggccgcgtcggcacctcgctcgacgaagcgctcaatgcgcgggtgttcgacaccatcgtgcggttgccgctgatagccggcaatcgcagcgagggtctgcagccgctgcgcgacctcgacaatgtgcgctccttcctcggcagcatgggtccaggtgcgttcttcgatctgccctggctgccgttctacatgctgatctgcttcgcgttccactggctgctcggcgtcacggcgctggtcggcgccatcatcctggtgacgctgacgctgatcaccgaatacatgtcgcgcacgccggccagggaggcgatgtcgctcgcgtcgcggcgcaacgatctcgccgtctccagccgccgcaacgccgaagtgctggtggcgatgggcatggccgggcggatgaacaagcgctggaacgaggccaacgaggagtatctgtccggcaaccagcgtgccagcgacgtcaccggcgggctcggtgcggtcgcgaaggtgctgcgcatgatgctgcagtcggccgtgctcgcggtcggtgcctatctcgtgatccaccaggaggccaccggcggcatcatcattgccggctcgatcctgagcgcgcgggcgctggcgccggtcgatctcgcgatcgcgcattggaagagcttcgtcgccgcgcggcagagctggcagcgcctcaaccgcctgctgcagcagattccggcgcggccggagcagaccctgctgcaggcgccgaagaagaaactcgcggtcgaggcggtgaccatggtcgcgccgggcgaccagcgccccatcgtgcaggacgtcagcttcgccgtcgaagccggcagcggcgtcggcgtgatcggcccgagcgggtccggcaagtcgtcgctgatccgggcgctggtcggcgtctgggtgccggcacgcggcaaggtgcggctcgacggcgccgcgctcgatcaatggtcgtcggacgagctcggccgccatgtcggctatctgccgcaggacgtcgaactgttcgccggcagcgtcgcgcagaacatctgccggttcgatcccgacgccaagtccgacggcatcatcgcggcggccaaggaggccggcgtgcatgagatgatcatcaagatgcgcgagggctacgatacccaggtcggcgagcagggcaccgcgctctccgccggccaggcgcagcgcgtcgcgctggcgcgcgcgctctacggcaatccgttcctgatcgtgctggacgagccgaactccaacctcgacagcgaaggcgacgaggcgctgacccgcgcggtgcgcggcgcccgcgagcgcggcgccatcgtcatcgtggtcgcgcaccggccgatcggcatcgagggggtcgaccagctgctggtgctgaaggacggccgcatgcagaccttcggcccgaaggaaaccgtgctggcgcaggtgcttcagcgcgccgcgccgccggtgccgacgccgatcaagatcgtcgccgatgccggggcggccaagtcatgagcgaccgcacgagcgcccgcatgaccgatcaaccgcgcaatgcacatgcttcgatcaggaagcacctcgtggtcggcctcgccgtggtgctggtgctgggcggtggtgtcggcggctgggcggcgacggtgccgatctcgggcgcgctgatcgcgccgggctcggtggtggtcgataccaacgtcaagaaggtgcagcatccgaccggcggcgtcgtcggcgaaatcctggcgcgcgacggcgacacggtcaaggcgggcgacgtcgtcgtgcgcctcgacgagactgtcgtcaaggcgagccttgcgatcgtggtcaagacgctgaacggcctctacgcgcgcgcggcccggctccaggccgaacagcaaggcctcgacaagatcgcgtttccgccgcagctcaccgagcaggccagggatcccgacgttcgcgatatcatggcgagcgagaccaagctgttcgaggtgcgggtcaacggccgcaccggccagaaggcgcagttgcgcgagcgggtcacccagctcaacgaggagatctccggcctgcaggcgcaggaggctgccaaggacaaggagatcgcgctggtgcagcaggagctggtcggcgtccgccagctctacgagcagcatctggtgcagctcacccgcctgaccacgctggagcgcgacgcggcgcggctctccggcgagcgcgcgcagtacatcgcctcgcgcgcccaggccaagggcaagatcaccgagaccgagctgcagatcatccaggtcgacaaggacatgctgtcggaggtctcgaaggacctgcgcgagaccaacgacaagatcggcgagttcgtcgagcgcaaggtgaccgccgaggatcagctccgtcgtatcgagatccgcgcgccgcaggatggcgtggtgctgcagtcgaccgtccacaccgtcggcggcgtcatcaccgcgggcgatgccatcatgatgatcgtgccgagggccgacgacctgtcggtcgaggccaaggtcaatccgcaggacatcgacaagcttcaggtcggacagaagaccgtgctacggctctccgccttcaaccagcgcaccacgccggagttgaatggcgtcgtcacccgcgtctccgccgacgtcaacaccgatcagcgcaccgggcagagctactacacgatccgcgtctcgatgccgccggaggaagtcgcgcgcctcggcagcgaggtcaagatcatccccggcatgccggtggaagccttcgtccagaccggcgaccgcaccatgctgtcgtatctgatgaagccgttgcacgaccagttcatgcgctcgttccgcgagaagtagggttttcgcgaatatccccacccgtcgtcccggctttcgccctagggcatgcacacatctagttgggtggggattcccgaatcggtatttcgtgtgattcatattgcggcacttcggctttggcggaggtgtcgacatgctggcgcaaattgactggtcattaggtcggttcggggatctccgcctcgataaaggggggcggcgctcgtcgaatgcatggtcgcgggcaaggatgtctgcctgcgacggctggcaggaggcatgcgtgcccgggaggtgcgcttcaaccgctttctcggcaatgccaaggtgacgacgacgcggataatcgaaagctggagcgatggtacggtaatggcggccgaaggccgccatgtgctggcgatccaggataccagcgagatcaattttgccaccaaggcacaaaaccggcgtggcttgggcgagatcggtcatggcaacacccgcggggtgttgctgcacccgatgctggccgcagacgcggaaagcggctgctgccttggcctgttgcacggcgagatctggacccgccagggccgccgcaccgtctcgcacgacaatcgcgatctgaaggacaaagaatcgcaacgctggatcgcgaccgctctggcagccaagccgctgttggcgaaggctgcgatggtgaccatgctgggcgaccgcgagagcgacatcttcgcgctctacgcctgcgccgcagaacaccagttccacgtcattgcccggagcatgcatgatcgcaagctggcggatggctgtggcctgtatgcggccagcgaggccatgaccagcatcgaacaacggaccatcgtattgcctgcgcg

SEQ ID NO: 40 - DNA, 81736 bp, Bradyrhizobium enterica
ccgcttcggcgcagcgggcggcgcggcggcagcgcgtgcggccggcggcggggccgcagcagccggcttcgccggttctgatgtcatgatgctgaccggcggcgtgttcgccgagctcggaaactccgcattggtcggccggccggtgggcatcgacggcggcagcgcggcgaccaatccggctgccgatggcgtggcgccggctggcgcgttccaggacgcggcgtagcgcgtgaccaggttctcataggtccgatcgttcatgttggcgacgatctggtggttgtcgccgagcgagcggaatgcggggcacgccgtcggcgtgcagtggtcgcgcgccatcagcgcataggccaccaggccgtaccggtcgtgctcgatggcgcggcgcagtgcctgcaattcggtggtcgtattgcgctccgcggtggcgaggtcgccgagcgcagtcaggcgcgatatctgcgccgccgcatagctgaccgccgccgcggccgtatcggacgaaccgaacagcactttctcgcaggcattgagaacggcatctccggcgaggtcgtcgacgcaggccagcgccggcacggtctggccggtgaattgcgcggttcgtgtctcgctcggcgccgctgcctgcccgcccggtccgaagccgcggatcgttgcggcgaccgcgaccgcgatcgacagcagcgtgatgacggtcagcgcgccgttggcgacggatttttccgcgcgcagcagcgtgatcagcacaacgatcccaaagaagcccgcggcagccagcgtcagccacatcgggaaagtcggtgagcgccagatctgatccagcgaggaagcccagttcatgcgcgatgtccctcaacgcagcgtaagcacaatcggcggcggcgaacgccgccaccccgacgtccaaccttcagcacaatgggtctgcgaacagggccttttgacggcggcgacggggaacccgctccagccaccggcttgcgcacaactcgttcaggacagcgcgagctggctctccttggccacccgttcgaaagcttcggtcgagctcttgatgcgatactggcagtcgtcaccttcggtcggcagcaggcggatcacctgataggtgccgctcgcagcggggcgcgccacattgctggccgtgaaatagacggtctcgccaatcgagtacttatgcttcaacgccctctccattttcttagagattgctggccgggctgacagtcccgatagctctggccggcattttgagaaccctgcggcaagctagcacatcgccctgccccaaatccagcaagattggggcacggtgaaggtacgctttttgcaggtttttcagggcgataggcagcaatttacatgccagccggaaattgcccgccggcctcggccggaacccggtttcagtggctcaggcggtatgcggcaacttgccgtcggggctcgcgctgtccaccgcccccggaagctgctgggccagcaccttggacagctggtcgaccggaatgttgaacctggcggcgagctgcttgaccgtgtcgctgcccagcacctgctgcagctggtcggccgtgatcggcaggttctggccggtgccgatccaggatttgacctggtcgccgagcccggcctgttcgagcttggcgacgatcgccgacaagccgccctgcccgccattgcccatcacctcgccgagcacgacgggaatcacggccgccccgagctggccaagcatgcccttcagctccggcgaattctccagggaatcgagaatgcccatggtctaagtcctttcacgacttgcaaaaccggtgtttcggattcgacgccttcggccccgcggcgtcaagccgcgatctttgtggctgctgtcacaattcggcagcgagggaccagtcaggcgtcctcgaatcggtcgatccgcagcgtctcggcaaggccatcgcgggtccattcctggaacgccggcagcgccatcatggcatcgacataatgctgcgcctcagccttcactgggatcgcgtaggtgcggaagcgatgcaccacgggggcgtacatcgcatccgccgccgagaatgccccgaacaggaacgggccttgcctgccgtagcgcgcgtggcaatcggcccagatctcctcgatccgcgccacgttggcccgcgcatcgttcgacagcgcgacggccttgatcggccggtgcaggttcatgccgcattcgctgcgcagcggcacgaagccggaatgcatctcggccgagattgcgcgggcatgcgcgcgcgcggcgcgatccgccggccacagcttcgcctcgggaaacttctcggccagatattcgatgatcgccagcgaatcccacactgtgacgtcaccgtcgatcagcgtcggcaccttgccggccttgctgaagccgaggatgcggtccttgtcggcctgatcggtgtaaagcggaacgaagatttcctcgaacgggatgttattggcgcgcagcgccagccagggccgcatcgaccatgacgaatagttcttgttgccgatgacgagcttgagcatgtccggggaatcctgttgccggcgcagtttgccatagtgcattgcacgcgttcaacctgtacatgacgcgggatgcaacggggcgcagatcggcggccgcgcattcacgaaggaaggcaccatgaccggctattgggtcgacatcctagcggtcggcttcttcgcgctggaatggctggtctatgccatcacgctcgagcacaccgcctacgggcgcgacagcctgtcggcgcggatgcatgtctatcgcgagatctgggtgcggaacctgctccaccgcgacgcgcggatggtcgacatgcagatcatggcatccttgcagaacggcaccgcgttctttgcctcgaccagcctgatcgcgatcggcggcgcgctggcgctgctgcgcgcgaccaacgacgcgctcgcggtgctcggtgcactgccggtcaacctgacgccctcgcccgctctctgggaggtcaaatgcatcgggttgatcctgatcttcatctacaccttcttcaaattcgcctgggcctatcgcctgttcaactatgtcgcgatcctgttcggcgcgatgccgccggccggccagcgcgatacgcccgaggcggaggcccatgtgatccgcaccacgcggctgttcgagaccgcgggccggcacttcaaccgcggtcagcgcgcgttcttctttgcgctcggctatctcggctggttcgtcagcccctgggtgctgttcgccacgaccgccgcggtcgtgatcgtgatctggcgccggcagttcgcctcgaatgcctggcaggcgatgggaagctgaagcctgcttcgacttacgacgaaaaatcgcgcggcgtgaagtcgaggtcgagcaccttccattcgccgtagcgctcccgcggcagcatcgcgtagggctggcaggtttgcagcgcatcggtcgcgctcttgagcagcagcggccccttttccgatgcggtggcctcgatcagcaagggcgacgcggcgagcttgccgtcgggcttcatgaacacccgaagcttgatcctgacatcatcgccggtgctcagcgtcgccggaagcttcatgcaggtcttcagatggcgacggaattcggcgaccacgctggacccgacgtcggcctgctcggtggccgcggcgtcgaaactgtccttgccgggaccgggagcggacggcgcccccgcaggcggcttcaccgagatgtcaggcggcaggccaagcatgacgttgtatttgaccgacaggtccggctcgggctgcgcataggcaggcggtgatgccgccgcctgttgctggggcatcggcggcgtctggggtgcaggcggcgcggatggctgctcggccgcggcaggtggcggcgccgggctgggcttgggcgccggtggcgtcagctgcttctgcgccgcggactgctgcttctgcggcgcttgcgccgatggttcgggcttggccgcatccaccggcttgtcgaacgagggcaattgcagttcgggcgtcggcgacgggctcggtaccggatcgggctcgggcttgatctccgccttggcgacctcctgcggcgtcacgatctcgaccggcaccgtgtcagcggcgacgggatcgaactgatggacctccgaatagaggaaaatcagcgcgagcagcatcaggtgcacgaacaccgacgccaccatatccgcgtttggccgaaacttcatcccgctcgatcacatcagtgtcgtctccccgccggctacaataccggctggaacccgcctgcctcaatcccccatttcgcggccgagtccgcggtcagccagcgggcaatagcacgatccggaccgcggcccagccattttccgcgaagcaatgcgcaggctagaatccggtcggcgctcgggccgtcaccgcgcggccgcgctccccatcgtcgaaatctcgcgcatgtcctcatccgaaagttcgaaatcgaagatgtcgatattttcctggagccgctcgagctttgaggtgcgcgggatcgccgagacattctgttgcaccagccagcgcaggcagatttgggccgcggtcttgcgatagcggtcgccgatccgcgccagcgcgcggtcgcccttgacgcgccctttcgcgatcgggctgtaggcgacgaacgccatgccatggcgtgcacaggccgcgatcacgtcggcctgcccgagatagggatggtactcgacctgatcacaggcgagcggttcggggcacgccgcgaccgcctcctcgatctgcgccgtgctgaagttcgagagcccgatgtgccgcgccagccccgcctgcctgacccgcgccagcgcaccgagcgtctcggcaagcggcacgtgcggattgggccagtgcaacagcaacaggtcgacctcggtcaagcgcagccgcgccaggctctccttggcggagcgctcgagatccttcgccaggaagtgcgtggtccagaccttggtggtcacgaagacatcattgcgcttgatgccggaggcacgcagcccctcgccgacctcacgctcgttgtcatagatctgcgcggtgtcgatgtgccggtaaccgaggcgcagcgcctgctcgacgatgcgagcgcaggtccgcccgcgcagctcccatgtgccgagcccgatcgcggggatttttgcgccgttgccttcgacgacattcatgcgcccattatgcgcgcatgacgaggagctgccaactgaccgatgagttccgcgtcagacggtcgcggcggcctacggctcctgccggtagccgtccgtcaatgtcctcaggaaggcgatgatgtcggcttcatcctgcgcagtcatcgcaggcttgtcgcccagatggcgctcgaacggcggatcgctgacgtcaacattgccgcgatatttttccggcagatcgttgtatttcagcaccgtgccgtcggctgcgcgcggatacaccttctccggtttggtatcgcggaaactatagaaatcgagcacctgcccgagactggtgaagacaccgttatggaagaacacccggcgtgttgcgcaaggtcggcgtcagaaacatcccgcaatattgcgtctgctcggcaaagcgtggcgcgcagctcgcctggcgcagcttctgcgcgaccaactcgatggtcgccgcgtggcggcagtcgaggatgcagtctagtccttcatccccgtgatcgaagcactcaccgcgcgcggatcgcgctgcggccagcggccgctttcgacctgcgccaggaattccccgacgatccggttgtattcgtcgggctcctcgatgttgatggcatggccgcaattcggcatcaccgcaagcgcggccgacgggatgctctgcttcatcaggatgcccggcagcaggcacggccagtcctcgtcaccggtgataatcaaggtcggcacattgatgcgcttcatctcctcgaccagcgtgtagagcgagggccgctccttctgcacgccctgctgcgtattggccgatcccaccgccgagtgcccggccagcatcgccttgaactcggcgtgtccgcgcggatccttgttctcgtactgcacgcgcgtcggcccgtaggcgtagcgctcggcgaaggccggcataccctccttgcggatcacgcccgcgatcacatcggcctcagcgcgaaacgtttcgcgcttgtcgagctcggcgccgtagccgcagcccccgatgcacaacgacagcgcgcgcgacggatggcggatgccaaaatgcagggtcgcgaagccgcccatcgacaggccgacgatatgcgccttgggcgcaccgatgtgatcgagcaccgcgaggatatcgtcggcggcgcgcgcctgcgaataggacgagacctgctcgggtacatccgacggcggaaagccgcgcgcattgtaggcgatggtgcggaagcgcttgccgaaatgccgcagctgcggctcgtagctgcgcagatcaccggcgaattcatggaccaggatcaccggatgaccggatccggtctcctcgaaatagagccgtacgccatcgtcggtcgtcgcatagggcatggtggtctcctgccttcttggttcgcgggttatgggatggtcgcggctcccggtggtttcgaacgcggcaggtaggtgccatgctccttgccgccgacaagggtgccgtcctcgacgaccaccttgccgcgcaccatggtcagcaccggccagccggtcacttcgaggccttcatagggtgtgtagtccgcgccgtcatggatcagctcatggcggatcgtcaccttgcgcttgggatcccacagcgcgatgtcggcatccgagccgaccgcgatcgtccccttgcgcggatacaggccgtagatcttggcgtggttggtggcgctgaaggcgacgaagctgttgagatcgatgcggcccttcaccacgccttcggagaacaggatcggcagccgcgtcgcgacgccggggattccgttcggcacccagcggaaactggtgcggcccttcggtgcgagcttgccttgcggatcgtcgtagcggaacgggcaatggtccgacgagaacaccgagaacaccttctgctgcaggccttcccagcacgcctgctggctggcgatatcgcgcggcggcggcgagcagacatatttggcgccttccatgttgagctggtcgaggtccttctcggtcagcatcaggtattgtggacaggtctcgcccatcacccggagcccgcgctgctgcgcgcgccggatctcgtccatcgcctcacggttcgaaacatgcacgatcatgatcggcacatcgacgagctcggacagcgagatggcacggtgggtggcttcgcgctcgaccgggatcggtcgcgacgtggcgtggaagcgcggcgcggtgttgccggcgcgctccagccggtcagtcaggaagcggatcgcgtcgaagttttcggcatggaccatcagcatcgcgccggtctcgcgcgccaccgccatggtctcgagcagctcgcgatccgacagtgcgagcccctcataggtcatgaagaccttgagcgaggtgtagccgtcctcgaccagcgccggcagctcctgacccagcacgtgctcggtcggatccgtgacgatgagatggaaggcgacgtcgacatggcattcgccgtccgccagcgaatgataatgcttcagcgcctcgcgcagtgtctggcccttctcctgcaggcagaacggcagcaccgtggtgttgccgccgaacgccgccgagcgggtgccggaggcaaagccatcggccatcacgatgccgtcgccggacggctgggcgaaatggacgtggctgtcgatgccgccgggcagcaccagccggtcggtcgcgtcgatgatggcagtcgcatcgccgagatcatgcccgagcgcggcgatcttgccgtcgcggatgccgacgtcgcaggcaaaggtgtcggcggcggtgacgaccgtgccgccgcggatgatgatgtcgaaggacatcagcttgtcccctctttcggtgagcgatgttcgatgatggcggcaagcggcgcggccagcccgcgcgtcggcttcgggtcgggccggcggaaggtgccggcgaccgccttgcgcggtttgagcatggcgagcgtctccgcctgacgcacggcggccgcgacgggatcaacgacgggcaccggaatacggtcgcgcactttcgccgcgagcccggcaagcggcgcgccggacaggatgacgacatcggcgccgtcctgttcgaccgcctggttggcgagcgcgaccagcagctcttccttctcggcctgcacttccgagatcgagcggaagctgccgtcgagcgcgcggatgccggcacagcgtccggcgagcccgtgcatggcgacgcattcctcgtaccagggcgccagtgcgccggcgaaggtcacgatcgcaaaccgccggccgagcatgcaggcggtcagcattgcggcctcggccaatccgacgaccggaaacgcgaacaactcgcgcgcgccgaacaggccgggatcgccgaacgcggcgatcacggcggcatcgaagccgggaccggcctcggccagcatttccagcgcgatcgcgccgccgatctgcgcctcggcgcgggtcgcgatatagggcacgccgcgcgcggcggtcatcggcaccagctcagtgccgtccgacgccaccccgctgccggcggcatgcagcagatcggtcacatccgccgtcgtgttgggattgagcagcaggatcttcatggcgcaactttcttcgtcttgcggctgcgcggcgtggcggaaaggtgcgcgactgcggcgtcatctgctctgccatccagcgtctcggcgacgatctcgccggtgcggcgcacatggtgggccaggatctgcccggcgcgggccgcatcgcgcgccttgagtgcggccaggatttcctggtgctcgcgcaccgattcatcccagcgcccgagcaccgagagcgcgaagaaccgcgcgcgctcggcccgcgccagcagcgcctcgtgggtcgccttcagcaccgcgttgcgggcgaagccgacgatcgccgaatggatctgctggttgatttgaaaatagtcgcgcagctcgccgcggccgtgatgccactcgatcttgtcctgcagcgcttcgagccgttcgaaatcggtctcctccatccgcagcgccgcgagctcggcggcgcagcgctcgatgccgctgacggcctcgaacaattcggtcagctcggcgcggcggaacggcgtgatcacggcgctgtggttgagccggagctcgaccaggccctcgttcgccaactgcttcagcgcttcgcgcaacggggtgcgcgaaatgccgagcgcgtcggacaaatcagcctcgcccagcgattgtcccggcgccagctcgccgcgcacgatcatggcacgcagccgcgccgccgcctgctcgtgcagtccgacccgcggcacgcgcagccgccgccgttgcagcgtcgtcatcgcacgcttcggttccttgctgcgtctggtcggcttggtcttggctttagtcttggctctagtcttggcttcagtcaccgctcgccttcgtcgtcgtcattatgttcggggatagcagtcactgcgcgcagatcgggattggtgaacaggctgccccagccgtgcacgcgtgacggatcgcagccggtcgccgtgaggcacgcccacagcgtcaccgcgatcgaatccagcaccggcacgccgaacccgcgctccagccgttcggcggcgccggcgccgcgcatgttggtgcagagcaccactgccgcgtcgcagccgtcgcgcaccacctcttcgatcagcgccgccacctcggcttcgctgacctcggcaaaggagaaattgtcctgcagcgacaaatggcgctcggcaaagcaattgagcccttccgagttccagttggcgatgatcttgtcctgcacatcccggcgatacggcgtcaccagccctatgcgtccggcaccgatccgccgcagcaggtcgcgataggccagcaccgtggtgcaggccttgatccctgttgccgcggtgatctgctcgcacaggctttcgtcgcgatcgaagccgagccagcttgccgaggtgccgttccaggcgatcacgtcgaccttggcatgcgccagcaattctgctgcgcgcaaaatctcgctggcgtcgaactggcgcagcgcctgctccgacagcgcgatctccgtcaccttgaagcgcgagaaatgcgccgagacgccgtcgatcccggccagcatcgcgcaggtgatcggctcgagtgcggtattcgacgacggcgtcagcatgccgagccggacgggacgtgtcattcgcgaggcctcatcaaccggccgaacccctcacgggctcggccgcgcttcgattctagaccgggagcttgcggctgtaatcgatcagggtcgagcagatcaacagcgcaatgcccgcggcggcgaaatacatcagggccaggaagtacgaaccagtggcctgcacgatgaagccgacgatcagcggcgtcgtgatgccggcgatgttgccgccgagattcatgcagccgccgaggaagccggacttgccgcggcccgcgagcgccgaggggatcgcccagtacatgccgcaccagcgcaggaagaacagcgtcgtcgacagcagcaccaccaccgcaaccgcattggtgacgtaggcgacgaggaagatcgacaccgtcgccatgatcgccgcgatgccgaacagggtgcggaacacggtgttgggcgccccgccccgttcccgccaggtatcgccgatccagccgccgaccagttcgccgacgaaacccgcgaagaagatgatgaacgaggcaccgccgagcgccttgatgtcgaagccgtgcaccttgaacagataggtcggcatccaggtcaacagcccgtagaaggtggtgttgaagaacatccagccgaggcacatgcaccacaccgagcggaagcggaaataggccatccagctcgcgccggacggcggcggcgtcgcggcgtcctcgatcgcatgggcttcctcgagatagcgcgcctcggcttcattgaccgagggatgctcgcgcggcacgttgcggatgtagtaccaggcccacagcccgcacagcatggtgccgatgccggcgacgacgaaggcgacacgccaggagctgaacgccgccatcagccaggcgatcacgatcgagccgagcgcagcgccaagcggagcgccgccgtcgagcaaggtcgcgccgcggccgcgttcggtctgcgtcatccagatcgcgttgagcttgccgcccgccggatagatcggcgcttccgacgcgccgagcccgagccgggtcatgagcagcagcatccagctggtggacagcgccgccagcgcctggaagaagccccagaacaatgtcgcaagggcgatcacgatgcgcggcttgaagcggtcggcgagcatgccgcccggcacctgcatcagcgcgtaggtccagaagaacgagctcaggatcagcccctgcatcgccgggtcgatgtcgaactccttggcgatgaccggcatcgcgaccgacagcgaggcgcgatcgatatagttgatcgagatcaggaacagcatcagcaggaagatcttccagcgcacgccactcggcttcgccgtatctgccattgcgatggtggacacctgatcgctcattgctcgctcctctgccggcagatttgttttttgcccctggcgtgcccctcgtcatcgaaggtcatcggcctctcctgccccgcgggaagtctgcttcaaggaggtcgaggcgacaagcacattttgtattctgcatgcaatctttatcaatatactgattatattaaattttttacagaaaatacatcacaattggtcagcgtctgatgacggattgggcgtcagatcagccaatcggccggcgatttcggggaattggctccgagcgcaccatcaagacccgggcacggcgtggccgccacggcggtcgcggccgctccccgatcatcaaggcgttcatcgatacggttcggcggatgaaggagagcggccgcagcaagtgagagcgcgccatcgcaggctatgggtgctcgtcaaagcgggccaatgcggcctcgatgagttcgatctcctcgcggagcgtgtcattcacgaccgtcggcctgaaacccgggacactgtgagcttgaacaccttccaacagtcgttggcgatgctccctgagttcttccagcgcttgacgattcctgagcgacacatagccggcaatgatctgctcgatggcattcataggaaatccacgggttaaaaaaatatcttgctgcaatgcttcgattagaacggtcaaaccgcgttgctggcaagccccatgatgctgcgccggaagcgttcacgccgcagcggatcagaacatgcgcgagcgatgacgccgtgtgtttgacatcttgaagcgagaaccatctcatcgtcgtcctggcgaaagccaggacccattaccccaaatttcagttgttgcgcgtcgctggggaccgctgtcccgttccgaccaaacgcggtggttatgggctcctggctttcgccaggacgacggcggtggatgcggcgcgtaagcgcgatctgtcggctgccggtggcggcgaagaacgtctacccgctcaagcggccgtcggcgcgctcgacagcgcggcgaacacggtttccggcgagtgcgcgatcacggcgagcagcgcgcgggcgggtccccgcggggcgcgcttgccctgctcccaattgcggatggtctccactggcacgccgagcttggcggcgaattcgagctgggtgagccgggcgcggcggcgcagatcgcgcaccgccggttgcgcggctgcgggcagcatcgccgcctcggccggatgtgcggtcgcaagcgggatttcctgcccgtcgcgcaattcgacgatccgtccgtccgccttgagccgcaaccgctgcatgatggcccccgtgatggcccccttggagataggagcatcatccgccaaccccgttaaggcgcgattaacgataagcacgcccccaggcgccggcttatttcaacccgaaccacagcgtcgcgatgccgaggaacgagaagaagccgaccacgtcggtgaccgtcgtgacgaaggtgccggaggcaaccgcagggtcggcgcgtacccgttccagcaccatcgggatcaggatgccgccgagcgcgccggcgaccaggttgcagatgatggcaaggccgatcacgaggccaagccccggaatcttgaaccaggccactgcggcgatgccggtgatgacggcaaaggcgatgccattgacgagcccgaccatggtctcgcgcagcaccacgcgcatcgcgttgtaggagccgagctcgcgggtggcgagcgcgcgcaccgcgaccgtcatggtctgggtcgcggcgttgccgccctggctagccacgatcggcgccagcaccgcgagcgccaccatcttctcaagctggccctcgaacaggccgagcaccgacgaagccaggaatgcggtggcgagattgaccaggagccagttgaagcggccgcgggcgatggtccagaccgtgtcggacagctcttcgggatgggtgacgccgccgagcgccttgaggtcctgatcggcctcctcctcgatcacgtcgacgacgtcgtcgatcgtgatcacgccgaccagccggtcgacggtgtcgaccaccggagcggcaaccagattgtacttgccgaacatccgcgcgacctcttcctggtcctccaacgcggacacccggcgacggtcctcatcgatcacgtccgcgatcggaaccggacgacgcgtacgcagcagcacgtcgagcggcaccgcgcccagcaggtgtttgtcggcgtcgaccacatagatctcgtagaatcgatcaggcagatccggtgtgtcgcgcatgtagtcgatcgcctgcccgaccgtccgatccggcggcaccgcgatgaattccgtctgcatccgccggccggcggaattctccggatacagcaggctgcgctcgatgtcctcgcgctcggccgccggcagcttctccaggatctcttcctgatccgcttcgtcgaggctttccagcagctcgacggcgtcgtcggattcgagctcgcggacaccttcggccacggtctccggctcgagttcctcgaggatctcctcgcggaccgtctcgtcgacctcgttgagcgccgagaagtcgaaatccgtgcccgtgatctcgaccagggtgacgcggtcgtccggctcgagtgcagcgatcaggtcgccgagatcggcctcatgcagttccgccaccacctcgcacagcagcggccggtcggcggcatggatcgcccgggtgatctcctcgacgaattccgggcggagctggccctcctcgtcccgcatcggcatccgggcgagcgggtcggccgcggcgggttcggcaatgtcgatattctcggccatgccgtgtttcgccggtttgacaggaggagaaaaactgcttgattgatgcggaccggattacctaatcggcgggggccagtgcaatgagaaatatgtcgagcgcaccacgaccgctcctgaacgttgtcgcgacattggtcgcactcgcgccttgtgcgctgttcggcccggcgcacgccgccgaatgcctgcgcaaggatgcgctcggcacctcgcgtgtgctcgaggtcgatcctgcgacctatccgcgcgtggggctgaaaagctttccgcagaccctgccgctcagggatggcgaggtcgtgctgaccttcgacgacggaccgacgccgggagtcacagacaaggtgctgacggcactggccgccgaatgcgtgcaggccaccttcttcatggtcggccgcaacgcggccgatcaccccgacatggtgcgcaagatcgcccgcctcggccacaccatcggctaccacacctgggaccatccgcatctcaacaagattccgctggatcaggccgaggcgaacatcaaccgagggatcgaagcggtcggaaaggccctgcacgggacctcgagcacgatcccgagcaccccgttcttccggttcccgtatttcgaatcgacaccggacctgctgtcccagatggaaaagcgcggtatcgcggtgttcggcgccgatttctgggccagcgattggaacaagatgacgcccgaggaggaactcaagctgctcaccgggcggctcgaaggccatcgcaagggaattatcctgctgcatgacccgcaaatgcggacggccgtgatgctgccggcctttctaaggtacctgcaggagcataattatcacatcgtccacatcgtgccggcagcgatgaagaccgtgtctgaccggacacattgaacccggcacccaagctggattacagaccgttaaggccgcattcatggggccgcccttaaggattcgtcagtgcgtttggaatgcggccgagattcgatgattgcaaacgtcctggtgatgatccggaagcggtcgcggaccgtgatcggcgcggcactgctgggctgctgcttcatgacgccgcagcccgcccttgccgcggactgcgcgggtaatcccaacgcactcggcacctcgcggactctcgtcgtcgatcccatggagcatccgcggatcggcaccatgcaatatccggagacgctgccgctcgccgaccacgaggtggtgctgacctttgacgatgggccgctgccgaaatacagcaaccaggtgctggccatcctcgccagccagtgcgtcaaggcgaccttcttcaccatcggctcccaggcccggttcaatccggacggcgtgcgcaagctgatcgcggccgggcataccgtcggcacgcacagccagaaccatccgttgacgatgaacaagatgccgctcgagaaggtgcggcaggaagtcgacgacggcatcgcctcgacgctcgccgcgctcaacggcgacaagagcaagctcgcgccgttcttccggattcccggcctgatgcgcgccgaggttccggaagcctatctggcgtcgcagggcatccaggtctggagcgccgacttcccggccgacgactggcgccacgtctcgccgcagcgggtctacgacctcgcgatccagcgcatcgaggccaagcgcaagggcatcctgctgctgcacgacatccagccgcgcaccgtcgcggcgctgccgcgcatcctcgccactctgaaggaacgcggctaccgcatcgttcacgtcgtccccgcgacggccgaccgtccggcgacaccgaccgagccgcagcaatggttcatgcacccgccgaccgagacggtggcgacgacgcgctggccgagaattccgaacttcgtcttcaccgcgacgcggacgctgccggcaccggtgtttgccgatctggactggcgcgacgccgacatcctcgaccatgcgcagcgcgcccgcatcggcgtggcggtccgcaccctgtggccgcagccgcagctcgcgcaactcgcggcggcctcgacattgcccgtcccagcggccggcgtgtttcgcgttcccgaggcgctggacctgaccctgcttgcgacccgctcgacggccagtcgccgcctcgctgctccagccgctggcgcaccgcgcgcgcaggcaatctccgcacgccaggtcaagcatccgaagcaggcagcgcatcaggtccccgcggcggccgatggcagaggccgtggtgcgccgctgcaggtcgcgccgccgacggcgagcaatgcgtcagtccacgtcgccaagcgtgtcccgcgcgccgaagcctcggcagccagcaagcgcgtgcctgattgaagcggcctagctggccacgatcttggcgacgcagagcaggatcaccagcgccaggaagaagatgtcgatataggatttgatctcgccggcgtgcctgagctcggtgacatcggcgacgatctgcttgcgcgaggccgcagcattcggtccctcgccggccgcagccgcgagccgccgcgtctcgccttcgaggcgctcgatgcgctggaagaaatagaatgagcgcaggccggaaagggcatgcatcaccgcatagaccagaaccaggatcgcgacggtcgcgcgctgctcgtatttctccagcaggttcagcgtgaaatagaccagccccaggaacacgaagttggagacggcacggtagacgtagctggcaaagatcatcgggaactccgggtggggcaggctcgcggcggcgcgatcgggagacgcgacggcctccggtcggcagcgacataccagcaaggccgtgcaacagttactctaccctgctggtgttacagaaccgcatcgatcgacacctcgacgtcacacgcgcgaagtctgcctgcaccaggagcccattgacgtccgccagtcgtcgaaggacgaggtcatcctcgaggagatgatccggctcggcttctggcccgacggcgaagacgcgccggcgcccgccgcggacgtcatccgcgcccgtgccgatgcgatgcgcgagctcaccgagttgcagcgccagaacgccatgctcggcgatccccagcgcgcgctgaaggagatgcacaagcgccgcaaggccgaggcgatggcgcggcggcaggagacaaagcgtcgcaacgccgaggcgcgacaaagccgggcctttgcctggtacgatcggcgcaagcgcgacgtgctctatctcggcgaggacgtctcgcgcggccttcatgcccgcaccacggcgacgctcctgcgcgacggcctgcccccgctcgccgatgccaaggcgctggctgatgcgatgggcgtgccacttggcgagttgcgcttcctcgctttcaacaggaaggtggcgtcggtcaaccactatcagcgcttcacgatcccgaagaagagcggcggcgagcggttgatctcggcaccgatgccgcgcctcaagcgcgcgcagtattgggtgctcgagaacattctcgcgcgggtgccgctgcatgatgccgcgcatggatttgcgccgcagcgctcgatcctgaccaatgcgcgcaaccatgtcggccgtgacgtggtgatcaatctcgatctcaaggatttcttcccgaccctgacttacgcccgcgtcaagggcctgttcgaggcgctgggctacgcggaggcagtcgcgatcccgcttgcgctgctgtgcaccgagccgatggtcgaccaagtcgcgctcgacggcgagcgacatttcatcgcggacggtccgcggctgctgccgcagggcgcgccgaccagcccggcgatcaccaacctgatctgccgcaagctcgacaaacgccttgtcaggctctcacgcgtcctcggcttcgtctacagccgctgcgccgacgatctgaccttctccggctcgggcgaagcggtgaagaagatcggcaccctgatcaaggccgtgcacggcatcgtcgcggccgaagggttcaatgtccatccggacaagacccgcgtgatgcgccgctcgtcgcgccaggaggtcaccggcctcaccgtcaacgaggcggtggccgtgccgcgtgacctgctggtcgcgctggcgcggcaggacgaaaagaagcgggctgcgcatgcgcgcgtcacagcgcccatcccgtcgcgcgtgcccaatgtcccgtcaccgccagcggatgcgacgcgtgcggccggtccgcaggcggctcctgcaactggaccggcgacggcaccaagcaagaaaaggcagccgtggttcgtcaccgcattggtgatcctggtggctctcgcattcctaccgctccccggcggccccgcgatcgccggcgcgatgctgtttctgtacttcagccgatggtggaggcgctgagccaacgcccggcccggtcaggctcgatcgggagaatcgctgcgggcaattcaacgcaggcggcgtcgggatggcaggctgccgtgcgagctgggagcggagcaaaatcgcaacattcgatagcgccaccgcgccccatgcaaagcgcatggcagctaaaacagcaacgatttcaatcgcaattctaggggtggtgcgctcggagggactcgaacccccacggtgttacccactgccacctcaaggcagcgcgtctaccaattccgccacgagcgctaaggatgtcggatggaaccctaaggcgccgccgcatcgagggggccatgtaacaaatcacggatgcagggacaagcggcttgatgcttgaattaactgcgaaccccgggagatttcggcagcatttgcttgacctcgaccgcaatccggttgcggtcgaccagaaccacgccgctggccaccggcaggttgttggcgaggatcttgacctcgtcggcctcggtggcatccagttcgatgatggcaccgcgggagagccgcatgacctggtgaatcggcatagtggtggtaccgaggaccaccatgagatcgacgctgactttatcgagggtgggcacttctgaaccgccgaacgggaactagattgtgggttcacctgaccatgttagggttagctaatggttaacgaccgccaaagcctcgatctgacgacgtttgcacgcccctcgggcggcgacgcggtcgaatggcggatctcaaatagtccggtcccctaccccgattctctcgccgcgatggatgcacgggtcgcagcgatcgccacgggcgaggcgccagaactggtgtggctgctggagcatccgccgctctatacctccggcaccagcggcaaggccgacgacctgctcgacgcgcgctttccgaccttccagagcggccgcggaggccaggtcacctatcacggcccgggccagcgcgtggcctatgtgatgctcgacctcaaggggcgccggccggacgtgcgcgcctatgtcgcttcgctggaagaatggattatccggacgcttgcggccttcaacgtccgcggcgagcgccgcgaggaccgcgtcggggtctgggtgaaacgcccggacaaggggcctggccatgaggacaagatcgccgcgatcggcgtgcggctgcgccgctgggtctcgttccacggcatcgcgatcaatgtcgagcccgacctttcgcacttccaggcgatcgtgccctgcggcgtggtcgatccgcgctacggcgtgacctcgctggtcgatctcgggctgccggtcacgatggccgacgtcgacatcgcgctccggcaggccttttccgaagtgttcggcgacaccgcggcgcggctgcgggaaaccgcgatctaaccgggcttcctgcgcgtcgcgacggcgtgatcagcaacgggtcttgccggctcgccgctgcccgcgtgacggccggcaatgcgccaataggccacccctgcagcaaatccagcaacgccaaacagcaagccgatcaccggattccacgagccgctggcgcccacgagaaggctgacgctgattacgccgatgccagcgccaacgaagccgaagaacaggaccgagcggatcgcaagccgctcactaagccagataaccaaaacggacggaatggccgtcaacgcgcctatgacgacgaagtcgatcagcgcgaagacaagaagtgcaagaccgccctcgagaaatctcaccagatcgcgaccggacgcgatcgccaggaccaccagccctaagccacacataaccgccgttgcggcggcgcatccggccagccatcccgtcagcgcgcgagaacacgtaccagatgtcactctgccctcccctacaagatcgcctcgaacgcgctgcgcaacgtttcgtgccggaacacaaagccgttgctcagcgccttgttcggcagcacgcgctgaccgccgagcagcaactcgtcggcgaagtcgccgccgacggcacgcagcagcgcggccggcacgcggaagatcgtgggccggtgcaggcgacgtccgagctcttcggtgaatttcgtgttggtgaccgggatcggggcggtcgcgttgatcggccctgagagctcgggcttcgcgatcacatgcgcgatcagccgcacgaggtcgtcgcgctcgatccacgacatccactgcctgccggagccgagcggcccgccgagaccgaactcgaacggcgtcagcatccgcgtgatgaagccgccgtcggtgcctaccacgagtccgatccgcaaatacgccacgcgcacgccgtggtcggcggcgggtctggccgcgttctcccaggcctcgcacagttcgtgactgaagcaggcatgggacttcgccgactcggtgagcacctggtcctgccagagcccgtaccagccgatcgccgatccactcaccaagacctgcggcttgcgctcgaggcgcgcgatcagcttgacgacatcagcggtcatatcgacgcgcgaggctatgatcctgcggcgcttggcctcggtccacaggccgttgccgatcggctcaccggcgagattgacgacggcgtcgatcactgaacacgcaggcaactggtcgaggctggtgatcagcgtcaccggcggcgacagcgtctcggccttggccggattgcggatcagcgcgatcacctgatggcccgatgcggcgaggcttgcgaccaggcggctgccgatgaagccggtcgcgccggtgatcagtacggtctgacggggcggcagtttctcgacgagcgtcgcagccggcacggttgccatccgtcccaggcgtcgggacgcggcaaagtcgcgcgcgccgaacagcgccgcaccgaaggccgcggtggtcgcaaaaatgctcaggagcccggcataagcgggagcgatcccggtcggctgcgtggtccagccgatcagcaccggcaccagcagcacgaggatcgcgccgtagttgatcgccagcagcgtgtgattgatccgctcgctcggcggcagcttgcggctcagatcctcctcgacgaaatccatcagcgtgatgacgacctcgaccgcgagcacggccaggatggcaatcgcaagaatgccgtgcacctcgagccagccgagcacgaggaacagcagcgcatagagcatgttgcggacgctgtgcagctgcagctcatggcgctgcgatggacgccaggcgagccgctcggtgaattcatggtgatagaaggtgtcgaaggcgcccatcgcgatctggatggcgaccagggtccacagcagcggcgtcatgacgaagcctccctgaacacggcggactgacggatcagccggccgaaacgcgggtggatgatctccagcgtgaagcggaagtcgccgcaaccgagatcggaatgtgtcacggtgagatcgccgggggtgagccagtcgggcagcggcaggcggaacggaccgagttgcaacgaatagccgacgctgtgaaacaccagcgcctcgtgctcgaccgcgatcctgagcgccatgctgacgccgaacccgacatattcctcgagcccggtcgggccggcaaagcgcttggcagaatgaatcacctgcgggaagccgtcgcggcgcgcacagatccgggtccagatctggccgccgcttgcggcgtcctcggtgaccgtgacgatcatcggcacccgggtctcgttgccggtcggaagcggcccgccgatcagccgcgcggcctgcgccagccaccagccggcgcggctgctcgcggcttcctcgacctcgccgacatagacgacggtgttgccgtcctcgaagcgcttcgagaagcgccgccagatcgcgaccggcaggcggccccaatcctcgtccgacagcaacgcgcggaagcgatggtcgtcgagcagtttggtatcggaagccggcgctgtctttaaggtggatatccttgctgacgccatcgcatactcccgttacgccgcggcccctatttggccctgcctgtcggcaggaaactcacaatcttctcgccgagcttgatcagcgcgaccaggcgcggccgcggcacgttcagcatctgcgagtaccagcggtcgaccagctcggtgaaggtcagcatctccttcagccgcttgctggcgagcgggctgatggcggggtcgtcggccgcgtcggagacgcaggcgcgcagtgccgcgagcgcaggatcgatctcgcgctccttgcgcccggccgcgatcttggccgccacctcccagatgtcggtctcggcctcgaagtggtcgcgacggtcgccgaggatcggcacccgccggatcaagccccaggacaacagctccttgatcgagttggagacgttggagcgcgccatgccgagcgtgtcggcaatgtcctcagccgtcatcggcgcttcggcgaggtagagcagcccgtggatctggctgaccgagcggttgacaccccattcgtcgcccatgtcgccccaatgcaggatgaagcgttcgacgacggcggggagttttttcttggcggttgtttctgtcataacagaaatatcagattattcggaccgaaagtcaagggccgccggaaaccgttcggccgcgaacgtcgtcgatggtgagacggatgactttgcggacggtcagaccgtcggcaggaaggcgaagcgctcgcctgccccgcgcagattgagcagatcggccgtgccgacgtcttcctgcacacggtcgacgcgcgccgagatcgggccgcggccgcacgccttgatcatgtcggcgacgacgccctcgggaccgacgaacatcgcctcgacgctgccgtcgcggcggttgcgaacccagccttcgaggccgcgcgcgttcgcatgttcgtgaacccaggcgcgatagccgacgccctgcacgcgtccggtgatcgtaacgtggcggatcacatcgctcacttcttcaggccgaggaattcgccgctgcgcgccttggtctccgcctcgcgcatcgcgcggctggtcagttcggaggacgcaatgcccttgagattccttggcgaggtgccttcgcgcagcgccttcagcgtctcgtagacggcctgggtcgcggccgcgaacggcgcgtggccctgcaacgcgatcctgacgcgctggcttgccagatagtccggcgcggtcatctcctccggtgcgccgccgagcacgatcggcagcgtcgtcgcggccgacagtgcctccagctcaccgcgcgatttgatgccggtgaagaacaagccatcgacgccgaccgcctcataggccttcgcgcgcgcgatcgcgtcgtcgaggttggtgatcgagacggcgccggtccggccgaggatgacgagcgacgggtcgctgcggccgtcgagcgcggctttcatcttgccgacgccctcctcgcgcgagatcagttgcgtcttcgtctcgccgaacggctgcggcagcagcgtgtcctcgatcgtgaggccggcggcaccggcggcttccacctcctggaccgtgcggcggacattgagcgcgttgccgtagccgtggtcggcatcgaccagcaccggcagcgtcgatgcgcgcgacatccgccggatctgctcggcgaactcggtcagtgtgatcagcgcgatgtcgggatcgccgagcacggcgagcgaggccaccgagccgccgaacatgccgagctcgaagccgaggtcctctgcgatccggatcgaggtcgcgtcatagaccgagcccggccgaatgcagcctgatccggtgaggatcgatcgcagtgcttcgcggcgtctgcggaaggccatggtggtgtctccctccacgtcattgcgagaagcgaagcgacgaagcaatccatctctcatcatacgcatacgcggtcggatggattgcttcgctgcgctcgcaaatgacgagtttatgcgaactccaggatcaacgcatcgaccgcgagcgtggcgccggcggcggcgtggatcttcttcaccgtgccgtcgcgttcggcgcgcagcacgttctgcatcttcatggcttcgaccaccgcaagcgtctcgccagccttgacctcctggccttcggtcaccgcgatcgacaccacgagccccggcatcgggcacagcagcttcttgccggtgtcggcggccgagaccaccggcatcagccgcgccgaggtcgcctcggtctcggtgaagacgtagaccggcacttcaaaaccctgatgcgcaaggcggaagccgttgttgatcgcgcgcacctgcacggcgaccaaattgccgtcgatggtgccctgccagaccggctcgcccggcgcccagctcgacaccagattgtgcggattgccaggcagcccgtcggcgccgacgaagcgcaccgcgatggcgtcatcctcgcgcgcgacgtcgagcgcgatctcggcccgatcgagccacaccgcgcggcggcgctcgcgctgcacgacgcggccgcccatctggccggaaatctgccgcttgcgttcgcccagcacatggtcgatcgcggcacccactgctgcgagccgccgcgcgatctcgccctcgggcgcgcgcgccgagaatcccttggggaattcctcggcgatgaatccggtcgagagccggccctcgcgccagcgcggatggttcatcaatgccgagaggaacggaatgttgtgcctgatgccgtcgacatagaaggcgtcgagcgcggtcgcctgcgcctcgatcgcggcggcgcgcgacggggcgtgggtgacgagcttggcgatcatcggatcgtagtagatcgagatctcgccgccttcctggacgccggtgtcgttacgaacagtgatgccgtcatggctggcttcggccggcggacggtatttgaccaggcggccgatcgacggcaggaagttgcggaacggatcctcggcatagacgcgggactccaccgcccagccggtcagcgtgacgtccttctgcgcgatcgcgagcttctcgccggccgcgacgcggatcatctgctcgacaaggtcgacgccggtgatcagttcggtgacgggatgctcgacctgcaggcgggtgttcatctccaggaagtagaagctcttgtcctggccggcgacgaactccacggtgcccgccgaatcgtagttcacggcattggccaaagcgaccgcctgctcgcccatcttgcggcgggtggtctcgtcgagcagcggcgacggcgcctcctcgatgaccttctggttacggcgctggatcgagcattcgcgctcgccgaggtaaatcacgttgccatgcttgtcgccgagcacctggatctcgatgtgccggggatcgacgatgaacttctcgatgaagacgcggtcgtcgccgaacgacgacttcgcctcggccttggcgaggttgaagccctcggcgacctcggccttggaatgcgcgatgcgcatacccttgccaccgccgccggcggaggccttgatcattacgggatagccgatctcgtcggcgatctggaccgcgtgcttgtcgtcctcgatgacgccgagatgacccggcacggtcgagactttcgcctttgcggcggccttcttggattcgatcttgtcgcccatcgcggcgatcgcgccggggttcgggccgatgaagacgacgccggcggcttccagcgcgcgcggaaacgcctcgcgctcggaaaggaagccgtagccgggatgcaccgcctgcgcgccggtcttgcggcaggcttcgacgatcttgtcgatcaatagatagctctcggccgcggcgggcgggccgatcagcacggcatcatcggccatctcgacatgcagcgcgtcgcggtcggcctcggagtagacggcgaccgtctcaatccccatacggcgcgcagtcttgatgacccggcaggcgatctcgccgcggttggcgatcaggattcgtttgaacatgctcttcttgcttgggctttttaggacttggcaggattcctccccgcgcaatctggcacgggcgattgggcgtaaccactccgtggtacagcaaattgccccggaggcaacggtctaatgcaaatccggcccggtgcctggccaggccttgggtgggcttttgcggtagcctgagggggacttcagcccgaataggtcttgaagcggccgcgggaatacgccttcgcaacggctttcatcagctcgctgacctcattttccagaaactcattggccacgatcagcgcccggatggtcgcgcgcagattcccgccgcaggcggaaatggcctgatcgacagccgcttccagcccgtcatcgtcgtcagattcgggccgtgcagacatcgtgaggtatccgggattcaggtggcacatcatgttcctattttgttcttatcgagtcaatcggatctttgcgcacgccagcacgcgagacattgcaggggatgtcggcaatgacgttccatgatgaaactcggccatgcctgcatccctgcaacggcgatgcccgtccgttctacgtcgcggaacgccggtcgggatgtgactgcgcgcacgcaccggttcgcgaacagtccttggttggatcgtaccgggctgtgctagaagtccggttgcccgccaaagatctgaagtgagaaaatgcggtttcgaaatccggtcgtcacgacacttctcctgacatgcctgttcgcgagccccgtcctgccggcgaccgctggccccgcggtcaccgcgatcatcaaggacgccggcaccgttcagctcggcaacacgacctatcgactcgacggcatcgatgcgccggcggttgaccagctctgtatcgacgagcacgccgatgtctggacctgtggaatggaagcgcgcgaccagctctccaagctgatcggcggcaagcctgttcactgcgacgatatcggcgtcgacccgacctacaagaagcgccgcctcggcgtctgcaagatcgagggcgacccgaccaacctcagccaggtgctggtgcagaagggatacgccctcaacgtcgagacgtcggccactggccgattcaagccggatgaagccaccgccagggacaatcgcgcggggctgtggaagggctgcttcgtggcgccgcgcgattttcgtgccgccaggaaggacggtgccctgctcggcaatgcctgtccggccaaccgcgacacacagatccgcgacgcgctcttccccgcagacctgccgatgccggcaagctgcaacatcaagggcaagtacgccgtgcgcgcccgcgtcaccggcaatgtcggcatctatcatttgcaggcgtgccgcagttacccgggcctcagcaatccggatcgctggttctgctccgaagaggatgcgcaggccgccgggttccgcagggcctataattgccgtccgcccaagggcaagtgaccagcaactgaatgcgacaaaacaagctggcaaagccgcctcgtcctgtgtgagactgcgccaagaggttgccggcgcgcatgaccccacccgatcgctctgatgtgcttcccgaagctgcggcagcagaacggctgcggcagcacctcgaggaaatcgcgcgcgaacgcgatcgcgcgcatcgcgagctgcaggagcgcgaggccgagctggcgcggatccagcgcattgcgcgggtcggcgggcttgagatcgatttccgcgacggcgtgcgcaaccgccgctcccccgaatatctcctggtgcatggactaccccctgaggaagtcaacgagacctatgagaactgggtcgcgcgcatccaccccgacgatcgcgagcgaaccatcgagcacctgttcggcgtgctgaaggccggcggcgaggattacaccgccgagtaccgcatcatccgcccgagcgacggcgagagccgctggattcgtgtcgtcgccaagatcgaccgcgatcgcagcggccgcgcgctgcggctggtcggcgccgatctcgacgtcaccgatcagatgctggcgcaggaaaccttgcgggaaagcgaggaacgcttccgcctgatcgccgacagcgcgccggtcccgatctgggtgaccaagctcgaccgcacccgctccttcgccaatcaggcctatctcgacttcctcggactgccgttcgaggaagcgatcgtgttcgactggcgcaaggcgctgcatccggatgatctaccgaagatcctgcaggagcagatcaccggcgagctctcgctgaaaccattcgtgctggaggcccgttatcgaaacgctgcgggcgactggcgctggctgcgctcggagtcgcagccgcgctgggacccgaacggcaagcatatcggcttcatcggcgtcgcccacgacatcaccgccgccaagcaggccgagatcgagctgcgcaagctcaacgagtcgctggagcgacgcatcaccgaacggaccgcgcagctcgagtccagcgaggcccagatgcgcgcgatcctggaaaccagccatcaacatcaggggctgctcaatcaggacggcgagttgctctacgccaaccggaccgcgctggccggcattcgcgctgacgccgctgatgtcgtaggcaggctgttctgggaaacgccctggttcagctcgaccgaaggcgcgccggaaacgatcaagaatgcgttcgccaccgcaatgcgcggcgaggacgtcaagtccgaattgccgctgcggctgccgatcggcgaccgccatttcgacttcgagatgcggccgctgcgcgaccagcacggcgcgatcgtcggcgcggtgccggaggccgtcgacatcaccgaacggcgccgcggcgaggaagcgctgcggcaatcgcagaaaatggaagcggtcgggcagctcaccgggggcgtcgcgcacgacttcaacaatctactcaccatcatccgctccgcgaccgatttcctgcgccgccgcgagctgcccgatgaacggcgccgccgctacatcgacgcgatcgccgagaccgtcgagcgtgcctccaagctgaccgcgcagctgctggcatttgcgcgccggcaaccgctcaaccccgaagtgttcaacgtcggcacccaggtcgacagcgtggtgcagctgatccgcccactggtcggggcacggatccacatcgaggtcaggatcgaggatcccgactgctttgcgatcgccgatatcggccagttcgagaccgcgatgatcaatcttgcggtcaacggccgcgatgccatgaacggcgagggccagctgacgatcggcgtcaggaaggtcaagcacatccctgccctgcgcgcgcaggcctcgcgcagcggcgatttcgtcacggtctcgatccaggataccggcaccggcatctctccggaaaatctcgacgcgatcttcgaaccgttcttcacgaccaaggaggtcggcaagggaaccggtctcggattgagccaggcgttcggcttcgtcaagcaatccgatggcgacatcgaggtcacctctgcgcccggccagggcgcgaccttcacgatctatctgccgcaggcgatgcgcccggtggacgtcaaggtcgcagccagcgccggcaccgagcagacctcgatcggccgcggctatcgtgtcctcgtggtggaggacaacgacgatgtcggccagttctctaccgagctactcgaggatctcggctattcggtcaagcgcgcggcgaatgccaacacggcgctgtcgatcctgtccgaaaacgagttcgccgccgacctcgtgttctccgacgtgatcatgcccggcatgaacggcgtcgaactggccggcatcatccgcgatcgctttcccggcctgccggtggtgctgaccagcggctacagcaacgtgctcgccgaaaacgcgcatagcggcttcgagctgatccagaaaccctattcggtcgaggcgttgtcgcgcacgctccgcaaggcgatcgccgaacagcgcgcgatcgccaccaagccctgatccgcagccgaccgcgcgctattcgatcaccacatgggcgacgccgagctgcaggatgccgagcgcacgggccgccgtggtcgagacgtcgatgatccgtccgcgaacgaacgggccgcggtcgttgacgcggcagcggatcgatttcccgcggtaggacacggtgaccatgctgccgaatggccgcttgcgatgcgcgcaggtcatctcgccgctcctgccgatgccatgatagtaggacgcaaggccactctctgcgttcgccatgcacgaggtaaacagtagcatggccgcggacgttattgcggttttcattgatcgcctgccggtcgagccccgcaggggaacgcggtcccacggtttcggttccgcgtccggcgtgccggcggagcgatttttgggaaccatttctgcggaagctgcccacccgccctgaacgacggtggcagcgctcaggctgcgtcctcgaccccttcggccgcgagcagggtccggacatcctgcgccgggaccggccggctgaacagatagccctgcatctgcgtgcagccgagcatctgcacggtgtcgcgctgctggtcggtctcgacgccctcggcggtcgtgatcatgttgcggtcggcggcgatcgacaccaccgcacggatgatcgaggccgagcccgagttgcgggtgacttccttgacgaagctgcggtcgatcttgatcttgtcgaacggaaagcgctgcagatattgcagcgacgagtagccggtgccgaaatcgtcgagcgcgatgtggacgccgagcgcacggagctggccgagcgtgaccagcgccgcatcgtcatctgcgatcagcaccgcctcggtgatctcgagctcgagcctgcgcggatcgaggccgctctcggccagcgcgctcgcgaccttcagcgccagcgtttccgacttgaactgaatcggcgagacgttgaccgcaaggcgcacatgcgccggccaggccgacgcctcgatacaggcggtgcgcaacacccactgcccgatctcctcgatcagcccggtttcctcggcgaccggaatgaactccgccggcgggatcatgccgcgcaccggatggcgccagcgcagcaacgcctcgcagccggtcacctcgtcgctgcgcaggtcgaccagcggctggtagtgcaattcgaagccgccctcggccagcgcggtgcgcagatcggcctccagcgcgcggcgcagattggcctgcttctccatcgccggatcgaagaagcgataggtcctgcggccggcggccttggccgcgtacatggcaaggtcggcgcatttgagcaggccgaacaggtcggaaccgtggcgcggcgcgatcgcgatcccgatgctggcatcgctcgacagccaatgaccgaggcagtcgaacggcgtgcgcagcgactgatagatgcgcgccaccagatcactgacatcgtcatccgaggtgatgtcgcgctggacgatcgcaaactcgtcgccgccgagccgcgcgatgaagtcgttcaatccgaccgattgacgcagcttctcggcgacgcgcctcaggaattcatcaccgatcagatggccgagcgtatcgttgatccgcttgaattcgtcgatgtcgatgtaatggatcgcgaactcgcggaccgtcgccttgcgcaacaattcctcggcatggcgctggaacagcgtccggttcggcagattggtcagggcatcgtaatgcgcgagatattcgatctgcgcctgcgcccgccgcccgtcggtgacatcctcaagcgtggtggcccagccgccgtcgggcgcgcgcttgtagatcaggcggatgctgcggccgtctggggttatgatcacggagtcccggatgtcgtcacccctcggattggtgaagcgggcgcagtattcatcgacatcgccgacgaatgaaccgatcgcctggcgatgcaggatcaggtcgcgcagatggcagccgggcctcacgatatcgggggacaggccgaacatgtcgatgtatcgctggttgcagatcacgagccgcgccgaggcatcgaacagcaggagcccctgtgtcatggtgttgatcgcggtgtcgaggtgctggcttttctcggacagccggcgctgcgcggcatcgtgctgccgctgcagctggcggacgatcaggaagatcgtcatgacgacgatcagcaccgcgagcaccgcggcgcagaactgcagcttggtctgggcgcgccagtcctccagcgcgctggaggttctggtggtggcaaggatcatgatcggaaagtgctgcagcgatctcaccgcgccgacgttctcctcgccgtcgccgccgacgaaccgccccgacgtgttgccgccgagaccgatgaccttgcggaacaacgactggtccgtgatgttgcggccgaccacgtcggcatcctgcggatagcgcgcgatgatcgtgccgtcgcgatggatcatcgagatgaccgtgtcgccgttcaacgccagcgaggccacgaaatcctcgaaatggctgggctcgacgccgcggctcgcaaaaccgatgatctcgccattgcgcccggtaatcttgcgcgcaaagatcgtggtccagttgccggtcaccttgctcatcgccggctcgacgatcacaggcgacgtcggccgtcccgaggtgaactcctggaaataacgccggtccgcgatgctgatgtcgggcaccggccacatctcggacgagttgatcagccatccgttggcattgaacagattaagcccgccgacatgcggcagcgccgccaatcgcctgcgcagcatctcatgcgcactgagctgcgacatgttcttctcgaactggtcggcggtctcgacctgttcggaccgcagatagttcacgacgtcgtcgtggatatgctggagatcgctgagctgctggtcgaaatgccgcgacagcagcagcgcggtgttgttgagctcgcgttcggacatctccagggcacgctcgcgaaactgcagcgcgagatagccggtgccaagcgtaatcgcaagcaccagcagcgcggcactcaggacgagccactgaatggcgccgatcctggcggcacgcagcacacccttgatcgacagccgccggtgttccggcatcatgctgttcgttgagacaaccgacattttcctgcccctgcgcgtgcccttctacgggaacacaacccaaggggtcgttaggaaaatcggttatcggacagttaaggtgaatgcggaagcgaacgcgatttgcgccaagatcgtcaggaggcgaccactccaggcgaggaccccgtcgtctccttcaggctgcactcgatcaacgcgccttcgacggtgaatttcgaaaatggtgaggacggcgtcacggccttgagcgcagcgaagaattgcgagtcgcccggactcttcaggagaaaccggatgtggttggccgacagcgcgtcgcgcgacagccagacgacgccggagaacagcgtcacaagcatctgcccatagttgctgatatcggtgaggccgagatcgtaaatcggagacacattgacgtaacgcgcgctgagcgccggcgccgagtatcggctcatcaggaggcgccggacctggcagaccgaatgaacccgttctccgtcggtcaggtgatacagcccctgactgtcgccctccctggcggtcagcgcttcaaaggcgctgatgccgccgaaagtggcaaagtcctctccgacgccttcagcgtccttcttccattgtgccttgatctggcgccaggaccgctcaggatccttgattggcaaaagccgcatggttaaggggctgttagcacggaggggagtcttcgcgggataatatgtcgcaggcattaagcctttgcttacagcggtagccggttgcgtcggtgcggtggctggcccgacgaaagcgaagcagaatccggggagctgtcacaacggctggcgctctccggatttcgcctcgcttcgtccgggctacgaccctcgcattggagttcgcgatcgcaccgaacttgcgatctgcaacgaacacccatgcgcttgatggacaaacccttcgggcggcgacgcctggatggatattccatcgcgagcgtgctcagatatcaacatcgtgacggcaggagttgtacctcgaaatggatgcgctgacgctgttcggattgttcgccgtgacgatgatgctggtctgctacgcggctgaagatcgcagcccatggttcatcctggccttcgcggtctcgtgcgcactggggtcggcctacggcttcctgcagggcgcctggccattcggcctggtcgaagcgatctgggccgtcgtcgcgtcgcgccgctggctgatgcgccgaaccgcggaccgcgtgtaacgttatagtatccgctgccaatctgtcgcggacttgaacttgaatgcgcacggtcggggcgctaattagggcccatggccgcttcgcgcaccaagattcagtcgtccacccacgcatcgggaccgcgccgctggcgcagcctccttgcgggtctgatctcactcgcgctggtgctgtcgttcttccacggctggacctccgacggcgacgacgatgcagctccggcgatctcgatcgcgcagtcgatcaacgacaccggcggcaaggctcccgcgcatccagcttcgctccacggcgatcattgcctgacgcacgtcgtctccgtcgttccgcaagagacggcgttcccgatcgcctatgcgccgcacagctatggcgacgccagcattgcgctgccagcgtcggccgagcgtctctctccattcaaaccaccccgcgcctaatccggtcggcttgaccggccgtgcgtcgctgccatccggccgcgcgcacgcttccgcacagatcgatgtcgcgacagcgcagggccaccggcatgcgctgcgaagaggcgcatatgaaacgggttgttctatttttcgccggcgtggccgccggcatcgcactggtcctgatggcggccggaggtaccggctggccggtcaagttcccggtcacgacgcaggagaccgcgtccgaagctccatcgaaagccgaggccaagcatgaggccaccggacgtgtcgagctgagcgaagatcagattcgcgaggccggcatcacgctcgcgcaggccggcggcgggatgctgaaacgacatttcctcgcaccgggctcgctgatccccgacgccgaccatatcggccgcgtctcggtgcgcgtgctcgcaacggtcacggaactgcgcaaacgcctcggcgacgtcgtcgagaaaggggagatcgtcgcagcgatcgaaagccgcgaggtcgccgacgccaagagcgaatatcttgcagcgaggctcaccaacgatctgcagcagacgctctacgcgcggcagaagacgttggtcgagacccgcatcgtgtcggaaaacgaattcctgcgcacgcggctgaccgcgaacgacgcgcaaatcaagctcgacggcgcgcgacagaaactgtttgcgctgggcctgtcggaaagcgagatcgccgacctgcccaaccagccgccggaaagcttgcgaacccaattcctgcgcgcgccgatcagcggccgggtgtccgaacgccgcgtcgacgtcggtggactgatcgggcgcgagggccaggaaagcgagctctacgtcatcgtcaatctcgacgacatctgggttgatctggcggtgtcgccggaggacatcagtgccgtccgcgaaggcgtttcggtgaggatccgcgccatcggcaacgaggctgaagccaacgccggcgtgatcttcgtcagccccctgctcgatcgagagacccgcaacgcccgcgtgatcgcgaccatgcccaacaaggatcaccgctggaagccgggcaccttcgtcaccgcggaggtgccgctgtcaggcgcgccgtcaaccgtgatggtcacgaagaaggccattcaaaccatcaaggggacgccgaccgtgttcgtgcgtgacgccgacggcttcgaagcgcggtcagtacgaaccggccgcgaggacgacgatgatatcgaaatcatctcaggcctcgctgccggcgagaccgtcgccgtgcagaacaccttcacgctgaaggccgaggtcgagaaggacgaggcggagcacgaccatgattgagcgcatcatcggtcttgcgatccagcggcgctgggtcgtcgtcaccctggcggcgatcctgatgttcctcggcggcctcgcgctgaccaggctgccgatcgacgcggtgcccgacatcaccaacaagcaggtgcagatcaacaccgtggccccggcgctgtcgccggcggaaatcgagaagcagatcaccttcccgatcgaaactgcactggcgggcgcaccggggctggagagcacgcgctcgctctcccgcaacggcttctcgcagatcacggcggtgttcagcgaagccaccgacatctatttcgcccgccagcaggtcggcgagcgcctgaccgaagtgcgcgcgcgcctgccgcagggtatcgagccgcggatcgggccgacctcgaccggcctcggcgaaatctacatgtggaccgtccattactccggcgagaaggttcagagcgacggcgcaccgggcctgcaaagcgacggccgcttcctcacggcggacggccaggtgctgcagaccgaagtcgagaaggatgcctatctgcgcacggtgcaggactggatcatcaagccgcagatcaagatggtgccgggcgtcgccggcgtcgattcgatcggtggctatctcaagcagtatcaggtccagcccgatgcggcgaagctgatcgcgctcggcctgaccttcgccgacgtcgccaaggcgatcgaaaccaataatgtcagccgtggtgcgcgctacatcgagcgcaacggcgaaggcttcgtggtccgctccggcggacgcctggagaacatcgaggagttgggtgccgtcgtcgtcaccacgcgtggcggtgtgccggtccggatccgcgacctcgcgacgctctcgatcggcggggagacgcggaccggcagcgccagcgaaaacggccgcgaggtcgtggtcggcaccgcgctgatgctgatcggcgccaacagccgcaccgtttcggccgcggtcgatgccaagctgcgcgcgatcacgccgtccctgccggccggcgtcaaggtcgagacggtgctggatcgcactcagctcgtcgatgcgaccatcggcaccgtggcgcgcaacctcagcgaaggcgccctgctcgtgatcgcggtgctgttcgtgctgctcggcaatttccgggcggctctgatcaccgcgctggtgatcccgattgccatgctgatgaccgccatcggcatgtggcaggggcgcatcagcgccaatctgatgagcctcggcgcgcttgatttcggcctgatcgtcgacggcgccgtcatcatcaccgaaaacagcctgcgccacctcgccgagaggcagcatgcgctcgggcgcgtgttgacgcgcgacgaacggctggcgacggtgcgggtttccgccgtggaaatggtgcagccgagcctctacggccaggcgatcatcctgctggtctatgtgccgctcctcaccttcaccggcgtcgaaggcaagatgttcgagccgatggcactgaccgtgatcctcgcgctcgccgcggccttcgtgctgtcgctgacgctggtgccggcgttgatcgcgatcaccattaccggccgcgtgcaggagaaggagaactggctggtggccgccctgaagcgctggtacagcccgctgctgcggcgcgcggttgcgacgccggtgccggtcatcgcgacggcggtcgtgctgttcgccgccgccctgttcgggttcttccgcctcggccaggagttcatcccctcgctcgacgagaagaacatcgccatgcacgcgctcagaattccgagcacggcgctgtcgcagtcgcaggcgatgcagctctcggtcgagaaggccgtcagccgcttcccgcaagtggcgttcgtcttctccaagaccggcaccgcggaggtggcgagcgacccgatgccgccgaacgcgtccgacaccttcatcattctgaagccgcgtgagcaatggccggatccatcgctgaccaaggagcagttgatcgaggacatctcgaaggcggtcggccggctgcccggcaacgtctatgagttcacccagccgatccagatgcgcttcaacgaactgctcgccggcgttcgcggcgacatcgcggtcaaggtgttcggcgacgagttcgaaccgatgcagaaggccgccaaccagatcgctgcagcgctgcgcggcgtccgtggcgcgaccgacgtcaaggtcgaacaggcgagcggcctcccggtgctcgagatcaaggtcgacaaggcggcgatcgcccggcgtggcctcagtgtctccgaggtccatgacgtgatcggcgccgcggtcggcggccaggatgccggtgtcgtctacgagggtgatcgcagcttcgatatcgtggtgcgattgccggagagcgtgcgctccgatctcgaagccttgagcaatctgccggtcgctctgccgaaggcgacgccgagctcgccggtacagagcctgccgctcaaccgcgtcgcgcaattctccttcaccgaagggccgaaccagatcagccgcgagaacggcaagcgccgcatcgtggtgacggccaatgtccgcggccgcgatctcggctcggtggtcgaggaagcacagacgagagtcgcgcaatcggtcaagctgccgcccggttactggatgacctggggcggccagtccgagaacctcgctgcggcgcgccaacgcttggccgtcgtggtgccggcctgctttgcgatgatcttcctgctgctgctggcggcgatgggctcggcgcgcgatgcgctgctggtgttcagcgcggtgccgctggcgctgaccggcggcatcgcggcgctgtggctgcgcggcatgccgttctcgatctcggcggcggtcggcttcatcgcgctgtccggcgttgcggtgctgaacgggctggtgatgctgagcttcgtcaggcagttgcgcgagcaaggcgtgccgctgcgggaggcgatcgagcaaggcgccctcacccgcttccgccccgtggtgatgaccgcgctggtggcctcgctcggtttcgtgccgatggccttcgccaccggcaccggcgccgaggtgcagaagccgctcgccaccgtcgtgatcggcggcctgatcagcgcgaccctgctgacgctcgccgtgctgcccgcgctctatgcacggtacgggcatgccggcagcgctgcgcgcaatgagagaaccgcgattcagcctgcggaatgacggcgtgttgaccggcagtccgcagcagagacctcgatgttttgactgggagaatccaacgtaacaattctgtcatatggcaaaactaaacgaagacggcggcgatctgtcgcgggcatcatcagggggaagaacgaatgcgccgagccatcacactattgtccgcgagcatgatcgcgctttcagccggcgccgctgcggcgcagaacgccaagccccgcaacctcatcctgttcgtccccgacggcctgcgcggcggcatcgtgacgccggacacaacgcctgcgatggccgacatccgcgacaagggcgtccacttcaagaactcgcattcgctgttcccgaccttcacgatggcgaacagctcggcgctctcgacgggtcactatctcggcgacaccggcaccttctccaacacgatctacaccggctacacctcggtgccagccggcgacaccgtggtgccgttcatcgagaacgacgcggtgctcgcagatgtcgacgatcacttcaatggcgactacctcaacgaggagacgctgctgaagatagcgcgcggccagggcttcagcaccgccgccatcggcaaggtcggcccgaccctgctgttcgaccacaccgatcgcggcaagaacacgatcgtgatcgacgattccaccggcggcaagaccggcgtgcctctgtccgacgagatgaaggatgcgttgaccaaggccggactgccgctcgcgaccccgagccgcggcgacaatgccaaggcgggcgatgccaagacgcccggcaccacggtcgcgaacgttgcgcagcaggcctacatggcggatgtcgcgaccaaggtcgtgcttccgatgttcaaggcgcgcaacaagccgttcgtgctggtgttctggtcgcgcgatccggacggcagccagcacaacaccggcgacagtctcaacaccatcacgcccggcatcaacggcccgacctcgatggccgggatcaagaatgccgacaacaacctcgcccagctgcgcaaggcgctcgacgaactcgggctttccgccaacaccaacatcatggtgtcctccgaccacggcttctcgacgatctcgaaggagagcaagaccagcccctcggccaaggtcgtctttgacgacacgccgaaggacttcctgccgatgggctttctggcgattgatcttgccaaggcgctgaacctgccgctgttcgacccgaacgacaagaacgccaaggtcgccgacaatgcccatccgaaggccggcaacggcgtgctcggccaggatccggccaagcccgatgtcgtgatcgcaaccaatggcggctccgacctgatctatctgccgaaccgcgacaagaagctggccgaccgcgtcatcaaggcgctgctcgagcaggactatgtcagcgggcttttcgtggacgacaagctcggcaacttccccggcacgctgccgatgtcgaacctcaatctgaagggcaaggcgatgacaccgaacccgtcgatcgtggtcaacttccgctcctggtcgagcggctgcccgatcccgaccaactgctcggtgcagatcgccgacaccgtgctgcgccagggccagggcatgcatggcagcttcagccgcggcgatacctacaatttcaccgcggcgatcggccccgacttcaaggccggctacgtcgatccgcttcccgtcagcaacgccgacgtcggcatgaccgcggcccaactgctcggcctgcgcgcgccgaacaatggcgggctgatcggccgggtgatgtcggaggcgctgccgaacggcatcgtgccgaaggcggccgagggcaccatcatgtcgaagaagccgtcggccaacgggctgcgcaccgtgctgaaattccagcgcgtgctctcgacccgctatttcgacgtcgccgggttcccgggacgcacgctcggtctcgaggagaccgccggcaaacagaaaacggcggggaagtgatccccgccgccgtcgcctgaagccgttggtccggggtgatgcgcgcatcatcccgggcaatcatcacatcatcccgatgtcgaacacgttgggcagctgggtcgcgagcggcagcgccgcggcgccgaccagcgtcgccaccatcgccgcgagcgcacggccggagcggcgcttgccgcgcatctggccggcgatccactccagaaccttggtgtcgatcttcgttccttgcgtcggtgcccagcgatcgatctcggtgtcaggcgacagcgccaccgtgcgcggcggcaccggcaggccggactcggaggcggcatgatgggcgatcgccttggcgagcaggtcgtcgaaccggccgtcatcgctgcgctcggcagccgcctcgttgatcgcgaacagcgcctcgatctcggcccggctgaccggctgatgctcgaccgcggccgccgtcaggatgcgcgcgcaccaggcagcgtcgtcggcatcgagcgaacgggagaaatggatacggcccttggtggtcgggccttcgccggtgatgacgccgtcgcgcacgatggtcagcgcatgggcggcggtcttgcggcaggatggagacaacacaccgctgagagcctcagcggtcttggtacttggggtagacattgtgggagctttcaattcctatctcaggccagcttttccatgcgggcgtaaacgagtggttaatgattcggaacttgggttccgagatttttagatggttgctatttggtcgcttcaaatgccgtcagggttcggttcctatagcagcccgggccggcgtgatgaccgcgataagcggctttatctaggcatttccaagcttttgtgcagcagttgatgtttcgccgcagggggttggatcaaaacaagttgcttggaattccacccccaaggagaaatttctcaccttttttcagaacccgttcacttaagccttgccgcctcctatagtgatggcgggacctctaaatcaaattcacctgtaactacaattagatgaggtaagatcatggcacttcagattggcgccaccgcccccgatttcgaagccgagaccaccgaaggcaagatcaagttccacgactggattggtagcagctgggcgcttttgttctcccatcccaaggacttcacgccggtctgcaccaccgagctcggcacgctcgcccgcctgaagcccgagttcgatcagcgcggcgtcaagctgttgggcctgtcggtcgacccggtcgaccgccacgccaaatggtccgaggacatcaaggaaacccagggtgcggccccgaactatccgatgatcggcgacaccgactacaacgtgtcgaagctctacgacatgctgccggcctcgacctcgggcgatcccctcacccgcacgccagcggataaccagacggtccgcaacgtcttcatcatcggccccgacaagaagatcaagctggtgctggtctatccgatgaccacgggtcgcaacttccaggagatcctgcgcgtcatcgactcgctgcaactcaccgccaagcatcgcgtcgccaccccggccgactggaagcaaggcgaagacgtgatcattgccggctcggtcaacaatgacgaggccaagacgatctacccgcagggctggaaggaaccgaagccctacatccgcatcgtgccgcagccgaagtaactgttggcacgcaacctcctggtgacccgagtgcagcctgtcatcgtctggttccgcgacgatctgcggctgtcggatcaccctgccctgcaggaagcggccagccgcggcgcgcccgtgattggtctctatgtccgcgacgaacagagccgcgccctcaaaccgccggccgcgcgccccctcgggggcgcgacgcgctggtggttggcgcattcgctgcgcgcgctcggcaagagctttgaggcgatcggcggaacgctggtgctgcgcaccggacccgccgcttccgtgatcgccacactggcgcgcgaaaccaatgcgggcgccgtgttctggaacgacatcgcgcaggcgccgcatcaggcgattgccggcgatgttgaatccgcgctcgcaagtgacggcgtcgtctcgaaaattttccctggcgacctgctcgtcgacccccaagcgatccgcaacaaggacaatcggggcctgcgcgtgttcacgccgttctggcgtcgcgtgcagggtctcggcgatccgccaaagccgctgccggcgccgaagaagctcacatcggtcagcggcatcgcgagcgaagcgcttgacgagtggaagctcgagccgacgcagccggactgggctggcgggctgcgcgagagctggacgccgggcgaagccggcgctcaggctcggctgaaggcgtttctcgacgacggcatcgagggctacgccaatgaccgcgaccggccggaccacgacgggacctcgcgcctgtcgccgcatctgcgcttcggcgagatcagcccgcgccagctctggcatgccgcccggttcgttgccgccgagcacccgcgcctcgccggcgacatcgacaagttcctgagcgagctcggttggcgcgaattctgccgccatctgctgttcgacgtccccgacctggcgaagcggaatctgcaggagcaattcgacgactttccctggaagcgtgacgcacgcgcattgaaggcctggcagcgcggcctgaccggctatccgatcgtcgatgccggcatgcgcgagctctggcacagcggcgtgatgcacaaccgggtgcggatggtggtcgcctcgttcctggtgaagcatctcctgatcgactggcgcgccggtgagcaatggttctgggacacgctggtcgatgccgatgccggctccaatccggcgaactggcaatgggtcgcgggctccggcgccgatgccgcgccctatttccgcgtgttcaatccgatcctccagggcgagaaattcgatcccgacggcggctatgtcaggcgctgggtgccggagctcgcgcaattgcccgacgacctgatccatcagccttggaccgcgacgccgatcgaactcgccagtgccgacgtcgagctcggcaagacctatccgcggccgatcgtcgaccacaagcaaggtcgcgaacgtgcgctggcggcctacgcgaaaatccgcggcaagggctaacttcggcggttgaccagcagcaccgccgcggcgcaggcggccatgccggcaatcgcgacataatccagccgttcgccgaacagcacataggccatcagcgcggtcgtcgccggcaccagatagaacaggcttgcgaccgacgtcgcggcatggtgacggatcagccagtacaacagcccgatcgagccgatcgacaacgcgaacaccagccaggccagcgccagcacgaactcgctggtccaatgcacgacattggtctcgaacaaccacgcgccaatgccgaagaagattgtcaccgcgacgtactgcaccagattgccggcgcgccaatcgatccggttgcagtagcggcgctgatacagcgtgcccagcgtaatgctgatcagcgagacgccggaggcaagccaaccccatccggcatcgccggtcatcgggcggttgtgcaggatcaggacgacgccggcgagcccgagcagcaggccgccccattgcagcggcgtgacgcgctcccccagccagcgattggcgatggtcgaggtcaggatcggttgcaagcccgggatcaacgccgagagcccggccggaatcgaatgcgcgatcgcgatcgcggtgccgccgagatagaagccgtgcaccaggatgccggccaccgcgctgtggaagacgccggtgcggtccggccatttcggccgcgccaccgccgcgatgaccgccatcaccaccaccacgaacgccatccggatcgccagataggtcagcggctcggcattgttgatgacgtatttggtgccgatgaatcccgtgctccacagcacgacaaagatcgccggcgccaggcgagcggcagtttcctcgaagctcttgttcattgcagaccgtcattgcccgaagacaagccagccggcaatcacgaagttttgcggggctgctacgctggtgccccaggcacattgccgttcctgcgttcgtgtctacaggggcgacaccgggaatggctctcgattcaagacgtcaaacgaacagtcggtgtcattaccctcgacaggctttcgcgggtgatccagtattccagagacgcttgtgcttcagccgatagggcgcggcgtgcctggatcgcccggtcgagtgttcagcccggggacatgaccgacgggtgttcggggacatagccgacacatcatagtgcacggatttggcagtatgggaggccaagtccatgccctggcgagaggtgtcggtgatagatcagcgggatcgcgatatcgttcggctctcgcgcgggcgaggtcgagagttctcgccggcacggcgctgccgttcgctttcagtgcgcgacatcgttggctgacgaacgcgtcgaccccggcatgcgccgagagcggcgcgccacggatatcggcattcctgccgggtgcgagcaagccggcgctcgataccgcattggcgctgggaatgcggatcacatgtccgatgctgctgacgtcgtcgcgagacttcggagactgggcccagtatctgacgcgcaacccgggcttcatgtgatcggcacacggcgccgatcgtcatctgaggtgatacttcctgccgttggtattcgggtcggtattgtcgcttgtcgagagcagcaggactggtccgaaaaagcttttggtgtcccggaacagctgaaaccggccgccgcccttggcggcgatctcctgccggtcgctgtttgccgggccgagcagcctgtcatcctcgtacagccgagccgcgccgagttcgccgtcgagatatttgacgggaatttggtaggcgtgcccctccaggaaatagaaggtaccgcggaccaggtttctatcgatcggacttggaggaagcagataaaggaatgcactggacgccagcgcaaacagcgtcgatccgatcacaatgcgggtgttggcggaaatcctcaacgacgttcgtcccgagctcttgcttgcgaggcgtctctgtagcgcgcgcctttatcgcatacaaccgacgggcatccgccggttcgcggtgacggcagcgggatcggcgcggccgcgcgcctaaagcggcgcctcgcgaatgcgtgaacggcacccccccggttgccttcatttgggcaccgatcgggaacaggcttgccggactctgagcaagccggccaccgcagggggtgcctgcaattgacctatcgatcccatagcagctggcaggacgcggatttacggaatctcgtccgggtcatctcggcatgcaccctcgggctctgggcatttgcggccggcctcctgatcggcaccttcctgctttgatagctggcctcgtgagaccggcctgaaatcggctcgatgaaattgactggcagattggaccggcggtcgcgccgacagccctacccgccactcaggtgatgtgcggcggcgaacaaggcgagcgcgctcagcaccagcgccgacgcggcaccggcaacgccgcgggcgagttcagccttcgaaagattggacctggttgccatcacagcctcctgtgcgcgcgagccgaggcggagccgctccggcggtcaggctcgctgatggagacaatcgcacgatgcagatgaacgcatcatgagtgaaacgaacggcgcgcgcccaggttccaaaatccggcggcaagggatcgccggaccggcgcgccctaccactcttccgggcagggatcgacgatcttccagagatcgaccccgttcttgatcttcttcatctcggtggtgagcccgccattgcggcggatccagtccttcaccgtatccgggtaataggacatcaggtccgaggtgccctcgaggctggtgaccttgatgccgaaggtgaaggccttgtcgtagtaggcctggtggaagccgatgctggccttcggcgtcacgcagatcttgttcagcggcacgatgccgaacaccagcgtgcaggccgagttgcagatgccgtcgatcacgacacgctcgcggcggtcgcggatctgcttgtacttggccttgtactcctcgacatagccgccatggtcgcgcgtgatgtgcagcacggcccgcgccggcgtgaccgccagaaccgagagcagcagggcgacaaggggcgtgatgcgcatgaaatgttctaaaccgagggaaaggcggcccgggcggacctgaccgcaagactctggccggactgtgttggcaatccgttaagcatccgcaaaaaggcaaaatttggcgcgctgtggctgatttcccgcagctttcggccggattccgggttaaatgaagcgttagaggacctaggatcggctggggaagccgattccagcgtgaatgcccggaggccgccaatgaccacgaccaagcttttcgccgccctcgccctgaccgtttccttggccattccggccttcacgccggccgctgcggccgacctcacggccacggcgcaccaccggcatcaccggcatgcacagtggggcctgccctaccacgtcagctacctgcacaattacggccccggtccggcggccggcagcttcggctattacgacggcccgtcgaccaacaagtgctaccagagctcggccgcctatgtcggccaggaccgccgccggcatccctgcttctgaaggcttgcggtcaacggccggcgcagcgcgcggacagcacccgccgtgccgcgcaagggcgctggccctccccttccaagtctgataagcgacccccgcggcgctcgtagctcagctggatagagcatcggatttcgattccgagggtcgggagttcgaatctctccgagcgcgccactggcgcaccatccaaattattggacttgtctggtttcccgccgcgacctgcgagctggaaccataccgataagcgctcctgcttaacgctcgcgcggtttgggctttccttcctattgacgctgtcgggagccggggtggtaggctaccgccatttcaggcggctattttagatgcgcgatttatcgggattgaaccagcttttgctgacggttttgatcttcgtgccattcgagcgactgttcgctgcgaggccccagaagatcttcaggcgcggcctgctgaccgatatggccttcctgttcatcaacgggtggctggtgttgatcggtgtcatcgtcatcatgacgggggccgctctggtcaatcggtcgatcctgcctgcggcggtgacgcaggcgatcgacgaccttccctatctggtgcaagtgcccatcgtgatcctgatcgcggacctcggcatctactggacgcaccgcatcctgcacgtcgtgcccgccatgtggcagatccattcggttcatcacgcggtcgaggtgctggattggctcgcggcgattcaccagcacccgctcgacgtgatcttcatgaaggccggcgcgctgtttccactttacgcgctcggcttctccacggaagcgatcgcgacttatctcctcgtgtactactggcagacttggctggttcacgcccatgtccgcctgggctctgggccgctgcgccgcatcctggtgtcgccggaattccaccactggcaccacagcagcgaagccgaagccagggacaggaactttgccggattgttctcgttctacgatgtgctgttcgggagcgcctaccttccaaaggagaagaaaccgaagacattcggcatcgatcatccgatgccgtcgaactatctggcgctgctcgcctacccgttcatcgcctggaccgcaaagcatcagcgcagcgatccgtcggccatccagccccaaatgtcgaacggcggcgagcccgcacagccacgccacagcgcgccgacaggctagccgcgcacgcccttcgcgccgaaccagcggcgacaggcgcggctgaagctcgttgcatccgtgtagccgagcgcggtcgccatctcgtcgcgcgactgcgtgccttccgcgagcatcgtccgcgcccgctcgcgcagcaccctgtcgagcagcgggcggaaggcgcagcccgcctccgccagccgccgcaccagcgtccgccgcgaggtgccgacgaggcgcgcggcatcctcctcagccagacgatgcggcagccgcgccgcgatcaggctctcgaccatccgcaccagcgccgcagcgtccgagcgtggcttctcgaccgcttcgagcgcttcgatcgccttggcgtgcaattccggatcggcaaacggcgacggccgcacgcacagcgcattcggcacgtcgaaggcgaaagcggccgcgtcgaacttcacggcgcaggaataatgctgcatgagccgctctgcgcccgcgggtggcggccacggaaagtgcagcgtcgcctggtcgatcgcatcctcgagcagctgcacatagacggcgtgcacgttgaggctcaccgccagcgccacggcgcgccacagcgcgccgtccataggcaccgctggagcgatctcaatctggatcgagcgcgcggtacggcgcaaccggttgcggatgaagggcgcgcgggtcgatccgaagcgcgcgccgatgttgagcgcatccgcgacggtcggcgccgtcctggtcgcgacatcgagcgccccttgcagcgatgtcgaccagaccgccgcggccgacaacggccacagctcgccatgcgcccgggtgatgttggcggcgaggagcaccagcgacgacaccggcatgtgtgcgccgggctggtcgagcgcgccctgctggattccggtccccttcagcagctcgtcgcgctcgctccgcgtcctgccgaacgcccgcaccagcgcccgcgcgtagctcgcggccaccggcgtgcgaagggcatccgcctccgatccctgcattgcgtcggcgccctccctggcgagcgtccggccaaatcgtttggcgcaaaatgccacaaatttggcctattgggaactggcggcgcagggccgcctcgcggcatccttgctgcaacaatggcgaacgccgcctcgaaagagctgctggagggaatgcgatgatcttcacgggcaccaatgccgccggcgaaaccatcacctacaaggacggcaagcgctatttgtggatgctctcgttcatcccgccgctgatcccgctgttctcctactggtggttcctgcagacgcacaatccgctggtcacgctgatccccttcgtcttcatcttcatcctgatcccgctgctcgatgtcgtctttggcgaggacacccacaatccgccggcggaagtcgtcgccgcaatggaggccgatccgtattatctgcggctcgcgcgcttcagcgtggtgtttccctgggtgaactacatcgcgctgattgctttcttcggcacccaggaactgccgtggtggtcctacgtggcgctgctactcggcgtcggcaccatcgacggcggcacgctgctggtcggacatgaactcggccacaagtcggacaggctcaacatcttgttcggcatgctcgccaattgcgcggtgggttacgcgcatttccgcatcgagcacaatcgcggccatcacacctgggtcgcaactcccgaggatcccgccagcgcgcgcttcggcgaatcgatctatgcgttcgcaacgcgcgagttgccgggtgccttcaagcgcggctggcgcaatgaggccgagcggctgacccgtcgcggcgagccggtctggtcggtcaacaacgaaatcctgcagggcttcgcgctgacgctcgtcgtggcagccattctgattgcggtgttcggctggaaggtcgcgccgttcatcgtcgcgcaccatttcctcggctggtacgcgctgacccaggccaattatgtcgagcactacggcctgttgcgcgaaaagctgccgaacggccgctaccaggcggtcgagccgcgccactcctggaacaccaaccacatcgtctcgaacctgatgacgttgcatctgcaacgtcactcggaccaccacgccaacccgatgcgcccctaccagtcattgcgcgatttcgacgacattccgcggttgccgaacggctacaccggcatgttcggactggctgcgatcccgccgctctggttccgcgtgatggatccgaagaccttggcctgggccggcggcgacaggagcaagctcaatctgggcgagcggccgcacaccgagcccggcatcgcaacgtcgtagctgacatcgcccggcttccgggcaggtggtggcggtccttacgcggaccgccgcttcatcgcgccgatgccgaggaaggcgccgttgacggacggatactggctggtgaactcgaacgtgtcgaagatgggcgcttcgaactgcttcagcgccgtccacagcagcgtcgtatccgggcaagcctgggaatggatgtcgtgatgcgcgatgatcctggcgtgtgagcgcaccagcagatgatccagcatcgcgccgcgcaggctgtgatccccgtcgatgaagacgaaatcgggcttcagctgctcgacatgcgccgcgaccagcggcgaggttgaatagtcctgcatgtagaccggctcgatgccgccctgctgctgcagcagatcgaaataggtcgagatgaacggcgtcggcgcgatcggatcgagcgcgatcactgtcttgaggtcggcaccgctggccctcagccactccgtcaccagaatgaacatgccgccccagcggcagccgatttccatgtaggaggaaatgccggtcgcgttgcgcgcaagccaggccagatacggcgcgagctggttcggatactgccagaggtgcagacccctgccgaaatacggcgcaagctccggcggctgctcacgcagcagctcgtcattgaggcccagcgcagggatgaactgccgttcgaggaattccacgtccaggcgttgagccggggtcagtgctgcgatgatgccgatcgcctcgcgaacaaacggcgcaagatcggcgaaacgctggtaccggtcggctggagcaaactgggcggtgagcatcggcgcaatcacacggacggctggagtgagacgcggagacccaagtcgtcgcgcctccgatgattgaacggataggacatccgtctcgggcgcaaaatctcgcaatcggcctcaaataatccgtcccgctggcacgtcccgttgccgggttgccttcacccactcgggatcttggcccgcaccgcctccacgccggcgtcggtgacgcggtatcggcggcccagttccgggacgatccagcccttctcgatcattccggcaatggtgctcgggccgacgcctgcgggaaacgaacggcggttgcggatcgcatcgatcgcgacccgctcgagatgggtcgcaacgtgcgacgggcgggcgcgaaacgccttggccatgatgagtacggacaacacctcggcgcgccgccgcacggccgacgcgctgcgggtcagttcgttgctgatctcgagtgcattcttgccggccctggcgagttctctgagcctttcgtcctcgtcagggctccagcgccgcacgatccccatctgcccctcaccgcctgaatacccacctcgaaccgatgcatacgcaggcagcgctgatttgccatgtgactttcggcacctcttgaggtgacgtcgagactgtcgccatcaagagggccgatcgtcgacgtttgtctcacttagtgcttgctgggttcgagcgtgacgagcacgccggtcggttcgggctcgtgcggccgcagcgaggtcagctccgggtcgctccagtcggcgaggctcaccacctcgccggtctgccccggcatgccggagctctgcgccggttcgaggaccttgagtccgctggtgtcgacgaagaatgtatgctcgccgaatacgctgttcagttgcgccacggcagaatgatcgtccggaagcacctgggcgttcaattgcgtcatggtctgtttgacttgcgtggcattcagcttcatccgctgctcctttgttggttccggccctggctgtttcctcggctggttcctccccgcccgcgcccctcgccggaggcttcaaggtctcgaaccgatcaggccacgaaacgttccgcacgcgcaacgcattgacccgtccgcgcggttccacacttgccgctgtacgaagtagcggagactatgtccgcgtgcgctccgccggccgcatgtggatcagcgcatcgagcacgaggacgagcacagggcgctgctcctcgttgacgagctcggtcttgaagatcaccacggcgtcgcgccgctccggcctgagggtgatcttctggatttcggattggccggtcagcgtgtctcccgggcggaccgggctcggaagacgaatttcaaaactccgcccgacgatacccgccaccttgctccagatcgcctccacgacgaggcgctgatagatcgccatggtgttgaagccgcttgcgatcagaccaccgaacggacccgccgccgccgcggcgcgatcggtatggatcggcaccggatcatattttgctgcgaacgccagaatctccgcttccccgatcgcgtaggtgccaagcttgaatgtctggccctcggtgagatcttccgcatacagcatcgcgcgcctccatctgccgcgcgacgatagccgaacgctgcgggctttccattacctccggggtcatgaacttcgcgcgcgaccgccctgcgcgaatccgagacgcgagcaggaccggccgcgcgcctttgagcgcgcatcccgcgctattgcagccgcgccgccctcgccttggcggccttcacggtgttctccatcaggcaggcgatcgtcatcgggccgacaccgcgcggcaccggcgtgatcgcaccggcgacctgcaacgcctcgtcgaacgagacatcgccgcacaccgcataaccgccgtccggcttctcgacgcgcgtggtcccgacgtcgatcacgatggcctgcggcttgatccagtcgccgcgcacgagcccggccttgcccaccgcgctgaccaggatatcggcctgccggcagatgctgctgatgccacgggtgtggacgtgggtctgcgtcacggtcgcctgctcctgcagcaacagcgcggccatcggcttgccgacgatgttggagctgccgatcaccacggcatgcgcgccggtgagatcggggcggatcgatttgatcagcctgagacagccgagcggcgtgcacggcaccagcgcatcgtcgccgtgaaaaagccggcccgcgttcagggcgtgcaggccgtcgacatcctttgcgggatcgaccgcggccatcacccgcagggcgtcgatatgcgccggcagcggcagctggatcaggatgccgtcgatgtcgtcgcgcccgttgagcgccacgatccgggcaagcagatcggcctcgctggcgtcgtccggcaggcgctcgacctcgccgcgcaggccaagccgctcggccatcctgaccttgctctgcacgtagatctggctcgccgcgtcacagccaaccagcacgaccgcaagccccggcgcgcggggcagtcggtccagttcactcgcaaccttgtcgatgacaatttgggcatgcgcatgcccatcaagaatgttcgccgtcatggcacctccgtttcgaagcggtgcccaggcgcgcggcgttcagtctctgcgctccccgatggtggtccatccaagcgccagtcgcgcagatggcgccgtcatagccgtccggcccggcaaaggcaaatcacgctcggttgcggccggaccggcgacgaattgcccctgttcttgccagtggatcggcggcgggcggggcgtccctgggggtaggattcgggcaaaacttgcgataagcctcggcgcttgccgggcttttccgatccccggcgccatcccttccggtcatcacgccatttcggacattttcaacatgagacatatcatcttcgcgctggcgctcctctgcccggcagccgcgcttgcccaaggcaccactccagccaccacgccacccgctgccgccgacaagccggcgggcgcgcagccgatggtgggcgacaagccgctggtccaggtcggcaagaagtcagccggcaagaagggcgagaaggctgccacgcccggtaagccgcaatcggccgcgcagaagcttcaggcctgccaggacatcgacgacgccaccaaggagcggttgatgtgctacgatgagatcttcaagccgcagcccaagccgaaggccgcccccgccaagggcgtcaacgaatgccggttcgtaaaggaagaggacgagcggctgacctgctacaacggcttcgccgacaagattccgcgcctgccgcgctaacccgcctgatcatgcggacatgaaaaagccgccgcaagcatttgcgacggcatatcggttgccggctgcggccctaccaggtgccgaaaccgccaaagaagcccatgcgcggctgctgctgtgcaacgcggtaaggctgatacgtgccgggctgcgccagccgcatcggctgctggggatgggcatggtaacgcgcaaccttgtgcttcttcgccgcctgcggctgggcctgcgccggctgctcggctggcttagcgtcggctacgactgcgcccttgcgcgcgtcagccttctccggcggaatgaactgggcgaaggtgtcgcggacgcgggcctgtgccgaggcgtcgccggcagccgccgggctcgtcgcggcgaccgcgttgacctgcgccggaacgatggtcggcaggttggtatcgtagaccacccgctcaggcagcttttgggtcgacctgatccggaccatggtcttgtcgacgcccggcgatgagatggtctggctttggccgggaactacggcctcctgcggcacaatggcgttgacgacgaagagcagcgcgagcagcactccaccaacgaacaggaaataacgcgccacaggcatcttggtagctccccccgcgccacgggcgcggttcatctcggcgcgacgacatcagtcatcgcgcgggcgaattcatcgtctgcgcatgattacccggacagtcgccatcccgcgcttccgggccgttcactaacggtcggcttactagttagttcctgcctggccgttacggttcacccggcaagtcaattcccggtcactttttcgggatgcagggtttaggcgcggctggcggtcacgacggagcatttcgccttgtttgcgttaacatttacgaacccgattaacatctgcgagtaggtcttccggctcttcatggcgatggtgtccgggatgagccgcttgcgctcggtcatagggctgccgtcgcggcggatgaaggcgcaggcgatctcgatatccttgaccgcgaaatcgttggcgttgcgcagtgtcagcgtgaccagcatcttcgaacccagcccgccgcggcgccacgattgcgaggcgatccgcaccctgttcagcggcgatcgttcggcgcccgggccgggctgcctcaactcctcggccggctgcggggcagcggccatgccgaccgtggccggctcatcggccggtacggccagcccctctcttgcggcctgggcgggctgcgccccggtcggcacatcctgtgcggtgcggatggtggctgaaggcaccggccagatgtcttgatctccgccgtcgctcggctcggggagcatgaaccaggcgacaattccggcgatggcgatcagcgacagcagcatgctggcgtagaagcggccgtcagcgagacgtccggccgcaacatgtcgaaacgacgccaaaccgatccgcatcgtcgtgccctcaccctcgacgctcgatcaagccgccccatcgccgcaggcggcatccaggacggccgcaggtcgagcggccacgcgagaacaatcgccgccggacggaatggtttcataccggtacgacaatcttgcgacgtactgcacggagtggcatcagggctggccgctcgctagatttgcgctgcacgggagcgagtgccgcgcacccgagcggcgcgagaacaacaaggagatcgcaatgcccgtcgtcgtcacgtgggaccacgtccatctgcgcagtcccgatcccgaagccacagcgacctggctgcgcgacattctcggcggcgagatcgtccgcggccccggccgcatcgacgtccaactcggcggcgccagggttttcattgcggaggtgacgcaaggcgacggcgtcaatgccccgccggtgacgccctatcaggggctcgatcatttcgggctgtcggtgaaggacatcgacgcggtcgcggccgagatcaaggccaagggcgtcgagttcaccaaggagccgaccacgatccgccccggcgtacggatctgcttcatccgcggcccgcagggcatctcgatcgaactgctcgagcgcgacaagaagtacgtgtgagcgacgattgcctcgctacgtcatgctacccggcatgaaacagcggatcgtcacgcccatgtagctcttgatcggccacaccatcgcgcggccggcccggttgggctcggtgaccacggcctcgtcgggcacgtcaatccacgtcccgtcgaggcgcacgcgatagtgtccgttcttcgattcccaatcgacatcgctgaccgcactgccgtcggcatccgagcagcacggccccttgccgctacgcagaccgtcgaaccattccttcagcggcgaattggcgtagcggccgtcaggatcacgcgcctgtgcaagctgcgcagcggcgaccgacgtaagcgcgaccagaccaagcgacagaaacactctcatgcggccgcgacgacggtcaaccaaggttccgggcaagattctgggctcgtcgttccggcctgccaagcggccgccagcttccaacctgtctgtcatgtatgttgctccagcactcaccggccagtgcaaccagagccatgcatttcgcgggccagttcgattcgcgcgcacggtccgctgtcatcgcgccgtcacaccgcctggcaggaaccgagggttcacggcttctccggacccccccccccggaatcaacctgccgcattgcacgaggttgctcgctttggcataaaaaaccaatccggattgctgcgggcgcggcagccggtccaatggaacgttatgaagaacgggctgtactcaatccacgtcaccctgctggacggacgcgtcggcaagggcagcggggtgattctcttccgcgacgggcagattctcggcggcgacggctatctctattacaccggcagctacacggtgaaaggtgacgcgttcaagggcgagatcctcgtgcaacgccacaccacgccgcgcgacaccgataatccgttgttcggcggacccgcgccggtcggcatcggcgtctccggcaccttcactgacacccgcggcaccatgagtggaaccgcgctggtcggcaaggcgagcctgatcttcggcgcaacgctgcacaagctcgcggatatcaattagcggttcggcagtcgcagcacggttcccgtcattgcgaggagcgaagcgacgaagcaatccatcgctcggcatgggaaagacaatggattgcttcgcttcgctcgcaatgatgccgggcgccagcaggccacgaccctcagcgcgctcggctcggcgcgtgcggctgccggcgtgctcgcattcgtgatcggcggagtgtttggaacctatatcggctggcggcctgcgttcggaatcctgatcgcggtgtcggcgatcgtcttcctgctgagctttcgcttgaagccggaccgcggccgccccgacatcgagattgatctggttggcgtcgccctcgccgccggcgcgatcattctgatcagcttcggattcaacaatctcatcggctgggggctggcgctcgcccgtcccaacgcgccgttcgatctcttgggcgtttcgccggcgccgatcatgatcgtgatcggcatcgtgctcggacaggcatttctaagctggacgcaccggcagcaggccgcgggaaaaactccgctgctggcactggaggtgatcgactcgcctgaggagcgctgcgcggtctatgcgctgttcacggtggtcgcgctggaggctgcactgaacttcacggtgccgctctacatccagatcgtgcagggacgctcgccgatcgccacagcgatcgcgatgatgccgttcaacctcacggtcttcttctcggcgatgctgatcgtcaatctctacgacagattgacaccgcgtcagatcggacgtttcggctttgcgctctgcaccatcgcgctgctgtggctcgccttcgtcgtgcgcaacgactggagcgagattcccgttctttttggtctcgtcctgttcggcatcggccagggctccctggtgacgctgctgttcaacgtcctggtgacggcctcgcccaaggtgcttgcgggggacgtcgggtccttgcgcggaaccacgcaaaacctcgcggccgcggtaggtacggcggtcgccggcgcacttctcgttggtctgctgagcaccatcgccctcggcaagatcacggccagcccggtgctgacgaaggagctgcaaagccaggtcgacctcgacaacatcactttcgtcagcaatgaccggctgcgcagcgtgctcgaagccacgagcggcacgccacagcaggtcgaggaagcggtccgggtcaacaccgaagctcggctgcgggcgctgaagatcgggctgttgatcatggccgggctcgccctcctcgcggtcattccggcagggcagctgccgaactaccggccgggagagattccggatgacaacgcggcaggccaccgcgaacgaaccagctgatccacgccggcctggccggcaaatccatgcgcatcacctgctggagcaagacaacgacgtcccggcaacaacggaaggagcaagccatgcatgacatcgatcgccggacggcactgcggagcatgctcggcggtgtcgttgccgcaggcctcggtacaagcctgttggcggagagcgcgaaggcgctgccgctggcgctggaaaaggacctcgccgccggggcagacgatgccgggccgcccgttcatagggttgctaccagccggcgaccgcggccacggccgccaccgcgaccaccgcgccgccgccattggcatcgccggcgacgctggtcctgctggtggcatcgcggccgtcgtcgctgcgggtggcgctggtgatcccaggcgcgactccctgctccgctcgaacggcacggatcgcggcgccggccaatccgccacgcgttttctggccgggaattgaggaagataacatggcgacggcgcctgcctactccgcggcctgctccagcggggcgacgcgcggcaggatcatctggatgcgcgtgccgttgcccggcgcggattcgagcgagagccggccgccgagccgggtggtgacgatgctgtagacgatgtgcagcccgagcccggtgccaccctggtcgcgccgcgtcgtgaagaacggatcgaacgcgcggcggcggacgtcgaggctcatgccgcagccattgtctgcgaagatcacctcgacattgtcgccgcctgcggcacgaacctggatctcgacctcgccgggcttgccgtccgggaacgcgtgcgcgaccgcattgaggaacagattggtcagcacctggccatacggtccgggataggaattcatgatcaggttgggctcgcaatcgacgttgagcgtcagattgtgcttgcgcaggccgggccgcaggctcatcaccacctgctcggtgagatcgccgagatcgaaggtgcgctggtcggaatagttgcggtcggcggcgacctgcttgaacgactggatcagctccgcggcgcggttcagattggcgacgagctgcgacgacgcatcccgcgccgtgttcaggaaatcgttgaggctggagcggcgcaggtcgccgcgctcgacctgggcctcgaagttcgcggtcttgcgctccagtgcggatgccaccgtcaggctgatgccgacgggattgttgacctcatgtgcgaccccggccaccaggcggccgagcgcggcgagtttctcggcctcgatcagcgagttctgggtttcccgcaggttgcgcagcgccgcctcggcggaatccctcgccttgcgcatctcctgctcggaccgcttgcgctcgccgatgtcgagcgccaccgtgacgatgttctcgatctcgccctgcgcatcgaggatcggcagcttgttgaccagccattgccgcatgttgcctgcggcgtccttgtactcttcctcatagaagccgagctcgcgccgcgccgacaacacgcgcttgtcgttctcgtcggtcttggcggcgccgtagcgctgcatcagctcggcggtggtctggccgatcgcatcctgcggctcgatgccgaatatccccgccatgtagcggttcatcagcacgtagcgaagattgcgctccttgacgttgatgacggcgggcaccgtgtcgatcaccatctgcagcagccggcggccctcggcgatggcatcttcggcgcgcttctggtcggtgatgtcacgcaccgtgccctcgtagcggaccacctcgccctcgtcgttgcgcacgacggtcgcggaatcggacagccaaagcaccgtgccgtcacgcgagcgcacctgatattcgtagtcacgcaccgtgccgtcgcgcgccatcaatttctggtactgctcccgcgccgccggatcgacatagaccgtggaggcgatgtcgccgatgccgttgatcaggtcctgcggcgtggcataacccatcatccgcgccagcgccgggttggcgttgagcagcgtgccgcccggcgtcgtgacgtagatcccgtcgacggatgcctcgaacagcttgtgatagctctcctcggcgagccgctgctcggcgagcgcgcgcagagcggcctcgcgcgcgctgtcggcgtcgaccagggtctggcggaacacctcggcggcgcgcgcgatgtcgccgatctcgttgtcgaggtcggcgccgggaatgaacgcgctcttctcgccgcccgcgaccttgcggatcgagccggcgatccgggccagcgggcggacggtgcggcgcaccaccagcaccgacgcgaacaggccgatcagcacgcccgcggtgccgagcacgatgctctgccatttcgcttcagccaatgtccgcgcaaaatcgcgcgacagcacatggccgcggcgcgagctgagctcccgcaacagctcggtgaccttctgaatcaacacgccttcggcgccgagcacttcgcggtcgatgtcggcgatctggccctcgcgcaccgagatcgcgctgatcgcctcggcatagttgtcgacggcactgcgcagggcgggatcggcgatggtcatcgcccgcatgctttgcgcagcctgctcggcggccgacgtgttgtgcgccagcaatgcggtggcgatgcggctctgaatctgcgacagcgtgttcgcaagcgtggcgtcgttgctctcgacgaccgccttgtcgaacgcgtcgcgcagcggcggcagtccggcgacgatctcggcgcggcggctgagcagggccgagattcgctcgatcccgctgcgataggtcgccagccgctgggtgacgccgtcgatcatgtcctgctgctcgggcgccagttcgatccgggttttcttcagaatctcgctcagcgactgggccgcctgcgcgacctgggccgactgggtgccgggctcggtgacgaaatcccgcgccgccagccgcagctcgttggtgcgccggtcgatgtcctcggcgatgtcgccgacgctttgcagccgttgcagctcggcaaaggtcgtatcgatgtgccgaatcgcgatcacgctggccgtggacgtgatgatgatcacagccaggaccagcaggaagctgccgaacgtgagctggccaatcgagagggagaacgcacgcggcgcttgcgaattcggcggcgattcagcggtcatgtcatcaaggccggggatccaatgcgccccaatatacgggaagttacgggctttggggaaacatgctgagggggcccgggccggccggcggtgtgaccggtgtcaccctgttaaccacccgcggccgattccggccccaccgtcgcgtcaggtgcggcgacggcctcaggccgtgccggtccttcgcggtggaatggtcatcgcggcgacgccgatcaccacgcaggcgagcccgatccacgccgtcgggccgagccgctcccccaaaaatgcaacgctgagcgcaaccccgatcggcactcgcagataggcctgcgcggtggtgccgaccgagccgagggtctggatcaggcggaagtagatcacgaaggcgatcgccgtcgagaacaccgcaagcgccagcagggcgagcagcgaactggtcgacggcgccagcgtccagggccgttcgacggcgaggctgagcgggagaaggatcgcagcacccgcgatcagcgagcccgccgccggcgccatcggatcgagccccttgaagccgcggctgaagatcgccgcgcaggcgtagcagatggtggcggcgacgatcgcgacctcggccacgatgccctgcccgagatcgcggaaggcatcgacgccgacgatcaggcagatgccggccatccctgatatcaccccgaacagcttgcgcgggctcgcggcctcatggcgggtgatcgcgacggtgaacaggaaggtgaagatgggcgaagccgaattgagaatggtggcgagcccggcatcgacgaagcgttcgccccaggcaatcagcgtccacgggatcacgctgttgaggcaggcctggaagatgaagcggcgccaggtcggaccgtccgtcgacatggttacgccgcgcatccgcatgatgacgacgagcagcaggcctgcgatcgcggtgcgcgccgcgatcagtgtgatcggcgggatggtggccacgccgagcttgatgaaggtgtaggagccgccccagagcgtggcgagcgccagcagcaaggcgagctcgaaggccatgttgggctggcgtggagtggtggtcatcgcctgaggattccgtcttggtggtgagacggaatctacagcgccggaggtattgatacttcgatacaggccgaaatgtggagacgcgtttctcgattgtcgtcccggctttcgccgagacgacatcgaatgggtctggccgtccgcgatctctcgagcgggcgcctaccccatcgcgccgacgtcgaacacctcgccgtcgtagcccgcttccttggggatgcggagctggcggccggtggcggtcttggtcatgacgggggtcacggtcacgatcgacattttcttggcgtcatcaagcgcagcgtcgacattcggctgcttgccgagccggatcagattgcgggtggtcgggaacggcagcttgaagcggccgctctcgccaccctcgagcgcctcgcgcgtcgatacccagatcgaatcggtcgattccttgccgtcatgcgcaccgagctgttcgggcggcgccgcggccaggaagaaccaggtgtcgaaacgcttcggcatgccctccggcgtgatccaatgcgcgtagggcacgagttcatcgagcgcgagcaccatgccgttgtcggtgagcaccttgaggaagctgatcttgccttcgttcagcgccgtacgatgcgcggtcgcgatctcgttcgcacgcctggcatcgaccagatccttcgacccccgcggccgcgccagcaggatgccgctctcttcaaacgtctcgcggatcgcagcgatccggaaacccagcgcgtcgccgtcgagcccgtccccgcccgaatagagcgcggggttggcggcgatctccttgtcgttcttgtcgacgctgccgccggggaacaccagtgcgcccgagttgaactcgatctggtgatggcggaccatcatgaagacttctatgtcgctgctgctgccgtcacggagcagcaacacggtcgaggcaaggcgcggggcaacgatctcgatcatcacttagcctgcagcactggattgcggttgcagattggcgcggcggtcgacgcgtgccacgcgggagagcagatagtcgacctcggccctcgcctgcggcgtgatcaccgcacccggcttgcgctgggcgctggacgagatgatgccgcgcttctgcagcacgtatttgcgcacggtgagaccgacgcccggctgctgctcgtagcggatcagcggcagatgcgcgtcgaacaggtcgtgcgccgcgtcacgcttgcccgccttcgacagattgacgacgtcgatcaacagttcggggaaagcgtagcccgtcatcgcgccgtcggcgccgcgctccatctcgaaatcgaggaacaggccgccattgccgaccaggatcgacagcggccgcagcgagccgtccttctggaagttgcgcagcgtcgagatcttctccaggcccggccagtcctcgtgcttgagcatcacgcaggatggcgagtccatcacgatcttgcggatcacggcgggcgtgaattggacggtcaaggtcagcggatagtcctgcagcacccagggaatgtcgtcgccgaccgcttcctgcgcctgcttgaaatagccaatgatctggtcgtcggtgcgcagatgcggcggcggcgcgatcatgacgccagcggcgcccgcatccatcgacttcctggccagcgagcgcatcgtggcgaagcccggcgccgagacgccgacgatcacctgcagcttcttggcgcgcttgacgaagcgcagcgcgacctgctccgcctcggcggcatcgagcttcggcgcctcgcccagaatgcccagcaccgtgacgccgtcgcagccgacctcggtgtagaaatcggtcagccggtcgatcgatgcctcgtcgatgcggccgtcgtcgtggaacggggtcggcgcgatcgcaaaggttcctgcggcctgggcggtgagcttggtcatgggtgcctcgtctgtttcccccctctatacagggtcattccgggatgcgccacttggcgcaggcccggaatccatactcacgatcgtggttatggattccgggctcacgcttcgcgtgccccggaatgacgagggtcagaaccgtcgcgcgcccatcttgatctgctcctcggagaagaagatctccttggcgtgggtggcgatatcttcggccttccagccggtaaagggcggcttccagccctccatttccatcatccgcatctcgcggacgccgcgcgggccggagacgccgagcaccttgccggtttggtcgcccgacagatcgctgaccatgtagagcacggccggcgcgatgccgtccggaccgagcgccgcgccagggttctccttgtagcggggcaggtccgcggtcatgcgggtcagcgcgcccggcgccagcgtccagatccggatgttgtacttgcggccctcgatcgccagcacgtttgagaggccccagatgccgcccttggccgcgccgtaattggtctggccgaaattgccgatcaggcccgaggtcgaggaggtgttgacgatgacgccgccgccattgtcgcgcatccatttgaataccggctgggtgcagcagaaggtgcccttcagatgcaccttcatcaccctgtcccagttggcttccttggccttgtggaaggtctcgtcgagcaggatgccggcgttgttgaccaggatgtctgcgcggccgaaatgcttgatggcatcgtcgaacaccgactggccgccggccatcgtcgagatgtcggcaccgttggcgacggcgcggccgccctcggccttgatcgcgtcgaccaccttgtcggccatcgacttgtcggagcccgagccgtcacgcgggccgccgagatcgttgaccacgacggccgcgccctcgcgcgcgaacagttttgcgtaggcctcacccagtccgccgcccgcacctgtgatcagcgccaccttgccgtcgagtaatcccatggttgtttctccgttgtgttctttcttcttcacctctccccgcgaagagcggggcgagggagacgccggccgtcgcggctacgccagcaccgtcttgccgctcttgatcacggtgacgccgcgcgatttcaccttggcctcgaacgacaccacgttgccgtccttccacagctccatggtcacggtctcaccgggaaacaccggcgaggagaaccgggccgcgtgctgcttgaaggccgacggatcatagtccgcataggtctgcagcacgccgcggcaggtgatgccgtaggtgcacatgccgtgcaggatcggccgcgggaagccggccttcttggcgaattccggatcggagtgcagcggattgcggtcgccgcagagccggtagatcagcgcctggtcgggccgcgtggtgatgtcgaccaccttgtccggcgcacgctccggcaccttgtgcggctcgggctggccgtccgatggtccgccgaagccgccatcgccgcgggcgaagcgcgaggcgaccagcgttgcgagtttgtcgcccttctcatccctaagcacggtctggtggcggatcaccgcgcccttgtccttgcccttgtcgaacacgtcgagcacggtcgagtcggccgtgatgtgggccgcggtcgcgaacggcttgtggaaggtgatgtcgcgctcaccgtcgaccaccatcacgcggttgaggttcatctcaccgggaccggcgccccatgctgcgaccgacgcgaatgtcggcaccaccttgagcggacgcggcgtcagcacgccctcattgacgaaggcgagctccttctcgtccatcggatcggcgccgaggccgatgccataggcatagagcatcacgtcgcggtcgccgtagctgtatttctggccgagattcttcagggccatcagctgttcgtacacgattggcattgttgttttctccccgaatccattttttcaactgcgctgcgggttgatgcgccctctccccgtgcgggagagggctacaccgttggcgcaacaaactctcttgggagaggggtcgcctccacagagagattcgatccgtggagagacacccctcttccggcagctgcgctgccagcttcccccgcaaggggggaaggtactttctaggccggcgtgaagaacggcagcggagcgccgtcggtcggcttccagaccaccttgaccttctggccgatcttcaccgtctccagatcgcaatcgacgatgttggtctgcagcgacgggccttccttcagcgtcacataggcgatcgcatagggaccggtcggcgacttccgcatcaggctgtaggtgtagaccgtggcctcgccgctcgactcttcccacaccgtcttgtcggagaagcagaacgggcagatcgcgcgcgggaagtaatgcgcttcgccgcaggtggtgcagcgcttgatcatgaacttgcccgccttcgccgcttcccagaacggcgcggtctccggattggtcaccggggcattgtacttcttggcttcagacatcacgcacgctccaggatacaggttgaggcggcgtggcgaacgccgagcaggccgccggtgccatgggcgatcgcgaggtcgcagttcttcacctgcaccttcggatgcgcctcgccgcgcagctggcggacggcctcgaggatcttggtcatgccgccgcggttgacgggatggttgctgcacagcccgccgccgtcggtgttgaacggcagcttgccgacacccgagatcaggttgccgtcggcgacgaacttgccgccctcgcccttcttgcagaagccgaggtcttcgagctgcatcagcaccgtgatggtgaagctgtcgtagatcgaagcgtatttaatgtccttcggcgtcacgcccgcctcttcgaaggcgcgcggaccggaccacacgccggccgaataggtcaggtcgagatccttgccgccgcgcggccccttcgccgcctcgccatgaccgatcagccgcaccagcggcttcttcaggctcttggcgatctccggtgtggtgacgatcatcgcgccgccaccgtcggtgaccacgcagcaatccatccggtgcagcggatccgagatcatcggcgagttcaacacgtcttcgacggtgacgacctccttcagcatcgcatgcggattgtattgcgcgtgatgcgaggccgcgaccttgatccaggcgagctgctcggaggtggtgccgtagtcgtgcatatggcgcatggcacacatgccataggcattgtgcgtggtagccccgtaagccaattcgaaatcggcctcggcgccggaggcgcgcggcggcatcggaccggtgcgcggcttgcccgccagcgtgaccagcgcgaccgagcacttgcccgcggcgatcgcctcggcggcgtggccgagatggatcagataggaacagccaccggtctcggtggaatcgacgtggcgcagcttcctggtgttgaggccgagatagtcgaccatcggccaaagtccgcccggcgcatcgccggcgcagaaatagccgtcgatgtcgtccttggtgagcccggcatcctcgatcgcgcccttggcgacctcggcgtgaagctgtgctgttgatttatcgggtgcatgccgggtgggatgctcgtagatcccggcaatgtaggccttgcccttgatggtcaaatcgctctccgctggcgtttttcgctccagcgtttttctgaaccgacgacgcgaccttggcaagcgcggaaatattccgtcaggcgagactgcaattgacgcgcgatatgcgcgccccaagaacagtcgtcgtcccggcgaaagccgggacccacagggatgtagtggttagaacgcgctatggccccagcagtaggcaacaacaaacttcagtgtttatgggtcccggccttcgccgggacgacatccgatatgcggcaacactactccgccgccatctgccgcggcgcgggcggcgggttggcgaggtcggcggcgagttgcgcgtagcgaacctttgcctccttgaccgccttgtccttcaccggaccgtagccgcggatgcgctccggcagcgacagcaactcgaccgcgatgtcgtgattgagcggcgacagcaggttcagcacggtggcgacatccttctcgtatcccccgatcagatcacgttcgagcttgcggtcggcgctgtagccgaagatgtcgagcggcgttccgcgcaagaagcggaagcgggccatcaccttgaaggccgacatcatccacgacccgaaggcgcgcttcttcggtcggccctgggcgtcgagcccgccgccgaggatcggcggcgcgagattgaagttgaacttgaactcgccctcgaactgatcgcgcagctgcttctcgaagcggccatcggtgaacagccgcgccacctcgtactcgtccttgtaggcgagcagcttggcgtagttgatcgcaaccgcgcgcggcagcgcctcgccgtagccgcccttgacggcggcatcgcgcacctggtcgaccagcttgcgatagcgcttggccaaccgtccgttctgatagtcagtcagaaggctcatgcgatgggtgatgatctcgtcgagcgacatcgcatccagcgacttgacgggtgctgcgtcgtcatcctgccccttcatcatcgcagcgagccgcgccggatcggcggcagcgagccgcccgagctggaacgcctgcgtgttcatcttgatcgagacgccgttgacctcgatcgcctgctggatcgattccgcagacagcggcagcaagccgcgctgataggcaaagcccatcatcatgatgttggtggcgatggagtcgccgagcagcgcttcggccggcttggtgaagtcgaagaacgcggagtccttgcgcaactcggtctccagcacgccggtgaccttgcgggtctggaagttgaagtcacggttgaggatgaagtccgcggtcgggatgatgtggctgttgatgatgccgacggtacggctcgcctcgcacagcgtgatggtgtccttcgacaccgcgacgacctcgtcggccgcgagcaccagatcggcggtgccggtcacgatgcgcgagcaggtcacgtcggcggtgtgctcggagagccggacatggctcagcaccgcgccgcccttctgcgcgaggccggacatgtcgaggatcatcgaggccttgccctcgatatgcgcggccatgccgagcagcgcgccgatcgtcagcacgccggtgccgccgacaccgccgaccgcaatgttgtagggccggtcgagcgcgggcttcgaggccggctccggcaaggcgccgatatcgccgagttcagtgggcgcgcggcgcttgagggtgccgccgtcgaccgtgacgaaggacgggcagaaacccttcacacaggaatagtccttgttgcaggtcgactggttgatggtgcgcttgcgccccagttcggtctccagcggctcgaccgagatgcagttcgactgtaccgagcagtcgccgcagccttcgcagacggcaggattgatcagcacgcggcgcgccgggtcctccatcaggccgcgcttgcggcggcggcgcttttcggcggcgcaggtctgcacgaacacgatcgccgaggtgcccttggtgtcgcggcacatcttctggacattctcgagctcgtcgcgatggaacagcttgacgccgggcgcgatcgtatcggccggataggcgtcgggattttccgagaccagatagatttcgcggatgccttcggcgtggagctggaaggtgatctgctgcggcgacaaatcgccatcgtggcgctgcccgccggtcatcgcgacggcatcgttgtagaggatcttgtaggtgatgttggccttggaggcgatcgactggcggatcgcgagaatgccggaatggaaataggtgccgtcgccgagattggcgaagatgtggttctcgttggtgaagggcgcgatgccgacccacggcacgccctcgccgcccatatgggtgaaggtctcggtcgagcggttcatccacagcgccatgaagtggcagccgatgccgccgagcgcgcggctgccttccggcaccttggtcgaggtgttgtgcgggcagcccgagcagaaatatggcgtgcggctgaccggtgccgtcgcctgcatatggctcgactggcggccgttgaaccagtccgccttggcgcggagcatctcggcgatttcaggattgagattaagtcgaagcagccgttcggtgagcgagctcgccagcgaggcgacgctgagctcggcggcgaaggtcaggaagcgtttgtcgtgatcgtccattttgccgacgatgcgcgggcgcacgtcgtcgcgccagttaaacagctcctgcttgacctggttctcgacgatctcgcggcgctcctcgacgatgaagatctcctcgaggccgacggcgaagttgcgcacgccttccggctccagcggccagggcatgccgatcttgtaaaggcggaggccgatcttggccgcgatctcgggcgtgatgccgagctcgcgcaacgcctggcggatgtcctcatagctcttgccggaggccatgatgccgtagcgcgcgttcggcgaatccatcgtgatgcggttgaccttgttggcgcgggcaaaggcgatcgcggcaaagcccttgtagtcctgcaaccggcggtcctgctcgaaacggtcgtcgggccagcggatgttgagcccacccggcggcagctcgaaatcggtcgggatgatgaacggcgtcatctcgtcggtgaggtcgatctcggccgtggtctcgaccgtctcggtgatcaccttcatgccgacccagcagcccgagtagcgcgacatcgcgatccccaggaggcccatctcgatcatttcatggatgctggaggggtagaggtagggcatcagcgctgagatgaaggcgtggtcggactgatgcgggacggtggaggattttgcgccgtgatcgtcgccggcgagacagagcacgccgccatgcttggcggagcctgccgcgttgccgtggcggaatacatcgccgcagcggtcgacgccggggcccttgccgtaccagatgccgaccgcgccatcatatttggcaccggccgacagcccgagctgctgcgaaccccagatcgcggtagcagccaagtcctcgttcacgccgggctggaatttgatgttgtactgctcgagatgcttgcgggcggcgaacaactgctggtcatagccgccgaggggggaaccgcgatagccggagatgaagcccgccgtgttgaggcctgcggcgcggtcgcgcctgatctgcgccatcggcaggcggaccagcgcctgaatgccggtcatgaagacgtggccggtgccttgggtgtatttctggtcgaggctgataggcccttggttgattcccatttagccctctttgcgctggtcgcgacggctgctttttagctagtcatccgagcttgttagaaccagtctatgtcggattttccggcccgcgcagcacaattctgggcgaccaaccccgtcgcccgaaaatcgcaatatcgtgccgggaatatcgcagcgccgtttcggtttctgtcgcaggacaggcccgcggcgaaatggcgtaacgcgtcttgtggaccggaagatgcggaaggtgaatggatgcggcgacgacatcgaacggccggtgcgattctggtcacagcgctgttgtgcagtgcgttcgcggcccgcgaatgcgccgctgcgccaaccgatgacatcattgcccgcggcaaggcgctcacgatcgccagcgactgcgcaagctgccacaccgccgatccggcaaagccgttcgccggcggcaagcggatcgacacgccgttcggtgcggtgttttcgccaaacctcacacccgaccacgataccgggatcggcggctggagcgaggacgatttcctccgcgcgctgcggatggggatctcgccaagcggggcgcactattatccggccttcccttacccctctttcacgaaattgatccgcgacgacatcctggcgatccgtgcctatctcgcgacgcttccgccggtcagcaacagaccgccgccgccgcagctgcgctggccgctgaactatcgcgtgctgatgcgcgcctggaacgcgctgttcttcacgcctggtatcatccagccggaccagagcaagggcgcggactggaatcgcggccgctatctggtcgaggcgctcggccattgcggcgcctgccacacgccgaagaatgccttcggtgccgacaagcgcgatcacgcctacgcgggcagcatggtgcagggcatgttcgcgccgaggctcgacggcgccgaacgcagcgggctgaaatcatggagcgccgctgacatcgtcgaatacctgcagagcggccgcaaccggcacagccatgccggccccctgatgtcggaggtggtggtcaattcgacctcgaagatgagcgacgccgacgtgcgcgccattgcggtctatctgaagagcctgcccgccggcgcgccggagccgcaggttagcacacccgcgccggcgcaaatgagcaacggcgagcggatctatcgcggcgcctgcgtcgcctgccatgaactcgacggctccggtagcccacggatctatccgccgctgcccggcaatgccaatctgcaatcggccaatccggcgagcacgctgcgcatcatcctcgatggcgcgcagaccctgaccacgccgcgcgcgcccaacgccggttcgatgccggcctacccgaaactgaccgaccaggaggtcgccgatgtcgcgacctatatccgcaattcctggggcaatgcggcgccggccgtgacggtcgacgaggtcgccaaagcgcgcgcagcgaagtgaaggcacgggcggcaaggtagcgcctcaccgctcctcgccagagaacacgaatttcggcatctcccatttgtagcggatcgcgagcatccggaagctcaggccgagcacgaaggtcagcagggtccagaccggaggattgaggttcagcccgaacgcggtggcatagaacagccccgtcaccaccgagacgctggcgtagagctcgctgcggaacagcagcggcacctcgttgcagaggatgtcgcgcaacacgccgccggcgcagccggtgatcatgccggagacgatcacgatcggcagcgaggcgtcgacctgccaggctacgtcgcagccggccatggtgaacaccacgagcccgatcgcatcgagcaccaggaaggcgagatttagcctgaccaccagtcgcgccagcaggatggtggcgaaggcgccggccgccgcgaccgcaaggtagatcgggttcgcgacccagagcagcggataatgcccgagcagcacgtcgcggatggtgccgccgccgagcgccgtgatcgcgcccagcatgcagacgcccgcccaatccatgctgcgtcggccggccgccagcgccgccgtcatcgattgcgccgcaaccgcgatgaacgagagcacgtgcagcaccgaatcggtgggcggcatggtccacattgaaaaggcctcatggaacaggttcggaaccaggaatcagcggttcctgcatgaacaggttgcaacattggcgcggaacatcccgacgcaccagccattgtcccctgcgtttagctttggggtgctaacggaggaactttgcaatggcctacaaccctgacgatccgtatcacgccaacctgaccgatgacgaaatccgccgtcaggcgcgcttcaacagcctggacaacgagttgcagcccgatccggaactgcaggagggaccggccagcggcaccaaggtcgcgatgttcgcagttgcggtggccgtagtgctcggcgcgctgttctacgggttgaacaatacgtcagtccacgaggcgggcacgacgccgtcaacgcagaccgcgcagcaacagcccgccaatccggccggggcgcccccgggcatgcgcgacgtgacgccgaagccgaacagccagccgggcgtgaccacgggcgcggcgccggcgcagccggccagcccgccgccggacatgaacaagtctgacatgaacaagcccgccgccccgccggccgggacttcgaagcaataaccgacgacattgaccaggcgcgagcagcgggcccaaacggcccgctgcttttttgtacgctagatctacttgaacatcttgttgagctcgccgccgggatagccgttggcgaactccgtgaaggtgcccttctccgccatttccttcgccgccttcatgacgccgctccaggccatccgcgccaacgcgccgccgacgctgatccgccgcacgccgagatcgccgaccgcttgcagcgtcagctcggacgcgccgccgatcaggaggttgaccggcttcggcgccaccgccttcacgaccgcggaaatctcctctctggttgagatgccgggcgcgtacaggacatccgccccggcttccgaataggcctgcagccgctcgatcaccagattgaggtccttcttgccccacaggaacgcctcgcaacggccggtcagcagcgcgccgctgttgtcggcgtcgattgccttgcgcgcagccctgatgcgttcgaccgcgagcttgtgctcgaagagcacgttggccgcatcgccggtggagtcctcgatcgagagcccggcgacgccggtcttgacgccgcgcgcgacattgatcgcaacctgctccggctcgacggcgaagccgccctcgaaatccgcgttgacgggaatatcgaccgccgcacagatcgcggtcaggtgatcgcagacgtcatcgacggtgacgcggttgtcggccttggcgatggtccaggcgaagcccgcgctggtcgaggccaacgccttgaagccgagatgttgcagcgcgcgggcgctgccggcatcaaacgggttcgggatgatgaagcatccgctctcgtgcagcttcttgaaggctgcgcgtttgtcagcagttgtcagtggcattggtcgctccctgaagtcattggccgcgcacacataggcgcgcgcgctcggaggcgctagtgcggctcatgtaccgcgcgactatctttcggcgcctgctcgcgctcgttcagtccgtagtcccgcgtcacattcgcaacgcgcaggcgataattgtcgaaaatccgcgcgcggcccttggcctgggtgcggcggtgctcgacggtgttgcgccaggctgctaccgcggcctcgtcgcggaagaatgacagcgacacgaacttgcccttctcggtgatgctctcgaagcgctcgaccgagatgaagccgtcgatctcctgcaggatcggcttcagttcggcggtaaggtcgaaatagagttgccgctgctccggcttcggccagacttcgaagatcacggcgatcatgggcgcctccgctcattgttgttgtgcggcgactatagctcgaccttgcgcaaaaatgtccgctcctccgcgaggatgaagcggttttgttccgcgaagttgaagttggccatgccctcgctgtcctgccgcagccgcgcgcgataggcctcgtaggcggcaaggctctcgaacgagatcagcgccgaggcgatgttgttggtgccctcgtgcggcatccagtagccgagcagatcgccgccgcagcgcgggatgatcgagagccagttccgcgcatactcctcgaacatcgcgcgcttgaacggatcgagctggtagcggatgaagacggtgatggtcattgatggcctcctgaatttttccgtcaccgcggcccgcgcaatgacggcacggtgaagactaccgccttgcccaacctcgatgcttcggctatcatcgaactatgaaagcaggacccgacatctcccggatcgccgctttggtcggcgatcccgcacgctgcaacatgctgaccgcgctgatgaccggccgcgcgctgaccgcgagcgagctggcgcaggaggccggcatcacgccgcaaaccgcgagctcgcatctcgccaagctcgaggccggcgggctgatcgaacccgagaagcagggccgccaccgctattatcgtctgagcgaccccgacgtcgccgatgtgctggaaggcctgcagggcatcgccgcccgcgccggccatatgcgcgtgcgcaccgggccgaaggatccggcgctgcgccgcgcccgcatctgctacgaccatctcgccggcgatctcggcgtgcagatgctcgacagcatgaagcggcagaagctggttcgccagagcaagcaggcgatcgagctgaccggcgaaggcaagcgcttcatggccgaggagctgcagatcgacgccgacgcgctgacccatccgcgccgtccggtgtgcaaggcctgcctcgactggagcgagcggcggcaccatctcgccggcacgctcggcgctgcgatgatggaccgcttcaccgaactgaaatgggccgcgcgcgacgcgacaccgggcagccgcgtggtcaatttctcgcgcaacggcgagaagcgtttcgtagccctgttcggcgcgggcgagtaacatcgcgcttccagatccgcatcggcgatttcatgcgcgccggtcggtcacgcttgtgtggcgctccgatacatttgcatccgcatcgcgacgcgcgctgctctcgcgcttttcgaaatgtttcgaattgatgctgagctcgcttgcggcgcactgacgcagccgtgagccacaacattcatatcgcattcagtccgcaacattatggtcggggacatcgggcatggcttctgcaatgatccggccgggcgaatcggtagtctaaagtttgttgcggtgccgcagtgcggcccagataaaaggagacgacatgaagtatctttttgcagcagcagttttggtgacgaccgcattcgccggcatcagcgccgctgatgctgctggtggctgtggccccggctggcatcgcggcccctatggcggctgtgtcaggaatcgcggccccgtcgtggtcgcgcccggcccggtcgtggtcgagcgtcccgtcgtggtggtgccgcgcgtccgcgcctgcccctacggcttcgcctggcgttacggccgctgccgcccgatctgatcgcggcacgcctcgcgcaaacaaaaccccgccttgcgcggggtttttcttttgtgatgagcgcggcaggcgctgatggcagacggttcgatcaccagcggcgccagtgatgatgacggcgccaatggcggcggcgccagccccaatgacggtggtggtgccagcgtcggtgatgccagtgccggtggccgtgatgccagcgcacctgctccggcttcaggccgtcgacctcgtcacccgtggtgacggccggatgcgcatcgctgcccgccggcgcgcgtgcatcctggttcaggagaagcggcgcgagcggcgccgcctgggcggtcactgcgaacgtggcggcgccggcggcgacaccgaaggcgatcttcagaaaatccctgcgttccatgagcatttccctttgttgctgagttggatcaaccgcgcccggcaagttttttcgccccgacctgaacactcgctgaaccgcgtgttcacgtttcgcggaactcggtgcaacggctcacattcgcggcgtgtgatgtcacacaaccatcacggcgtcacacggagcaagggcgggtcagcatccgcgcaacccgcgctacgcacactgctcttgggcaccatgccaattccgatgatgtctgaggcgaaacaacggggctagcatcgcgccccaacaacatcgccgggaggccgccgtgaagtcaggacaaccgctcaaggatgccagtcacctctacgaagtcgaacgccgcgccctgcatgccgcccgccccggcttccgcatcatggaactgcagctctcgccgacccagaaagtgccgtggcacacccacagcaacatctccgacacgttctatgtgctggagggccagatgcggctgttcctgcaggagccgaaggaggaagtgaatttgaaggtcggcgaagtctacgccgtccgccccacccggccgcacctcgtcaccaatgccggcacgaattcgctgaccttcctgatcctgcaaggcgtcggggagtacgactacgtgccgctggcttcgaattaagtcgcgcgacactccgccgtcgtcccggcgaaagccgggaggtggattcacactcgaagtgcaacacttgagcagcaaagacctct

SEQ ID NO: 41 - DNA, 75485 bp, Bradyrhizobium enterica
cgagctgcgcatgctgcgggtgttccgcgacgtgcgggaccccgacaccaggcgaatcctgatcgagctcgccgagcagatcgtcaagcgccaggccatgccgccggaaaccggctaaagcgcgatgagatcaggttgaatcgtcatcgcgctttagattcttgtttaagcatgatcttttcggaaaaccgcttcgcacttttccggatcatgctttagcaggacgccgtcgcggcgctccgtaaggggccttcgcgcatggtcgcgatgcgtccatccccattgatggaacggcggaatccgtgtctgtgacatgggccggggaaatccataccggcccggcgacgcctgccgggcaggccgcggcgtcgtgaacccgggcctcatcgcatgtctgcctccgattccaccgcaacgcctgcgtccggctcctggatcgccaatcagccctacctgctgctctgcatcaccgcgatgtgctgggccggcaatgcgatcgtcggccggctcgccgccggccatattccgccggtgacgctgtcgttcctgcgctggtcggcggcgttcctgatcatcctgccgttcgcctggaagcaccttgcccgcgactggcccgtgatccgcaacaatctcggcatcatgatgctgctgtcgctcaccggcatcagcgccttcaacacgctgcaatactgggcgctcgagcacacccaggcgctcaacacgctgctgctgcaatcggcggcgccgctggtggtcgcgctgtggtcgctgatcctgctcggcacgcggctgacgctggcgcagctctgcggcgtgctgctgtcgcttgccggcgtgctggtgatcctgctgcacggcgatctcacgacgctgtcgaagatcgagttcaacaagggcgatctgatcttcatcgtcgcactggtgatcttcgcgctgtattcggtgctgacgctgaaacggcccaagatccacgggctgtcggtggcggccttcaccttcggctgcggcgcggcgttgctgatcccgttcttcatctgggagcttggcgcgcggccggtgatgcagctcacgaccaacaacctgctgtcgctgttctatgtcgcggtgttcccctcgacgctggcctatctgtgcttcaaccgcggtgtgcagctgatcggcgccaaccgcgctgcgccgttcttccacatggttccggtgttcggcaccatcatgtcgatcgtgttcatcggcgagcatccgcaggccttccatttcatcggcttcgcgctggtgctggccggcgtcttcgcggcgtcgcggaagcagtcggcggcctgatcgctccccagggcgcggtgactatcggcggcaaatccgctatctcttgagctctgcttcgcggacaggtcccaaacgcatggcgcgcgccagcaatctcgtgatcggcaccctgacgctggccctcgtcgccggctcgctcggcggctggctcggctatcagcgctatgccggcatcaagcggatggtgccgttccgcgtcgtgttcgagggctcggcgtccggcctgcgtcgcggcggcagcgtcaacttcgcaggcgtgcggatcggcgaggtggtctcgatcaggctcgaccgccaccgcgtggtggcgatgacgcggatcgagggcaacgccccgatcaggaaggacacccaggtcggcctcgaattccagggcctcaccgggatcgccgcgatctccttcaccggcggcaccgacgatgcgccgccgccgccgctcggtgccgacggcattcccgagctgaccgccgatcccgaaggcacgatgggaatccaggagaagctgcgcgtcgcgctgcgcaatgtcgaccgcgtcatcaccgagaacgaggccggcatcaaggactcgctgctcgggctcgagaacttcaccaactcgctgtcgggcaatggcgagctgatcgccggcttcatcgacgccgccgacgacggcatcagcacggtcgacgccaagctggcctcggccgacaagttcctgaagagcttcggcagcgacaaatatggcggcgagctgctgccgaccgtgatctcgctgcgcgagctgatccagagcttcgacaagaagtccggcgcgatgatcgccgagacgcgcaagacgctcagcgacgtcagccagtccgtcaacgcgttcaacgagaaaattgccgggcgcggcggcaggcgctaacgtcaggcgccgaccaagaaccaagaacaacggaaacgaccgacgtgcacgaccggaccgcagcgccctccccgcctcccgcaaccgtcaaccgcgccgcgagcgccgtgccccggcatttgcggcgctacctcacgctcgacgatttcgagccgcgggcgcggcagctgctgccgaaattcctctacggctacatctccggcggcgccgagaccgacgcggcgcgatcagacaatcgccgggcattcgacgaatacggcttcgtgccgcgggtgctgaaggacgtctccggccgcgaccagaccacgacgctgttcggcaagacctacgcctcgccgttcgggattccgccgatgggctcgtccgcgctgtgcgcctatcgtggcgacatcgtgctggcgcgcgccgcggccgccgccaacgtcccgatgatcctctcggcctcctcgctgattacgctggaggacgtccgcgccgccaatcaacaggcctggtaccaggcctatctcgctggcctccccgagcggatcgagccgctggtcgatcgcgtcgcggccgccggctacgacaccttcgtcgtcaccgccgacgtgccggtgccgcccaatcgcgagaacaacatccgcaacggcttccaggtgccgctcgagatcacgccgcgggtgttctgggacaccatcacccatccggactggctgctgaacacctgggcgcgcaccgtgttcaatcacggcatgccgcatttcgagaacatggacgccaagcagggcccgccggtgctgtccaggaatctgatgcgcaacatcggcagccgcgaccagctcgcctggaagcatgtcgagctgatccgcaagcgctggcccggcaagctcgtggtcaaggggctgatcgcgccggaagacgcccggctggcgcgcgagcacggctgcgacggcgtgatggtctccaaccatggcggccgccagctcgactacaccgtctccgcactgcgcacgctgccggagatcgccgcggagaagggcaacatgacggtgatgatggacggcggcatccgccgcggcaccgacgtcatcaaggcgctggcgctcggcgcggatttcgtctggatcggccgtccgttcctctacggcgccgtggtcgcgggcgaagccggcgtagcgcgcgcgatctcgctgctgcacgccgagatcgaccgcgacctcgcgctgctcggcatccgcagcctgaaggaaatcaccccggacctggttcggaaatattgaagcggtgaccgcaccgcccggattcttgtggcctagtggaaggtcggcacgccatgcgcttctggagaaccctgataccggacgagccgttcatttccgactatgacgacatgctgttgcccgtaccgaagtccataccgcccgccgtcagtggctggtgcttcgtcgcaatggtgtgcaattgcgtggttgtcgccatcgcgacagcgatataccgcaatatcgccccgctgctggtcggggccatcttcacgatgtttccgctctggatgctgttgttctggcgtaatctcgcatcgaccatggacacggtaaagcgacggaccgtcgaacggccgccatttccgcttccgctgcagatcaatgtgagcgttcagtgggcggcgatttcgctttgcgctgccgctccgatgatgacctcgctcttgctgatcatattgtggttcacgcagatgaagcgttgaacccggccgtgatgctccggaaaccgtcatgcataacgcgcggcgcccatgcagattgcggtgatcgcgagcagcccggccgcgatgcgctgcgcgacggcgagccgtgaacgtgcggccgactgttcggccgtgccattgcgcagctgcctgacagcgccgccgccgacgatgatctgcacggcgatcgcagccaatgccgcggtcgcgccacccgccaggatctgctccgacagtgcgaacgagccttcatggaccaggcgccacagcgtggcgccggtcacgatcgcaaccgtcgccgcgccgatctgcggacccagcagtttctcgccgccgagaccgccagtgcgcgccaaggtaaagctggagccggcccaaaacaccgatgacagaacgtgaaggggcagggctatgatgaggactgtctgcatgacgttgctccaactgggcattggaaattagatatacataatgtatagtcaatccgacgaaaccaaggcaagccgatgccgccgcgcagctatgtgagcccggcgcgcagcgccgccgccgccgagacccgcgagcgcgtgatcgaggccgcctcgcgtacgctgcgcgaaggcgagagcattgcgcggttctcgctggatacggtggcgaaggtggccggcgtgacgcggctgacggtctacaaccagttcggctcgcggcgcgggctgctcgaggccgtgttcgacgagatcgcgcgccacggcggcctgcatcagctcgccgacgccatgacgacggccgatccgcgcgccggcctcgaccgcatggtcgagatcttctgcggcttctggagccgcgattccgcggtcggacggctgcatgacgcaatggcgaccgatcccgaattcgccgaagccgtgcgcgagcgcaacgagcgccgccgtcgcggtgtcaccggattggtcgaccgcatcgcgggcaagcaagcgtcgccacaggcccgcaaggatgccgtcgacctgatcttcgcgctgacgagctacccgaccttcgcctcgctgagcgccgccgggcggtcgagggacgaggtctgccgggtggtgcagagggcctgtcacgcggcgcttgcgccgctctccaacccgtcatcctgaggcgagcctcgaaggatgaatcggccacggtcgggccgtcgacccttcgagacgcgcttcgccctcctcggggtgacgggaagagagcaatgcctcaccccgccttgaatttgctgtaggcctcgcgcgtcgcgatgatgacgtgcgcctcgcagccgttgcggcggtgtgggtcgcagctggtctcgtagtcggccgatgtcatcatgtcggtaaaggccgcgacgctcggataatagaccagcgcgaggtaatcccaacgctggccgtccggctcgccgagcgcgaccgtctcggcgttgccggtccagagcagcgtgccgccgcgcgccttgatcatggggacagtgagcgcgctgtagcgcagataggcatcccaacccgaaccgtcgccgtcgagcgaccgctggcgaaatcgcatcagattgaccatcacgaccggggccgtttgatccagctcgctcaagcctttgacgttcaagagatcgacacccatccaccagctcccaccccacaccgcattattacgggtcactacggtccagccgcttcggtccggccgcaacgattatgtcacatcgcgggactaccctgaaatgctggcaggccgtaagctcgccacccgatctcggaggtcaatgccgtgatgacccttcccgaacttgcggccgacgcactcggcaaattcctcggcgaatacatgcagcgccgcttcggctcttcgcagaccgagctcgtggagatggtgccctcgatcgcgcggatcgccatcgaatgcatcggcaacagcgacgcgctctatcacaatgtcgagcacaccatgctggtgacgctcgccggccacgacatcctgcgcggccgcgcgctgcacgcgcatatgagcgccgaggattatgcacatgtcatcatcgcctgcctgacccatgacatcggttacgtgcgcgggctgttcgatgccgacgaccagaacggctatctggtcgcggccgatggccgcaaggtgatcctgccgcgcggctcgtcggatgcggcgctgatgtcctatcacgtcgaccgctccaagatcttcgtgatggagcggctcaagggcgtcgcgctgctcgacaaggagcgcattgcgcgcgcaatcgagggcacccgttttccgcagagcaccccgaacggcgatgaggacttcggcgacgaggccatcttgctgcgcgccgccgatctgatcggccagctcggcgatccgcactacatccgcaaggccaacgcgctctacatcgaattcgaggaggccggattgaaccgccagctcggttacgattcgccggccgatctcgtcgacctctatccgcgcttctactgggacagcgtcgcgccgcatgtgcagagggcgatccgccacctcaacatcacctcaagcgggcggcaatggatcgccaatctctacagcaacgtgtttcgcgccgagcgcgacatctcgctgtcgggaccgcagaaataggcggggccttcgagacacgtggaagagctagtcccgacatcctgaggaggccgcaccgcggccgtctcgaagggtcgacggccaccagccgggccgtgcatccttcgagacgcgctacgcgctcctcaggatgacggaatcccgttctcgtgctgccgcgagtgctgtcgagttcggcggcgcatggctccaatccgcactttcgtcttgtcgcagcagcggattcgggcacaactccaccgaacaatgaccaccttgcccgcacctgccacaaccccgcgccgcactccgctgcactggctcaacaaccagccctatctgctgctcagcctgacgtcgctgttctgggcagccaatatcgtgctggcgcggcatgtcggcagccatgtgccgccggtcaccctgaccacgatccgctggttcggcgtgttcctgatcctgttgccgttcgcctggccgcatctgaaggaggactggccgaagctgcgcaaagcgctgccgctgatgctgctgttgtccgcggtcggcttcgcgttcaacaacgcgatctcctactgggcgatgcaatacaccgaggcgctgaatgccctgctgattcagtcggcagggcccctgttcgtggcgctgtggtcgctggtcctgttcggcgtacggctgacgccggcgcagcttgccggcattgcgatctcgctcgccggcgtgctgaccatcatcctgcgcggcgacttctcggcgctcgccaatatctccttcaaccgcggcgacatcatgttcggcgcctcgctggtgtcgttcggcctctactcggcgctgatcccgcggcggcccaagatccatcagctctcgctgatctcgttcaccacctgctgtggtgcgctgatgctgctgccggtggccgtctgggaattcgccaacggcgtgacgctgaagctcgacgtcctgacctttgccacgctgggctacacgctgatcttcccgtccacgctcgcctatctgttcttcaaccgcggcgtcgcattgatcggcccgaaccgcgcggcgccgttcttccatctggtgccggtgttcggctcggcgatggcgatcctgctgctcggcgaaacgctggcgccgtttcatctgatcggctacgccctggtgctcgccggcgtcatcatcgcctcacggcagggctcggcgaagcactagccacaggtatggctagctcaccttgcgcaagccggcggatttgcgtggcgaacgcggctttgccgccagcgtgtccgtgatgaagtcgatgaatcgccttaccttggccggcacgtggttgcgcgaggcgtaatagacgtagagcggaaaacgctcgtccggccagtccggaaacagctcgatcagcgcgccgctcctcaagtgatcgtcgatgccgagatcaatcacctgcgcgattccgaagccggccaggcaagcgccgagcttggttcctgaatcggtcacggtgagccgcccgttgaccacgaccggcacgacctcgccgccgcgccagaactcccaatcgaaggggcgtccggttgccgcgtcgatcgcgtggatgcactgatgatcgcggctcgcgagctcccgcggatcacgcggccggccgtgtcgttcgagatagatcggcgaggccacggtgagcacgcgcgcatcgagcacgcggcgcgcaatcagcgccgacggcgccggctcgccgaaacgcaccgccaggtcgaaaccgtcgctgaccaggtccgcgatccggtcgcgggtctcgatccgcagctccatgcccggattttgcagcaggaactcgctcagcttcggcgacagcaccatgcgggagaacagcggatcgacattgacccgcagcctgccgcggaccgcatcgcgcgatttcgaggtcgccgccgccgcctcgccgatcccggccagatgcgcggcaacccgttcgaccagcgcgcgtccctcctcggtgagctcgacggcacggctcgtgcggtgaaccagccgcgtgtcgaggcgcgcctcgagcttggcgatcgccttgctgaccccggattgcgtcatgccgagccgttcggcggcgcggccaaaactgcgcgcatccgccagcgccgcgaggaccaccaggccgccaaccagccgaccgtcaacttcgtccatgccgatgcctctcagtcatccaagagatgaccgtccagtcgtagcactccgccaccatatcggccactgtcggcgcagatgaggtcaccgccccctcatcaactgaggagatttgcaatgagcgacatccaggccatcgcatccgcgatcgatggatatttcgatctgatgtatgacgtcgacgacagccgtttccgcgacgtgttcgccgatgccgccatcgtgcacggcatccgggacggcaagcacacggtgcggtcggcggcagaattccgcgacttcatccggagccgtccgtcgccggcgtcgatgaaatcgccgcgcgaggaggccatcatcagcatcgaccagacctcgcccgatctggccatcgccaaggtgcgcgtcagggccggccagaccggcttcatcgaccatctggtgtttcatcgcatcgacggcaggtggctgatcaccaccaaggcttttcacgtcgcgcaggtgtttccggagggctcgtaacgccccccgcagtcaatttcggaatattagaaatatgacactgatttgcccgacatgtcaagtcggctggtcgtaggcccgccgtcaccctgcctttgcatggggttgttttcgatattttggcagcgcctccctgatcggctggtgctgtgcgagaggctgatcgccggcgccgggatcgggaagcagcaggccgctccaaacacgaatgcccgggcaaggcccgggcatcgtaacgatgtcgattgatcgcgccggccttacgccgcgcgcaccttctgcaggaactcgtcgaccgcgctgcgcagcatgccggactgggtgtcgagttcgcgcgcattcgacagcacgtcgcccgccgcggtgccggtggcggcggccgcggtggtgacgccgccgatatgggcggagatctcgctcgagccggccgcgacctgctggatgttgcgcgcgatctcgcgcgtcgcatcgccctgctggtcgatcgcggtcgagatcgacgccgtgatctcgctcatctgcgcgatcgtcgcggtgatgccgccgatcgaggtcaccgcctcgccggtggaggcctgcatcgcggcgacctgcgccgagatctcctcggtcgccttcgcggtctggttggccagcgccttcacttccgaggcgaccaccgcgaaaccacggccggattcgcctgcgcgcgccgcctcgatggtggcgttgagcgcgagcagattggtctgggcggcgatcgaatggatcagcttgaccacctcgccgatcttctcggcgccggtggacagcgcctgcacggtcgcattggtgcgctcggcatcggcgactgcctggcttgcgacctcgctggaacgcgccacctggcgggagatttccgcaaccgagctggagagctcctcggccgccgcggcgacggtgccgacattgttggaggcgctgtcggatgcggcgccgaccgtcgccgcccgcgcgctggcgtcgctggcggtcgcggtcatcgactgcgccgtggtctgcatgccggcggcggcggaggccaccgtacggacgatgccgttcacgctgcgctcgaaatcgctcgccaggttctgcatcgtgctgcggcgctcggccgtggcgcgcgcctgcgcttcggcttcggcctgctcgaggccgcggatccggatcgcattgtccttgaagatctgcacggtcgcagccatcccgccgacctcatcgccgcggccgacaccagggatgtcgccgtcgagcttgccgtcggcaatgtcgcgcatgcggctgccgagcagattcagcggaccggagatgctgcggccgatcagccaggcgaccgaactcgagatgacgccgatgccgatgatcgcgagcccaagcaaccaggcaatcgggcgcatcttggcgtcgatgtcgtcgagataggcgccggtgccgatatacatgtcgaagccggggaccgcgacggcgtagccgagcttgcggatcggggtctcctggccgggcttcacataatcatagaacagcaggatatcgccattggccttgacgccgttcatcagctcccacgacagcttgcggccattggtcacgacctccatgcggttggttccgacctgcttcggatcgggcgccagcaccgtgatgccgttgtagtcggtgccgaacagatagccggcgccgttatcgtaggtcatcgcgttgccgtgcttgcccagctctgcgattgccgcttccttggtcatctttccggcgtcgacttccttcttcaggcctgccgccatgttcttcgccatctcgacgatggccttggcctggtcgatgcgagcatttgtcatctcacgctgcatcaagtgtccggcgagaatgccggccgtgcacagaccaaggagggtcacccccaccagaatgccgagcttgggggtgatcttcagatttgacagcttcacggggatctccaggagaggcggggaacgcgacgcgattggcggattgattccgctcaccgtaatgtgagaccctttacctgatggttacgctggttccccgtagtagcccggagaatcgggcggcggaccaaccggcaattgtggagaggaccaccccgctcgcgtacaagtaggcgaaagcggcgaagcgagcagcgctcggagaagcaagaagaccaagaagcgaacccagcaagaagcaacaatcaagaacagaagacctcacatcgggagcagacaatgtcgaaattcagggtggtgacgccgaagggcgcaagcttcacggtcgccggcggcggctatgattatgagcgcgaggcgctcgatccgatcggcgccgagatcgtcgaggcgccggccaacgaggccgagttcatcgccgcggcaaagaccgcggatgcgatctatgccaagggcatgccgatcaccaaagcggtgatcgacgcgctcgagaactgcaaggtgatcacgctcggcagcgtcggcgtcgattccgtcgacgtcaaggccgcgaccgcgcgcggcatcccggtcaccaacatccccgacaccttcatcgaggaggtcgccgaccacgccatgatgctgctgctcgcaggcttccgccgcctgatcgagcaggacaagatggtccgcagcggccgctgggccgagggccgcccggcgctcttgaagattccgcggctgatgggccagaccctcggcttcatctcgttcggccgcgtcgcccgcgcggtggccaagcgcgcggcgccgttcggtctcaggatgatggcttatgatccgttcatccaggaaacgctgatgtacgaccacggcgtgatcccctcgacgctgtcggaggtactgtcgcaatcggatttcgtctcgatgcacgccccggcgcgtcccgaagtgcaccacatgctgaccgagaagcattttcgccagatgaaaaagtcagccgtcttcatcaacaccggccgcggcgcgaccgtcgacgaggaggcgctgatcaaggcgctgcaggagggctggatcacccacgccgcgctcgatgtgctggagaaggagccgccgtcgcacaacaatccgatgctcgggatggacaatgttaccttgaccgcccacgtcgcctcggcatcggcacgttttgacgaggcgcgcaagcgccgggtgggctacgaattgtcactagtgctgcaaggcatgtggccggtaagctgcgtcaacccgtcggtgctgcaaaacaccgcgctgcgccgctggcagcccgtcagcatggatcgcggtccgaacagttaggcggaacgcgcgcttcacgcgaaggctcgtcttacgagatcggtccttcgcgcggcgagcgcaccgagacgacaaggcccttcgccggcggccaacgccgggaaggaagcaaaaaaacaggcagggagtgcaaacgacatgacgtacgaggtcacgcgtcgcgacgcgctggcgctgggagcttccgcggcggcactggccatcaccggtgcttcggcgcaggacgcatcgaaggtccaggctgcggacgtggcggcgccgtcgctgccgatcgagaacggcgcgaccctgcgcatgctgcggccggtgcgcttcgttcaagccgacgaggacgtgttccgcgccaacgccaagaagttcaccgacaagaccggcgtcgagatcaaggtcgacttcgtcggctgggaggacatcaaccagcagactgcggtgacctcgaactccggcgccggtcccgatatcatcatcggcttcggcgatgcgccgcacatctatgtcgacaagctgatcgaactgaccgacgtcgccgattatctcgacaagcgttacggcggctggcttgcgctcgcaaaacgctatggcatgcgctcgaagtcgcaaagctggatcggcctgccgttcggcgcctcgggcggtccgctggtctatcgcaagtcgctggtcaatgcggccggcttcgacaaggtgccggaagaccacgccggctacctcgagctctgcaagaagctgaaggcggccggcaagccggcgggcttcgcgctcggcaatgccgtcggcgacggcaacggcttcgccaactggctgctatggtcgcataatgccgcgctgctggacgaggaaggcaacatcatcatcaacagcagggaaacgatcgccgcgttgaaatacctgaaggaactctatccgaccttcatcgccggcacgccgtcctggaacgacgtctccaacaaccgcgcctactcgtcgcaggaaatcggcctgaccgccaacggcgtctcgctgtacttctcgctgaagaacgatcccgccaccaaggcagtggccgacgacaccgagcatcagtttctgcccaaggggctggcatcgacctcgccgatgtcgggcctgaccctgaatgcgatggtgttcaagcacagtccgtatcccaatgcggcaaaggcgctcctgcagttcatgctggagaaggagcagtacgagccctggctcaatgccaactccggctactggtcgcagccgctcgccgcctacgccaatgccgcggtgtggtcgagcgaccccaaggtcgcgatcttcaaggacaccatgaggagcccctattacaacggctacaagggaccgatctcgaccgcgactggcgcggtcaacgccgactacgtgctggtgcagatgtgcgcctccgttgcgaccgatgcggcaaagccggaggccgccgccgcggaggccgagcagcgcgccaagcggtacttccggcggcagggccggtagcggcggccattgaactgcgaaactcaatcaaccgtcattgcgagcgaagcgaagtaatccatcgcgccaccagggagaaatggattgcgccgtcgcttcgctcttcgcaatgacgacaagacgagcattcaatgtccgtaaccaccttcccttcacgcggcgcggcacttcgccagcccggctggctcgcgcgcctgttcgactacaagccgttcctgatcgtgatgtgcctggcgcccgcgatcggcctgctgctggtgttcctcacctatccgctcggcctaggcatctggctcgccttcaccgacaccacgatcggccagcgcggcatctatgtcgggctcgagaacttccagtatctgctcaaggatcccctgtggtggaacgcggtgttctactcggtcttctacaccgcggtcgcaaccttcggaaagttcgcgctcggcttctggctggcgctcctgctcaacaaccatttcccgttcaagagcctgatccgcgccatcgtgctgctgccgtggatcgtgccgacggtgctgtccgcgctggcgttctggtggatctacgatccgcagttctcgatcatctcctatctgctggtcgacgtgctgcacctgcgcgacagcaatgtcgacttcctcgggtcgccctggccagcgcggttctcgctgatcgcggccaatatctggcgcggtatcccgttcgtcgcgatctcgctgctggccgggctgcagaccatctcgccctcgctctatgaggcggcgatgctcgacggcgccacctcctggcagcgcttccgctacatcactttcccgatgatgatgccgatcctggcgatcgtgatgacattctcgatcatcttcaccttcaccgacttccagctggtctacgccatcacccgcggcggcccggtcaactcgacccatctgctcgcgacactggcgttccagcgcggcatcgccggcggcgagctcggcgagggcgccgcgatcgcggtctcgatgatcccgttcctggtgttcgcgacgttgttcagctacttcggcctcgcccgccgcaaatggcagcagggagaagccaatgactgacgttgcggcccaatccaacgtcgccagcgccacccccgacacgatggcgtgggatagccgcgcccggcgcgtggtgatgatctatctgccgctcgcctgcttcatcctgatcctgctgttcccgttctactggatggcggtcacgtcgttcaagccgaacgcggagctcttgaaccacaaggcgcacaatccgttctggatcacctcgccgacgctcgcgcatgtcaagcacctcttgttcgacacctcgtatccacgctggctgaagaccaccatgctggtcgcgatcggctcgaccttcctgtcgctgttcgcctcgacgctcgccgcctacgcgatcgagcggctgcgcttccgcggcagtccttatgtcgggctcggcatctacctcgcctatctggtgccgccgtcgatcctgttcattccgctcgccaccgtgatcgtgcagttcggcctgttcgattcgccgctggcgctgatcctggtctatccgaccttcctggtgccgttctgcacctggctgctgatcggctatttcaagtcgatcccctatgagctcgaggaatgtgcgctggtcgacggcgcgacgcggctgcagatcctgtggcggatcaccttgccgcttgcggtgcccggcctgatctcggccggcatcttctccttcacgctgtcctggaacgagttcatctacgcgctcgccttcatccagagcggcgccaacaagacggtgccggtcgcgatcctgaccgagctcgtcaccggcgacgtctaccagtggggtgcgctgatggccggctccctgctcggctcgctgccggtcgcgctattctactcgctgttcgtcgactactacgtgtcgtcgctgaccggcgcggtgaaggagtagcagagctccgggccgcgagcggttgaagcgaacccaatctatccccgtcatgctgaggtgcgagcggagcgagcctcgaagcatgacggaatatagaacccgctagcccgattagaatgagctgggatgttaccgcggcacgaacgcgaccggcacggaaaaacccatcgagccctgcgtaatatcagccggaaacgccgggaacggctgggcctggcgcaccatcgccagcgcccgcgcgtcgaaggtcggattgccggaggagccgccaagatggctcgacagcacctgcccaccgcggccgagcgtgaacaccaggcggaccacgccgcgctggccgttgccgccggccggataggaatggaagcgcagcagatgcgcgcggacacgcgcgttgtaggctgcgatcgccgatgccgccgcccccgcgctgatcgcggacgccgccggagcccggcgttcggcgcggctcggcgcactggtgcgcggcgccggcgtcgcctcggacggcttcttcgcatcccggcgcacgaccttaggcttgacgggttcagtcttgtgctccggaacaaccttcgtgggctcgggtttcggcggcgtgacctgcggcttctgctccggcggcgcggcgacctcgggcttctcctgcaacggcgtcggcgcgagctcctcgtgcacggcctgcgcggcggccggctcgggcggcgcggcatcggcctcctgcatcgccggacccggcggcagttcggtctctgaaatctccggcgctgaggtgatcggcgtcaggtcgaccagcaccgccggcaccgcgacacccggcggcggcaacgagacccagctcatgccgagcccgatcatcgcagcgtgcgctgccaggatcgcggccgccgacagaccccagcgtctcagacagatgtcaccgccggaatcatgcagcgcataggcgttcatcgaactagcttcgtccgtcgaggccgaccagcgcgaccttgaggtaaccggcattgcgcagcaggttcatcacctccatcaggtcgccgtaactgaccgccttgtcggcacgcaggaagatgcgttcgtccttcttgccttgcgtggcgccgtcgagagccgacgtcagcgtatcgcgcgcgatcacctcctcgccgaccgcgaccgacagatccggcttcaccgtgacgaacaccggtctgtccggccgcggctgcggctcggctgtcgaggccggcagatcgacgccgagatcgacggtggcgagcggcgccgccaccatgaagatgatcagcagcaccagcatcacgtcgatgaacggcgtgacattgatctcatgcgcctcgacaaggtcgtcgtcaccgcgacgccggccaccgaacgcaccgccagtgccaagcttgacgcccatcgctcactccgcggcgcgcgccagccggaacaggctgcggtcgccctcgcggctcaccagcagcatcaccatgacggaggcgtcgccgagcagcgcgcggtagcccgcgatcgaacgggtcaagtgattgtagatcacgaccgccgggatcgcggcgacgagcccgagcgcggttgcgagcagcgcctcggcgattccaggcgcaacaaccgcgagattggtggtgtgggcctcggaaatgccgatgaaggcgttcatgatgccccacaccgtgccgaacaggccgacgaacggcgcggtggcgccgatggttgcgagcacgccggtgccgcgcgcgatctgccgcgacatcgccgcttcgacccgctcgagccgcagcgcgatgcgttccttgaagccgtcgtcgaacatgccgcgggagagcgtggcctcacgcgacgccgactggatgatttgcgccaccgcatcgttgccgtcgcggctcgcctgctcgacctcggcgagctgggtgtcgcgctcgagctggccgatccgctgccgggccagcacggtcttgcggcggatctcgacggtcttggcgagccagatcgtccaggtcgccagcgaggcgaaggcgagcccgatcatcacggccttcacgacgatgtcggcgctctcgaacatgccccagggcgagaggttgcgcggtagcagcgcggcgtcggatgcagcaagtgcgacgtccggcggcatgccgagcgcggcacacgccgttatgcagatgcttcgcacaagccagcgctgcgacatggtcgcctcccgtccccgttttgcatcagcccgcctgcggcgcgagacggtccgccagtgcgtggaaacgcgccagctgatcgccgcgcagcgcgcgcgcctcgtcgcggccgacgaacaccttgaacatgatgccgccgtcgcggttgatgaaagcgatgaaggccgacaccttgcccatgaacgggcgctcgacgaacgcgatcgccgcgcagcgctcatgcctgagatggccatgcagccccttcggctgcatcaggttgaaatagccgcggccgacctcgcctttcggaatggcgccggtgaactcgaagatcgcgtcgtcggtatgcacgatcagcgtcacctcgccccactccgcgatgtcctgcatcgcgccggcgaattcgccggcgccgatccgcaccatgcccgcgggcagcgcctcgagcaccgcgcgcggcgtcaccttgcgctcgcgcgcgacatcctcgatgacagcgccgggattgtcggccatgtaggccttcaacccggcaagctccgcgtcctgcacggctgcctccgtcacgccgggctcttcgcgcgttcggtgatcagcacctcaaagccctcgaatttgggatggccgagatagaggctgccgccggtctcgttgccggcgcgggaatgggcgcggcggaacgcatccgacttggtccaatcctcgaacgccgccttgcttgcccatacggtgtgggtcgcatagagcgtgtggtcctcggcttcgggacccttcaccagatgaaactcgatgaagcccggcagatcgccgagataggactcgcgcgtcttccagaccgtctcgaacgcctgctccttgcccttgatcacctgaaaccggttcattgcgatgaacatgaaagccttctcctgcttgtcggcggactgatcctgccggttgatctcgttgatatcatgaatgcgccaaagccgcgctgggggcaccagcgcggccggagcaacctggatggaatgaccggctcgtcgcgttacgctccaccaaggtgaatcttgagcccggccttgtagacggtgcccggaccggggctcgagaacagcacgtcgttctgcgtcgtgccgtcggtcgaggagcccgggatcgcgtagggccggtagtactggttcaagaggttgtcgaccgacgccgtgaaggtgatgtccttggtggcgttccaggtcaggtagagattgaccaactcgtaaccggtcgagggcagatagcccgccggcagatcgttgttggcgccgaaagaggaccattgcgcggcaatgatcagcgagcggtcgagcagacggacgccgcccgtcgtcgtcaccttgcgcggcgtgatggtcgcgagcccgacattggtcgccgtgttgcggccgcgcatcagatggccggcgacgcccacgaaccagtcacccgcgtcatacatcgtctcgagctcgaagccttcgatgcgggcgtgggcgatgttctgatactgatagaactggctgaagcgaccaaacggcgtcgtggtcggcctcgacgcgacgaggtcgatatagccgtcgacgtcgttgtggaacacattgatcttgccgcggaacgagtcgttcgcggtgaagatgccgtcatacttgaggttgatgccggcttccttgttcttgccgacctcgggccgcagcgccgcgttcggcaggaagcagaacaggccgctggtgccgtcggggcagttgaacagcgccggtccgccgccggtggcatgaccgcccgagatcagcgtctccgtgatcgacggcgcgcgatagccttcggcgtagctcacatagggcgtgaagccggttaccggcgtgacgccgagcgtgatcttcggcgacagccggtcgccgctggtcgtcgtgttgagcgagttgagttcgtaacgatcgtagcgaacggcgctgaccagctcgagccaggtcgaataattctgttttagctgcacgaagccgccggacaccgtccgttggccgcccggcgtcgtgatattggaattgccgcgggaatcgaaagtctcgacatcatcgcggaaggcgtcgaaaccgtaggtcacggcgttgcgccagtcgccgaaattgaagcgcgtggtgttgttgacgtcgaggccgacggtgtcgagcgagtagccgcgcttgtcgccgacgcagccggagatgttgttgccgggattggcgagcgcgcagacgccgccacccgtggtgatgcggttgttgtaggtcttgacctgatcgttgtcggtgcggttgccatagaccgagatattccagtcgaacagcatgtcgtcgggcttggagtatttccagctcagcgtgcccgtgtagttcctggcatcggaggcgtagaccgaggagcccgcgatcgccgccagcggcgccgccgtcgtggtcgggccgcggttcggctgcccgatattgtactggtagtcctggaagatgccgccgatcttgaactcgtggccttcggccgggcggatcgtcaccttcatcagtccggccgcgatgtcgttgccggtgttgccgatctcggtgccggcgccgtccttgtaattgctctgggtgcgatagaccgcgccgccgaacacgtcgacattcgggtcggcgcgaacgccgccgaacaccgaacccatgccacggtccttgttggagccataagagcccgacatgtcgacgccccagcgctcgccgggacgcagcacgtcgtcgatgtccttgctgcggaacgagaccacgccgccgatcgcgccggagccgtagatgttcgcggtcgggccgcgcaccacgtcgacgccgccgatcagttccggatcgaggaagaacgagccgttggcattgtggcccgtacgttgatagttctgccgcgcgccgtcgacgacgaccgcgacgcggccgaaatcctgcaggccacggacattgacgacggtcgccggatcgtcgccgcgctcctggaacgagactccgggcacgttgtagaagatatcggacagccggttgggctgcaggccctgaactttctccagggtgaccgagctgaccggcgccagcgcatcgatcgcgcgctcctcggtcttggatgccacggcggtgatggtgtcgagcgattgcaccggcaccgcgccgatctgcgcgcgcgcattcgccacaggctgcgccgccgcttgctgctcggccgcaggcttcggcttgcgtttggcctgcttcggccgctcagtcgcgggacgcgccgccgaagcgtcagacgtttgcgccaaaccgctctgcggcaatgccgccgcaaatgaaaacaccgacgcacccaatatcaaggcgcgcgaaaccccagccccgtcagccattccagccccagcctgatcatcgtatttctggattggctggcgtgcgctccggagagcggcttgctggctacgttgcaacgcaagccacccgcctgcatcgcgtgatgattggttacgggccggcaacaaaacggtcaagaatgcggcgccgctgtttatatcgattgtaaagtgcggccgttggaatgcgccttcgcccccttgtacaagcagacaccatttgaagatttcgaaggcgcagcaccacgagatgtcggcaacttccggagacaacatcggcgcggccgaaaagcaggccgaacccgcgtccgacgccgcgaaaacactcgtgatgcgcggaaatcgcctcgacagccgcgacctgttctcgaccgaacgcgagatcatcatcgtgcatggcgaagagcattaccgcttgcggctgacctcgcagaacaagctgatcctgacgaaatgatgcccccgatgacaatttgccgcacgctcgctttgctcgcgctctcctgtctgctgcagatcggcacggcgaccgccgagggcatcaccgtgcatgacgcacgcgaccgcgacgtcgtgatcgacgatccctcgcggatcgtctcgatcggcggcgcgatcaccgagatcctctatgcgctcggcttcgaggatcgcatcgccggcgtcgatgccaccagcctctatccaccggcagcgctgcgcgaaaagcccgatgtcggctatatgcgccagctgtcgcccgagggcgtgctcggcctgcatccgtcgctggtgctcgcggtgcagggctccgggccgaaggaaaccatggacgtgctggaggcggcgaaggtgccgctggtgctggtgccggaaaccttctcggaggccgggctggtcgagaagatcaggctggtcggtcacgccatgggcgctgaaccacgtgctgcctgcctggccaccgcagtcgaaaacgatctcgcgcaactgcgcacgctgcgcgccaaggtgacgaagccggtgcgcgtgatgttcgtgatgtcgatgttgaacggccgggcgctggccgcgggccgcaagaccgccgccgacgagatcatccagctcgccgggggcgtcaacgcgatcgacggctacgatggctacaagcccgtcaatgacgaggcgatcgtggcggcgaagccggatgttgtgttgtcgatcgatcgcggcaaggattcgctgacttcggaggcggtgttcgcgcatccggccttcgcgctgacaccggtcgccgccaacaaggccttcatctcgatggaaggactctatctcctcggtttcggaccgcgcaccgcgactgcagcccgcgatctctcggtcaagctctacccggcgctggcgccggaggccggcaacttcaagccggcggcgctgaccgcgaactgccggcaatgagcgtgctggccgggcgcggcgcgcgggcgaaacaacgccgcaccggtatgtcgccgcggcctgcggcgacactcactttgctctgcctgcttgcagtgctcacagggaccgcgctggccgccctgacggtcggggctgccggcattccgatggcacggcttccggccgcgctcgggctatgggcggacggcacggccaacccgctgctcgcgcgcgaccagcttgtggtgtggtcgatccggatcccgcgcatcgcggcagccgcgatggtcggcgggctccttgccgtatcaggcacgatcatgcagggcctgttccgcaaccccctcgccgaccccgcgctggtcggcgtctcctccggcggtgcgtttgcagccgcggccgcgatcgtgttcaccgacagccagctcggcgagagcctgcgcttcctgcagcaccagctgttgccgatcgcggcctttgccggctcgctgctcacgaccatcgtgctctatgccatcgccagccgcggcggccgcacgtcgattgcgatcttcctgctcgccgggctcgcgattgccgcgatcgccaatgccggcatcgggcttctggtgttcgtcgccgacgaccgccagcttcgcgatatcactttctggctgctgggttcgctcagcggcgcgacctggagcaagctcacgacgctggcgccagtgctgggcgttgcgctgatcgcctgcctctcgatcgcgcgcgggctcgacgtgctggtgctcggcgaggccgaggcattccacagcggcgtcgacgtcgaacggctgaagcggatctcgatcgtgctggtgtcggcgatgaccggcgtcgcggtctcggtctgcggcgtggtcggcttcgtcggcatcgtcgtgccgcatctcttgcggctggtgatcggcccctcgcatcgcctgctgctgccggcgtcggcgctgctcggcgccatcctgctggtcggcgccgacacggtggcacgcaccatcgtggcgccggcggaaatgccgatcggcatcctgaccgcggcgatcggcgcgcccttcttcctcgccatgctgctgcgccagcgcgggctggtgtcgctatgacggcgctgctcgaggcccagtcagtgtccatgaccgtcggcggtacgaccctggtcgacgcgatatcgctccggatcggcgccggcgagatggtggcgatcgtcggccccaacggcgccggcaagtcgaccctgttgcggatgctgtcgggcgatctaaagccatcccgcgggacgaccaggctcaaagagcgcgacctgcacggctacggtccgcgcgagctggcgcagcaccgcgcgatgctgtcgcagcacgtcaacgtcaccttcccgttcacggtcgaggaaatcgtcagcatgggcgccggcgagagcccgcgcacggcggcgcgtggcctggtcagggcggcgctggacgaggtcgggctggcgcatttccgttccaggcaattgccgacgctgtccgggggcgagcagcagcgtgcgcatttcgcccgcgtgctggtccaactcgcctgcggcgaggcgctgcatgggccggggctgttgctgctcgacgaaccgacatcgagcctcgatctgcggcatcagatcgacctggtcgagaccgcgcggcggcgcgccgcgcgcggcaccgccgtgatcgcgatcctgcacgacctcaaccttgcgatgcggttcgccgaccgtatcctgctgctgcatcgcgggcggcttgccgtcgacggcgaccgcgccgccgccatgcggaccgacacgctccggcagatcttcgaaatcgacgccgcgatcgaccacaccgcaagcggcgtgccgttcctgctgccgcaaaccatgcggccggcgagcaaggcgacgtaaggccgcaaggcttatcccgtcgcaacatcggcgattcacaaaactgtcagcgggctgtaacaggcgccccggagaacaccgcatcgtttgtcctttgggagatcaaccatgcgcctgtcactgctctgttccgtcgcctcgatcctgctcgccgcaccggcgttcgcgcagggcgaaggcgaattcccggcgacgctggcgggtcacgccgtgatgccggccgagagcttcatcgacgcccccgccgatgcgccggccgatctgaagacctcgggcaaatacaccaccggcaagcgcgtcgacgccatcggcactgtgatgggcaagtcctacgagcggccgaccggcgtgtcgctgccgttcaagggccagccgctgcagggccattccggcatcaaggcaatgcccgacggcacgttctgggtgatcaccgacaacggcatgggctcgcgctacaactcggcggactcgatgctgtatctgaaccgctacaagatggactgggccggcggcaagatcgagcggcaggagaccgtgttcctgcacgatcccgacaagaaggtgccgttccgcatcgtgcatgaggacactgccaagcgttatctcaccggcgccgacttcgacaccgagggcttccagatcatcaacgacacgttctggatcggcgacgagttcgggccctacatcctcaaggccgacaagaccggcaagatcctcgccgtgttcgagaccgtcgccgacggcaagccggtgcgctcgccggatcactgggcggtgcagtcgcccggcgcgcccggcgccacctacaccaacgtcaatctgcgccgctccaagggttttgagggctttgcctcttccaaggacggcaagttcctgtacggcctgctcgaaggaccgctgtgggatgccgacaagaaggattgggagaaggtcgacggcaaggaagcctcgcgcatcctcgaattcgacgtcgcggcggagaagttcaccgggcgctactggcaatatgtgttcgagcagaacggcaatgcgatcggcgacttcaacatgatcgacccgacccagggcctcgtgatcgagcgcgacaatggcgaaggcaccgccgacaaggcctgcccgcaaggccagcgcggcgagaactgcttccccgatctcgccaggttcaagcgcgtctacaagatcgagctgtcggatgccaatatcggcaagccggtgcgcaaggtcgcctatatcgacctgatgaagatccgcgatccgaacaagaaggcccgcaagccgctcaacgacggcgtctacactttcccgttcttcaccatcgagaacgtcgatcgggtcgacgacacccacatcatcgtcggcaacgacaacaacctgccgttctcctcgagccgcgatccgaacaaggccgatgacgacgagttcgtgctgctcgaggtcggcgacttcctgaaggcgaagtgaggcggtcacactcgccgcatacacgcctgtcgtcgcccggctcgcccgggcgacccagtattccagaggcgttcgagttcaactgataggccgcggcgtactggatgccccgctcaaggcggggcatgacagtgcgtatgcgaaggctggtccggtcctcctgcgccggtggccgcgcgagccgtcagaccaaaccaatccgaaggttgtctcacaattgcacttctagcaacgcgctagatgatgatagccttcgccgatactgaatcgctgcggggcaaatcatgggcgaaaaatccattttgacgtacattgaggcgctgatcgccgcgggcttcattgcatacctggcctgggaccaaagctggggcctgcccccgccatgcgtcgccttgatgctcggcgtgatcgtttaccttgcctatttgtgcctgatgcgatggttggtgcggcttcatcagaacacctatcaggtcgtggccacgatgctggcccttgcttgggccgtactggcctatttcgcaacgggggcgctgcaagcgggattcgccaaccagatacccgcctcgctgctgatgtatctgtggccgtggatcgcggcgatcgtagctttcctcgcagcactcgccagcaaggtgcgcttcatggacgatgttcgcgcacatgccctcgaccgtcgcgcgcgctggaacgatcagcaatggctcgaggagagcgccggcttctaaccggcgctctcgcacgcatcggcggcaatcagcggcggccgacgcaggtcagcccgccggcaccatcacgacgcccttgtccttcggccagcgcatccgccaggcgaaattgatgtctttgatctcgccgggcttggcctcgaacgcccattccagcacgccgcgcctgtcgcgcagattggtggtggtcgcaggcgtcgaggagggcagcatctcgaccacgatgtcgtcgttctcgctgaccgggagctgatcctggatcgcgaccttgatcgggaagtcgtggccgttgcgcaccgtggtcttgaacgcacgctcgtcggtcttcgacgtggtcacgatcaggccggccgagccttcgttgcgcttcaccaccgtgcgctcgatcttgaccttgtcgtcggcgccgaagccgagccgcacggtctcgtccttggcggccgtcaccatccggctgcggccgacgaagatgccgtcgcggtagatcgagacctgccccggcagcagaggcgcgtcgtcggcctgcacgaagctcgcttccaggaacgcggtcggatcgagcacggggacggcgcggaccgcgagatcgggggtgatcgtcgccgtcgcgatgcgcaggctcttggcgccttcattggctgaaacgctgacgcggccggggatcttgaaggaggcctggaaggcgccgatttccgccgtcgcctcttgttccccaaaggtcgacccgccattgaagcggaattgctggaccatatcggcctgcggcgcaggcgccacggcctcacgcgaccgtatgctggccgacggcagcggccgcggcggctgcgggtattgcacgagcagtgaattgagctcgggcgcgttgccgccccgcgcaacccgcacggtggagaccgcaagcgccacattcgaccagtcctcgccggtcgactgggtgatctcggcgcgacgcaccagctcgatcgcaggcttgcggtccttggtgccggtatcgagacgggcgtcgtaaatcggcatccagcgcgcattccgcaccgcataggtcacccgcagggtagccttggtagcagcggcggaggcaagctcgatccgtacctcgaggtggctcggcggcttggcaccgcggtcggcttccaggcgcgccagttcgcggtcgatgtcgcgctgcttgcgcgtggcgtcgcggatcgcgctgtcggcggttgcgacttcatccgccaccgcagagaacgccgcccgccattcgctgaccgggcgtgcctcgcccttctcgccgatcccgaccggcgcggcctcggcgaagtgctcggcgaatttgcgccgcgcctcggccgagctgatgatcccctgcaaatcctcgcgctgatccctcagcgcctcgatccgcttgtcgatgtcgggcaggttgaccggcggcaccaggtgcggcggccgcgcgtcgatggcaccgatcgtcagcttggcgccggcatcgccctcgacccggagcgaggatggatcgagccccatcgggaaatccttcgcgatgagcgtgttgtctccggctggcagatccagcgtgatgacgcgggtaacgctcgcgccatccggatagacggtgacggcgtcgacctgcgacgctgtatcgagatcggccgcgtggagcggcccgacaaccagcgcgcccgccagcaccaggctggtggtcacaagacaattcgcagtccttcgcatcacatccctccgggaaaacgccgcatcgcgtgagatgaacggtgcgccaaacgcgaaggcgcgccgcttctcgtggtgagacgcaacaaggaagagactggttcgattgaggtttccgtgcggcgcgagcatggcgccgccgcggctgccagatggcgcggcgatgttttcgggcgctagtgatccgatctgcgcctaatgaacaggtaattcggcacgaagccggcaatggtgatcgcgatcatgatccaccagccgcgctggaatgccgcgatcctgtcagccatcgtggccggcgtagccaggatcgcgacaaagatcgcgacgccgatcgcaagcatagcctgccggatcatgttgatgacgccggagccggtcgcgaacgacgacggcggcagcgagccggcgccgacgcccatcagggtcggaaaggtcagcccgacgccgacacccgtgagcatcatacccgccacaaaagcaggcatgtcggggtctgcaccaagccacgttgcccagatcataaggccggccgcgaacgacatgatgccgaccgacacgacggcggccgcaccaaatcgcgcgatcaggcgaccggcgaacaacagagacgtgaacggaacaagcagcggacccggcgcgatcgcaaggccggtcttgagcgccgaccacccccacacggtttgctcccacagcgccaccgacaacagcatcgcgccgaatgccgcggagtaaggcgccatgaccagcgtcgcaccggtgaacggcctgaccgtaaacagtgcgggatcgacgaacgggttcttcgaacggagacagtgccacgcgaacgcggcgagcgagaggcccgcgacggcaaagccgagcacgacgcctcgcgagctccatccccagtcattcgccttcacgatggcgaatgtcagcgcgccgatgccggaggtcaccagcagcgccgcccaccagctcggacgcggcacgtcgtggccgggcacttcgggcagtttgagccagccgatgatcagtgcgacgacgccgatcggaacattgacgatgaagatccagcgccagtcgaaggtgaccagcacgccgcctgccagcggcccgagcgcggccgcaagtccgccgatcgcggtccaggtccgcaccgcacctgcccgctggtcgggcggaaacgacgccaggagcaggccgatcgaggtcggagtcatcaacgcggcaccggcggcctgcgcgacgcgggcaacgaccagcaattcgacgttaagcgcgagcgcacaggccgccgacgccgccgtgaacagcgcaacgccgagcagaaagctcagattgcggctgtggcgctccgccagacggccgaaaaacaccaggagcgccgcatagacgatcgcatagccgttgaggatccaggacagatcctcgagcgaggcgccgcggaattcctgcgcgatgatcggcagcccgacattgacgatgaacaaatcgagatttgcgaggcagatgccgaccgatacgatcgcgaggaccagacgcggtgaggccgttgcaacccgaacccgcggccgcgcgtcagttgcggtagccggcccgatcgtctccgcctcgatctccgacatcgcatcccccgtataagtgcatatgcatctattgctattaggtgcatatgcatgtatatgtcaagcgtattggaggcggtgatggcgaagatcgaaaccagtcggtgtaatctcacggcattgcgcaaggcgacgcggcgggtgtcgcagctttacgatcagatccttgcgacgtcagggctgcgcggcacgcaacgggccattctggcctatgtcaaacgctcgggctcgccgacgatgggggaactcgccgcagcgctggtgcttgatcgcaccgcgctcaatcacaacctcaagccgctggagcgcgacggccttttgaccatcaccgtcgacaagaatgaccgccgcagccggctggtgcggctgaccaaacgcggcgaagcgcggctcgatgagtcgcggtccgcctggctcgaggcgcaggagcgcttcgagacggcgtttggcgccgggcaggccgcagatctcaggcagacgctcgaactggtcgctgcgctcgaattcggtgagcgcgcggcggatctgccggcggcttgatcgacttcaagtgaaaagcggcccggcgttaccgccggaccgctcgttctcatgcaatcagtattgatcgcgctcagctatagatctcgaacaggccggcgccgccctgaccaccgccgatgcacatggtcacgacgccccacttggccttgcggcggcggccttcctgcaagaggtggccggtgagccgggcgccggtcatgccgaacggatggccgatcgcgatcgagccgccgttgacattgtacttctcgggatcgatgccgagttggtcgcgcgagtaaaggcactggctggcgaacgcctcgttgagctcccagagatcgatgtcgtcgatcttcaggccgtgacgcttcaacagcttcggcaccgcgaacactgggccgatgcccatctcgtcgggttcgcagccggccgaggcccatgccacgaagcgaccgagcggattgaggccgcgcttctctgcgtccttggcctccatcagcaccacggcagcggcgccgtccgagagctggctggcattgccggcggtgacgaacttgcccgggcccttgaccggctcgagcttggcaagaccttccagcgtggtctcggggcgattgcattcgtcacgatcgaccacgtagtcgacgatcgtctcggccttggtcgccttgtcgaccaccttcatcttggtcttcatcgggacgatttcgtccttgaacttgttggcctgctgcgcggcggccatgcggcgctgcgactccagcgaatactcgtcctggtattcgcggctgagcttgtagcgctcggcgacgatgtcggcggtatcgatcatcgccatgaagatgtcgggcgcggtcttgagcaggtccggatcgatcgattccttcggcgagccgccgccgggaatcgagatgctctcgacgccaccggcgacgatgcaatcagaaccatctgaacgaatcgagttcgcggccatcgcgatggtctgcaggcccgacgagcagaagcggttcaccgagacgccggcggtcgacttcggcaggccggcgagcagcgcggcctggcggccgatgttcggcgcgccatgcgcgcaattgccgagatagcagtcctcgacatattccttgtcgacgccggcgcggtcgaccgcgtgcttgatggcgtgcgcggcgagtgacatcggcggggtgatgttgaatccgccacggccggacttcgccaggccggtgcgcgcataggaaacgattacggcttcacgcattgttttctccctctgagatgacggtcattgtggcgtgtcgtggcccgttcgtacacatttttcggcgggcgcaacagcaataccggaggccccggaacgccaaacgccgcctccggggccggagacggcgtcatgttccgcagatcggaatttgaatgcatttgaacggcaacttccctcgtcatgcccggcacgtcccggacgacgaagggccgctcaaacagcgtttaaaacgtgagcgctttggcctgcttcacctgcggcagcgcctgcaccttggcgagcagctccgccggcaccgcgccgtcgacctcgaccagcgcaatggcgtcgccgccctgcttgacgcggccgagatggaaggtcgcgatattgattttcgcatcacccaagaggctcgcgaacgcgccgatgaagcccggcttgtcctcgttggtcacgtagatcatcgacttgccgaattcggcgtcgacgcggatgcccttgatgtcgacgaggcgcggcttgccgtcggcatagacggtacccgacacagaacgctcctggcgctcggtcgcgactgtgaccgtgatcaggctctcatagtcgctctgcgctgcgcggaccacctcgtccaccaccatgccgcgctccttggcgacgacaggggcggacaccacgttgacctcgcccagcatcgggcgcagcaggcccgacaacaccgccgaggtgatcgccttgatcttcatctcggcgacgtggccctcataggtgatcgtggtcttgaggatgccgctctcggtgagctggccggcgaacgaaccgagcttctcggcgagctcgatgaatggcttcagcttcggcgcctcttccgccgtgatcgaggggaagttgaccgcgttcgagatcgcgcccgacagcagataatccgacatctgctcggcgacctgcagcgcgacgttctcctgcgcctcggtggtggaggcgccgagatgcggggtgcagatcacgttgggatgaccgaacaagacgttcgtcgtcgccggctcctcgacaaacacgtcgaacgcggcgcccgcgacatgcttggaattcagcgcatcgaccagcgcctgctcgtcgactaggccgccgcgggcgcagttgatgatgcggacgcccttcttcatcttggcgatcgcagccgcgtcgatcaggttgcgggtcttctcggtcagcggcgtgtgcagcgtgatgaagtcggcgcgcttgagcaggtcatccagctcgaccttctctacgccgatgtccttggcgcgctccggcgacaggaacggatcgaacgcgatcaccttcatgcgcaggccgagcgcgcggtcggcgacgatcgagccgatatttccgcagccgatcacgcccagcgtcttggcggtgatctcgacgcccatgaagcggttcttctcccacttgccggcctgggtcgaggcgtcggcctgcgggatctcgcgcgccagcgccagcatcagcgtgatcgcatgttcggcggtcgtgatcgaattgccgaacggcgtgttcatcacgatgatgcccttggcggtcgccgcgggaatctcgacattgtcgacgccgatgccggcgcggccgatcaccttcagcttcgtcgccttctcgatgatcttggcggtcgccttggtggccgagcggatcgcgaggccatcataattgccgatgatctcggcgagcttgtccttgtccttgccgaggttgggctggaagtcgacctcgacgccgcgatccttgaagatctgcacggcggcgggcgacagcgcgtcggaaatcagaactttgggttttgtcatcggaatgatccgttgctgaacgatgcgtttgaatacacgacggccgcgggcacgaagcccgcccggccactctgcgcgatagatggccgggtggagcccggccataacgatgatgagttacgcgaagcggcttgggccgcctctttaggcagccttgttatgcagccttgggcagcgctgccttggtctcggcgaaggcccagtcgatccactgcgtcagcaactcgacatccttggcctcgacggtggcgccgcaccagatccgcaggcccgccggcgcatcgcggtagtacgcgaagtcgaagccggcgttctccttctccaccagcgcgaccagcttcttgcagaagtcggcctgcgcgtcagcgggaagcgaggtaatcgcgggatcggtgaacttcaggcacaccgaggtgttggagcggatcgcgggatccttggccaggaagtcgatccagggcgtccgcgccttccagtcggcgagcgccttggtgttggcgtcggcgcgcgcgatcagggccttcaggccgccgatcgacttcgcccaatgcagcgcgtcgagataatcctcgacgcagagcatcgacggcgtgttgatggtctcgccctcgaagatgccctgattgagcttgccgcccttggtgaggcggaagatcttcggcagcggccaggccggcttgtaggtctcgagccgttcgaccgcgcgcggcgacaggatcagcatgccgtgcgccgcttcaccgccgagcgccttctgccaggagaaggtgacgacgtcgagcttggcgaaatcgagcggctgcgcgaaggcggccgaggtcgcgtcgcagatcgtgaggccttcacgggttgcgctgatccagtcggcgttcggcacgcgcacgcccgaggtggtgccgttccaggtgaagacgacgtccgacgccggatcgaccttggagagatcggggatttcaccgtaagccgcgttcagcttggtgacgtccttcagcttcaattccttgacgatgtcgctgacccagccctcgccgaaggattcccaggcgagcgtggtgaccggccgcgcaccgagcagcgaccacagcgccatctcgaccgcgccggtgtccgacgccggcacgatgccgatcttgtagtccgcgggcacctcaagcacttcgcgcgtcagttcgatcgcgagcttgagcttggccttgccgaccttcgcacgatgcgagcggccgagggcggcgtccttgagattgtcggggttccagccggggcgcttggcgcaggggccggaggagaaatgcggcacgttgggccgcgaagcgggcttcgctgcagtcataatctacccttccagatagctgcctctcggtggggagaggtttcccgcggtcggagatagtggaagggtgcccaaacgtcaaggaagttcagacttttccggaacaatcgggagatcacggctgattgatggggcgtcctcgacctgctgcaacgtctcctgatcgagcagatctgccgccagagtcatgatcttaactgccttgcgccggctcgatattttcaaaatgctcttgtcgccggcctgcacgatgtactcgttgccgacccgcacgatcgaataatccgacatcccaatccccagttgcccgccgccccgtgggagacgccggacataccggactcgttccgacccgtaaaatcaccgaggccggcttagtttattggctgttaaccggatagccgagcagcggctaccgcaggcattgccctgcgtgcggcacaacttcgatcgcgtagctcaaaagcggagcgtcatgccgagatgactgcgcgcgaatccaagccgttcatagaagcgctgcgcgtcgacacgggtgtgatgcgtcagcagctcgaccagcgtgcagccttgcgcgcgcgcctcggtcaccgcccactgcaccaacagctcgccgatgccgcggctgcggcaatactttgcaacgcggacgtcctcaagcaggccacgcgaagagccctgcgagctgatccccggcagcaccgcgagttgcaggcagccgacgacggcgccctcgccgtcgacggccaccacgagctgcaggttcgcatcacgctcgacccgcgcgaaggcttcgtaatagctctgcggcaacggatcttcgatccgctcgcgcgcgctgccgagtggatcgtccgccagcatgccgacgatggcggcgacatcctcgcgccgcgcgcgacggatcgtgatgcgtgaggcttcagtcatggcggcgttcacccgaggtcagcggaccggcggcagcgcgagcacgtgctcggcatcggcgatccagcggcggatcatcggatagcgcgcgagtgcgaggccgccgtcctccgccatgcgcgtataggcgagcaacgacacgtcggcgagcgagaatgcatcgccgaccaggaattgcgtgcctgccaggtgccgctccaggtgatcgagcgcgacatagccgcgcttgatcaggttcggatcgatctcggaaaccgccttgccgagatacacggtctggaagcggcagacggcgacatatggctcatggctgttctgctcccagaacatccaggcatccatctgcgccgcgcgatagggatcgccgggaatcaggtcgctgccgcgcgcgaggtagcggatgatggcgttggattgcgcgagcgtgcggccgtcatccagctcgaccgtcggcacctggccccagccgttcagcttgaggaagtccgccgtccggctgccgcccttcatggtgtcgatctcgacccatgtgtagggcagcgccagcttgtcgcagacccatttcaccttcaggcaattgcctgaattggcgtcgccgtggattttcatgtgaggtcgctccgcttgcggagcaacatcggatcagccgcacattgcggtgtcaagcgacgctgcgctggtcagaacttgtagccgatggccgcacgcacgctgttctgtgtgaccgacgtgttcttgaccggcatgaacttgacgtattcccactcgccgcgcaggaaaacacagttccacagcatgtattccaggccgagaccagcggtccagccggcaacgtaagcgtccgttttcgcatccgtcgcggtttgcgcaaactgcggaagtgcaaagttggtcgaacttccatcggcaaagttgatcgttctgttcacggagctcgtgaccgtgcgcgaaacatccattcggccgaccgcaaggccgccgaagatgtaaggcaggaagtcaccggttgcccaacccgcccggccgcggaacgtcatctcgtccttgagcttcatcgaagcgcttccattcaacgtcacgctgtcggcggcagtggcgccgaccggcaggaccagggtcggttgtgcgacttgaatcggacccaaacttccggtcgtcgttgtggtaagcccggaccaataggtatagtttgcttcgacaccgaccacgacgtcgtcatactgccagttgcgcccgacaaacgctccgaagcccgagctttgcgcattgacccgacccagcagattgaactgggatgtcggtccctgcagcgtggtgttgcggaatatcgaattggtcagggatgcaacgctaccgccaaagtcggtgttgatccatgactggccgacctggccgccgacataccagccgtcccagtttctggttggtgcgctggaagcgggcagactgccgcgaaggaaatcaggcatgtcggccgcctgcgcgccggtcaccgccccgaacatcatcgccgccagcaagaacctacgcatcgcaacgctccatcccactcatcgaatgcgcgttgatcatcgcctgttaaccttaaccaatcgtttcgccggcggctttcgagcatgcaagttgcaagaagctcgcgacatcacgcggcaaagcaaaacggcgcgggacgatcccgcgccgttttcaatcgttaaccgtgaaggctcgaaattaacccttattagcccttgcggatcagcgggggcggcggcggcgggggcggcacgtcgcagcacggcaggttgaaacgcacgcctagcttcacatcctgcgaggtgatgtcgcggtactggaagctcgagggaccggccggcgtgttgtcgaagaagtgaccctggccctggccggcggtgcccatgtcgagatagcgataggccagttcgaccgtgaagttgttggtgaccttgtaggcgacaccggcgtgcagtgcccaggcgaagttggtcttggtggcgccgtcggcgatgaaggagctggtcaggcccgatccgctcgggaacgtcgcattgtcggagaaggccgcggtcttgatcacagcggcaccgacaccggcaccgatgaacggggtcaagcaaccccaggtgccgagatcggcgtagacgttgacgaggccgacccagctctgaatgccgccatgataggtatcgcccagcgagctcggcccggggaacgtgaagaagtcggtgccgttgaagctcaccttcgagcgatactcaccggtgacgtcggcgcggaaccagctgttgaattgatagccgacgccgatgccgtagagcatgccgccgtcaaaaccgtggccatactggttgaaggccgtgccggccggcagcctgtcgtaggcgttgacgtgcagcttggcctgggtgttggtcatgccgatgtcgccgcgcagataccagccgccgaaatcctggaccggcgggggtgcatacgccatcgggggcggcggcatgatcggcatgtcggcagcgaacgccgccgaggacagcagagatgccgcgcctgcggcaatcagggtctttacgctacgcattggcttcgtccttttgggccagtgaggcgacacaaagccccacgtctgaaactcacgggcggacgatgccagcaaatgtttaagcggcacttaaccctaatttttaaggttgattttctgtcacctatttctgctcctgttgcttatgggtccataaatacgcgcatgcggcagcgaaagatggcgattgcgccacaggtgctaatgaagcgttgacgcaggcgcgccatttgcagcgcacgcaagctgcgcctgttagcgaaggcccaatgaagacgcgccgtacggcgagagctcagcgaacggccttcggcatcttcggcaggaacaccgcgagcaggccgatcgccggcaggaatgcgcagagctgatagacgaaggcgatcgaggtgtggtcggcaagcttgccaagcaccgcggcgcccagcccgccgatgccgaacgcgacgccgaagaacacgccggagatcatgccgaagcgatgcggcatcaattcctgcgcgaacacgatgatcgccgacgtcgccgacgagatgatcaggccgatcacgaccgtcagcaccgcgctggcgaacagcccggcatagggcagcgccagcgtgaacggcagcgcgccgaggatcgagaaccagatcacgtatttgcggccgaagcgatcgccgagcgggccaccgatgaacgcgccggcagcgttcgcggcaaggaagatgaacagatagagctgtgccgcctgcgtcgagacgccgaaccggtcgatcagatagaagatgtaatagctcgacaggctcgagacatagagctgtttggagaacagcagcgcgaccagcacgacaagtgcggtcatcacgcgccgccggtccggatggtccggatgccgctcgatggcggcggccttcttgccggcaatctgcggcttgtaccagacgccgatgcgccagaggatcacgatggcgaggaaggcgatcgaggagaaccaggcgatcgagggctgaccgaacggcaccacgatcagggcagcgagcaccggtcccatcgaggtgccgaaactgccgccgagttgaaacaccgattgcgcgaaaccgtagcgcccgcctgacgccagccgcgcgatgcgggaggattccggatggaacaccgcagacccgagcccgaccagcgaagccgcgatcaggatcatcccgtaggagtgcgcgacactgagcagcagcagcccgaaaaaggtgaagcccatgccgatcgaaagcgaaaacggctgcgccttcttgtcggtgaagtgcccgaccagcggctacagcagcgaggcggtgaactggaacgccagcgtgatcatgccgatctgcgcgaagtcgagcgcgtaattgtccttcaggatcggatagaccgacgcgatcagcgactgcatcgtgtcgttgaggaagtgcgagaagctgatgcctgcgagcacgacataggccggccccgcagcggcggccgccttcgcggcctgcgctgagcccagctcggcgacctgcaccggttcacccagcgtctgttcgctcacgacgggtttgttcactgcagcattcccggatagtttcgcaaaaaatacctccgcgtcgtacgacgcggaggcagccgggaccagttgcgctagccgatggcagcgatgcgccgtgtagtagctgcccggcgatcgaactctcagcccgtcatcgtgaggagcctgcgcagcaggcgtctcgaaggatgaatcggccacctgccgggccgtgcatccttcgagacgcgcgccaaagcgcgctgctcaggatgacggatcggcaagcctctatatgggagaattagctgcccttaagccgccgccgcgtggccgagtgcgctgacgatgttgtcgacgacctcttccaccaggatgcggtcatcgccctcgcccatcacacggatcaccggctcggtgccggaggggcggatcagcaggcggccatgaccgttgaggcgcttctcgccgtcggtgatcgcggacttgacctcggcgtcgtcgagcggcttgccgctgcgatagcgcacgttcttcagaatttggggcaatggatcaaagcgccggcagatctccgacaccgggcggcgcagcttctgcaccacggccagcacctgcagcgcggcgacgaagccgtcgccggtggtcgaatagtccgacatgatgatatggcccgacggctcgccgccgagattgtagccgccgctcagcatctgctcgagcacatagcggtcgccgaccggggtgcggaccatcgaaagcccgtggccctgcaggaagcgctccagcccgagattggacatcactgtcgtgacgatgccgggcttggcgaggcgcccctcttccttccagctctgcgcgatcaccgcgagcagctggtcgccgtcgacgatgtggccacgctcgtccaccaggatgacgcgatcggcatcgccatcgagcgcgatgccgatatcggcgcgcatctcgcgcaccttcctcgacagcgcctccggcgaggtcgagccgcattccttgttgatgttgaagccgtcgggctcgaccccgatcggcaccacgtcggcgccgagctcccacagcgcttccggcaccaccttgtaggcggcgccgttggcgcaatcgaccacgacgcgcaagccgtcgagcgagaggtcgcgcggcaaagtgcgcttggcgaattcgatgtagcggtcgtggacgccatcgatgcggcgggcgcggccgaggctcgcgctctgcgccaggcggcggtcgagcgattcatccagcaactgctcgatctgcttctcgacgtcgtcggacagcttgaagccctgcgggccgaacagcttgatgccgttgtcctcgaaaagattgtgcgacgccgagatcatcacgccgagatcggcgcgcatcgacttggtgagcatcgcgatcgccggcgtcggcatcgggccgaccagcagcacgtccataccgaccgaggtaaagcccgcgaccatggcgtattcgatcatgtagccggacagccgcgtgtccttgccgatcacgacgcgatggcgatggtcgccacgctgaaataccaatcctgcggcctgccccaccttgagcgcgagctccggcgtgatcagtccattggcgcggccccgaatcccatcggtcccgaaatatttgcggctcatgtaacccccaacacggacccctcgaaccatccggcgagagagccccgaacgcccaccagtctagcgtgcatcggccttatagactgtcaggcgctaagatgacttcaaaaaatatgatgaatcattaccatggccgaaccacattcttcagccttaagacgctgaaaaatataacattcctgtcgttaagacaatccccggggacgcgcgctgtcccctaccctttgccgttgcgcttgacgtgctggtcgcccttggtgggggccggctgggtgacattgacgggatcggaaccgggaaacgtctcctccaggccctcttccagggcctcgtcgagccggcgcttttcggtattgtcgtccggcttcggcttggagcctgattgcgtcatcgtgctctcccatccgtcttcgatttggcgggcccttcaaccatgctagatgacggcaagaccgaacatctgcaagaactcgctatctcagaacttgcgacatagaagaaggccggaaacgtccatgaagcacattacctgcatcgaagacctgcgccagctgcacaagcgccgggtgccgaaggcgtttttcgattatgcggaccgcggctcctataccgaggacacgctgcgcgccaactccgaggacctgcagcagatcaagttccgccagcgcatcctggtcgatgtgtccaagcgcagcctcgcgaccacgatcctgggcgaaccggccgcgatgccgctgatcctggcccctgtcggcctgctcggcatgcagcatggtgacggcgagatctacgcctgccgcgcggcgcaggcggccggcatcccgttcacccagagcacgatgtcgatctgctcgatcgaagacatcgccgctagcgtcgacaagccgttctggttccagctctacgtcatgaaggaccgcggcttcatcaaatcgctgatcgagcgcgcgatcgcggcgaaatgctcggcgctggtgttgaccgtcgacctgcaggtgatcggccagcgccaccaggacatcaagaacggcatgacggtgccgccggaatggtcgctgtcgaagctgatcgacttcgcaaccaagcccgcctgggtgtcgggcgtgctgcaaggcaagcgccgcaccttcggcaacatcgccggtcacgtcaaaggcacggaggatctcaccaagctatcggaatggaccgcctcgcagttcgacacctcgttgagctggaaggacatcgactggatccgcagcatctggccgggtaagctgatcctcaaagggattctcgatgtcgaggacgccgagctcgccgccaagaccggcgcgcaggcgatcgtggtctccaaccatggcggccgccagctcgacggcgcaccgtcctcgatcgaggtgctgccggagatcgtcgacgaggtcggatcacagctcgagatcatgttcgacggcggcatccgcaccggcatggacatcatgcgcgcgctcgcgctcggcgcgaagtcctgcatgatcggccgcgcctatgcctacggcctcggcgccggcggccaggccggcgtcgccaaggcgctcgacattttgggcaaggagctcaccaccaccatggggctgtgtggcgtcaacaccatcgccgagatcgacgacaaggtgctggcggtttgaggcgatcgtagccacaaactcgtcgtcgtcccggcgaaggccgggaccatcaccacagccgcgcgagatttgaacgcggctgtggccacagcctttctcaacaatcgtcatcggtggttatggatcccggccttcgccgggacgacagcggagcctgcggatcgagatcccccgatgcgcaattgcgcatctgaggttcgatgctacgcatcgccccggaatgacacttcgtgtcacatcggcggcgcgatgccgtcgcggccgacattgacgcggttggcttcgagcgtgccgtcgtccttcttgaccgcgccgaagatgatgatcttggcgcccggcttcagctccgacttgtcgccggagacaaaggtcacgaccggggtgccgggcggcaccaagaccttcttctcaccgtccttgtatttcaccgtgatgttctggccgtcggtgccctgcaccgtctcggcgacggtggcattggtcatggtcgagttggcgcgcaggtcccagggacgaaaaccttcggcggcgccgcgctgattttccgggaagatgtgaaccgcgatcgccctctgcgtcccgtccggctcgggcatcgcggtgacgccgatgtaggaaccggacttgatctcggacagatcggtcttggcgacaccgaacaccgcgacgttatcggtcgtccgcaccttcatgtcggcgccgtcgcgcgacttgatcgacagcattgcgccgtcgacggcctcgatggtgccgcgaatgcgcacggtcggcggctgctgcgccgacgcggtcgaggcaacggcaacgagaagcaatgcggcaaggaatggtgacttcggcatggtgtccctcatgggtttggctggcgattggggaacaccggggaattggtggtattccgtgcaagccacaactcctcgcgggagtgacggcttgcacgacatttacgcaccggatgagggactgttactgcagtcacggacaggtgatgcgcttgagcgctgcacggcgatcgtagcccggatagtcttcgtcgtcccgggcaagcgaatcgcgacccgggacgacgtgttgagagagctacgcctcgcgtcacatcggcggtgtcagcccgtcgcggccgacgctgatgcggtcggtctcgaacgagccgtcgggcagcttcttcatgaaggcgatgaccttggcgccggccttcaggtccgccttgtcgccgggaacataggtcacgaccggcgtttccggcccgacctgcactttcttctcgccgtccttgtacttgaccagcaaggtatggccgtcattgctgaccacggattccgcgacggtcgcgttggtcatgctgctgttcggcttcagatcgtaaggccgcgaaccttcaccggtgccgcgcatgttttcggggaacacatgcacctcgaccgccttcggcgtgccatcggggccgggcaccgtggtcgtgccgatgaaggaaccgaccttgatgtcggacaggccgatcttggtgaggccaagcaccagcatattccctgccatgtgcagcttgacctcttcgccgctgcgcgacttcaccgccagcgtatcgccatcgacgctctcgacggttccgcgcacccgggtcggggtcggcggctgctgcgcaagcgcgtagagcgtggatgccgtcaccatcgcaagcgcaatgaacggacgaacgagatgggagcggcgggcaagcatggttgatctccgggagggaacgcggggggactaacacgagaccccgctccggagacgctattccaaggctcaagtctttgtgagatcggcctcgacgatcgcacgcagctccgccgttacctgcgggcgctgcccgaaccaaagctcgaaaccgcgcaccgcctgatgcagcagcatgccgagcccgtcggcggtcctcagcccccgcgccgttgccgccgcaagcaacggcgtcaccagcggcacgtagacaatgtcggaaacaaccgcgccctccggcaacaggccgatatcgatctccaacggaggctggccgtgctggccgagcgacgtcgtgttcaccagcagccccgcgcgcggcaacaactcgccgaccgtgtcccaggtcgcaggatgcacacctgcgccgtacagggcggcaagcgcgcgggcgcggtcgatcgttcgattgaccaggtgcacgcgcgcaatcccgcgctcgatcaggccgaacaccaccgcgcgcgctgcgccgccggcgccgagcaccagcgcgtcatcggtcttgtcccagccgggcgcgcaggcgtcgagattgttgatgaagccctcgacgtcggtgttggtcgagcgcaactcgccatcggcgaaccacagcgtgttggcagcgccgacggcgcgggcgcgctcatccggcgccgacagcgccagcgcgtgctccttgtgcggacgggtgacgttggcgccgacgaagccgcgcagcgacaggcggaacaggaaatccttgaaatcctccggcggcaccgcctcgatcacgtagccgccctcgatgccgagggtgcgcagccagtaatgatggatcagcggcgagcgggaatgcgccgccggccagccgatcaggcacgcggcgcgggttttgccttgggatggcatgcttgaggatgtcatgaccgtgacatcggccaaggcacgtgcgctgtcaatccgtccgcttcgtgttcccgaaaaccagcgcgctgaggatgaaggcggtgccggcggcgaaccagatcgcggcgagattgatccagtggtaggcgatggcgccggccagcgcgcccgcgaccaacgccgcccatagcatcagattcggtagccaggcccagcctgcgccgccggtcagcgcggcggcaatcaattgcccggccttgaccagcgccccggtgacataggtcaggccaagcccggccccgcctgcaagctggaacaccgcgttctcgagccccatcgccagcacgatggcggcgacggcggtgttcggcagaccattggcataggccagtgccgctgccgcgagcagcagcgcctcgaccagcaggatcagtggctggcgatgcgcgaagcggctgagcacgatcaggctgccggccgcggcacccacaacgaacagcacgatcagcgccagcgcctccagcgcgtgctgccaatgcccctcggccagcgtgacgccaagtcgcgtcgaattgccgctcatgaaagagacgaacagtccgccgagctgcagatagccgatggcatcgacataaccggccagcgcgctgagcgcgcaggccagcgccaggttacggcgggattccagcatgatgaccttgcgcccccatggggacgcaagctagctggccgcggccatcctgccaacgatcacgcccgcagtgcgtgatcgcagcgccagcgtcacgccgcgtcgcgatgcgcggcgatgatctggtcggcggcgcggcccgtcacttcggccatgcggtcgaactggcgggtgaaggtgccggcgccggcggtggccgagcgcagctccacgatgaggtcgccgatctcggattccggcatcgtggcgcgaacgcagtcccagccgctccagccctcgcgggtgtcgaagccgaggatctggccgcggcgcgccgacaggatcgcattgatcttggcggtcgcctcggtcggacacacgatctcgaccatatggatcggctccagcagcaccggctggcactgcggcaacccctcactgaccccgatccgcgccgcggtgcggaacgcgaggtcggaggaatcgacgctgtgataggagccgtcggtcagcgtgacgtcgacgtcgatcaccgggaagccgagcggtccccgcgccagcgcgtcgacgacgccctcctccaccgcgccgatatagttgcgcggcaccgcgccgccgaccaccttctcgtggaattcgaagcccgatccgcgcggcttcggcttgatgtcgagcacgacgtcaccgaactggccatggccaccggactgcttcttgtgccggccgcgctgcgtgatggctttacggatggtctcctggtagccgatcgccggcggatgcgatttgacgttgacgccgtagcggtccttcagccgctcctgggcgacgcgcagatgcatctcgccctgcccccacagcacggtgtcgtgggtgcgcgggttctggatcatggtcagcgacggatcctcctcgttcagccgcagcagcgcctggccgagcttgacgtcatccttgcggtcggtcgcggcgatcgagatcgacagcaccggagccgccggctcgaccttgaccagcgaggccggggccgtcttgccgctcgagaccgtatcgccggtcttgatcgcgtcgagcttgccgagcgcgacggtatcgccggcctcggcctgcggccgcttgctgtcatgcgcgcccgagaccgcgaggatgccggaaacgcgcccgctgtcgccgcttgaggattgcagcgtcgcgccgtcatcgaggcggccggtcagcacgcgcgtcagcgacagcttgccgccatgctgcaaatgcacggtcttgaacacaaaggccagcgcatccttctgatccttgatgccgagccgtttggcggtctcggtgacgcccggcgactcgtggcgcagcgccttcatcaaacggagcacgccgttctcgcggctcgcagcgccgagcagcaccggacagatcaacccctcgcgcaattcgcgggcgagatcgtcgaacacggcatcgcgcggcggctggatgtcctccagcaattgctccatcagcgcgtcgtcgtgatcggcgagcttctccagcatcgagaagcgcgcttccttctcgcgatcgagattgccgccctcgagcgccatcacctccgacggcttgtgctcgcgatagacgaaggcgcgctccagcgcgagatcgacgaagccctcgatcagatcgccgttccagatcgggatctggcgcagcaccagcggcacgcgcgaggccggctgcagcgtcgcgagcgtttcgcggacgcgcttgttggcgcggtcgatcttgttcaggaacaggaaacggggaatgccgagctcctcgagctcgcgcaggatgatctgcagctgcggcagcttcttctcgtcagcctcgcagaccacgaccgcagcatcgaccgcgggcaacgcggcacgcatgtcgtgcgcgaattcgatcgagccggggcaatcgataaaggtgtagctgtcccccatgaaggtggtggtagcggcggtcaggccgacgcccatcttgtgttgacgcgcctcggggctggcatcgccgacagaggttccggcatcgacgctgccggcagtcttgatggcgcccgttcgcgccaggatcgcttccagaagtgtggttttaccgctttggaaagggcccaccagcgcgatgcaccgtggacctcggggacttctgacgtcttgtcccattgccgcctcctcgtgttggagctcggcccaagattgggtcggcgaccgttcatgctctgcctgcgcttggcgtttggcaagcgggaaaacgtcgctgcggtgcggcggcgcgaacgttcacgataacggggctgggcaacgccgctctccgaacggatgtgcccgatgcgccggctccttggcgcggcgccgcgccaacgcattcacgatcaggcccgtgaccgaaggctccggccgcgccggatgcagcacgaaagcatcgtcggacaattcggcgcgcgcaatggcatccttctcggcaagcggatgtgcgcgcggcaacgccgcgacatggggctcatcgaggatcaggcgctgcgcgagcccggcttcggctggtagcgccgggcgcgcgaagccgacgtcgatccggcgccgccgcaacgcctcggcaatctctgccgccaggctacgcgcgcgctttagcgacccggtcgcagctccaggctctcgaggccggcggcgatgttgacgccgacctggccctgcacgctgagcggctgcagagcgatcgtgttgtcggagccaccgaccagcacattgccgccgacgccgacgccgagcgtcgcgctgccctgcgcgccggcatagttgcccgagagtgccccaggcccgagccgctccaccggtgcgtagacgccccaggccagcgccgattcctgggtaatgccgagatcgatcccgaccttctggatggtcgcgatgtagcggtcctcgggcaggccattggcgcgcagcacgcagccgagatgggtcacggaaccgacgatgaagccgacgctcgcgccgccgcggcattccaggacgccgacctgtacgcgctggctcggctgttgggcgttggcgccgccgattgcggccagcgtggtgatggcggcagcggcgaggagagtgaagcgacgcatgttggggaatctccggctgagaggcatgacgcgagcagagaactgaacggcgccgtgtccgcggcgcggttgcatcctatgccataacaccgaatggtcagccagaatttgcggtgcccggccaccgattgttgccggatgtggcggtgttgcgatgttccttcggggccgccgcaatggacagcaagcaacagacaaaaaagaggcccgctttcgcgggccccttgatcagacaccgaccggcttagtggtggtggtgatgacggtggtggcgatgatgccggcgcggaccgctggtgcggaccggctcgagatcgatcccggcgataccggccgcgacgttgaggccggtctggccctgcaggctgatcggctgcagcgcataggcgttgttcgggccaccgaacaggaagttaccgccggcgccgaggccgaccgaggcgttgacgccgacgccgccgtagctgccggcgagcgcaccgcgcggcaccaccgtggtcggtgcactgacggcccaggcgagctgggtctgcccggtgaagccgaggtcgacgccgatccgcttcacggtcgcaagatacggctcgggccgacggccgccgctctggaacacgcattcgaggcgggcaacggagccgacgacgaagccgacgttctcgccgccctggcattgcagaaccccggcctgaacctgctggggcgccgcgttggcagtggcgaacggcgccagcaacgcaagcgctgcaagggtgagagtcgaaagtcgcatggatctgtctccgcaaggtgaactgaaattgcaatttgcgcggcggacagaaagcaagggtcgtgtccaaaacaaggcagatcgcaaaggggtcgcaaaaacttcccgcgtgtggcatcgatgttcgcgcacacgcgcgtgaggtgagcaggttgtgaattgactctgcgattttaccggcgcgcgatgtcgcaggataaacgaaaacgcccccgcaccaggtgcgggagcgttttttagtctcttggttcggaattaactatcgcagattgccgcagaagcgctggatgcgcttgcaggcatcctcgagatccgaggtcctggtggcgtaggaaatgcggaatgcagggccaaggccgaacgccgagccctgcacgacggcgacgccttcgctctcgagcagctcggtgacgaacgcctcgtcattgtcgatcaccttgcccgagggggccgtcttgccgatcgtgccggcgcaggacggatagacgtagaacgcgccttccggccgcgggcactcgatgccgctcgcctggttgagcatcgagaccacgaggtcgcggcgctccttgaacaccttgttgttcgcggcgatgaagtcctgcggaccgttgagcgcctcgaccgaggcccactgcgcgatcgacgacgggttcgaggtcgattgcgactggatcgtcgccatcgccttgatcagctgcgccggaccgccggcatagccgatgcgccacccggtcatgcaataggccttcgacacgccgttcacggtcagcgtgcgatcgtagaggctcggctcgacctgcgctgcggtggtgaagacgaagtcgtcatagacgaggtgctcatacatgtcgtcggtcatcacccagacatgcggatgcttgaccagcacgtcggtgatcgccttgagctcgctcctggtataggccgagccggtcgggttcgacggcgagcacaggatcacccacttggtcttcggcgtgatcgccttttcgagatcttccggacgcagcttgaagccggtcgacgcggggcacaccaccgggaccgactcgccgccggcgagcgcgaccatctcgggatagctgacccaatacggcgccgggatgatcacctcgtcgccgggattgatggtcgccatcagcgcgttgtagagcacctgcttgccgccggtgccgacgatgatctggttcggcttatagctcaggccattctcgcgcgagaacttgttgatgatggcttccttgagctccggtatgccgccgacgtcggtgtacttggtcttgccggcctcgatcgcgtggatcgccgccagcttgatgttggcgggcgtgtcgaagtcaggctcgccggccccgaggccgatgacgttgcggcccgcggctttcagcgcgcgtgctttgtccgtgaccgcgatcgtcgcggacggcttcacacggtcgagcgcagcggacaggaaggccattatcatctcctggcaaacgtcgtgagccgttgggccacgacttgatttgaatgggattgcggcaccctaggcctgtcgccgctgcatcgcaagaagcttggcgataaagcacgaaaactttcgcgcatggcgcgcgacatgcgcaatattccgcaagttccagccccaaatgactcatatccggcaagacctgtcatggccgctccggccttgccggcaaggcccgcggctgcgtccgccgccgcggattgctccgaggacaatgtgccgtgcggcgcctgcctgaagctgccgacggcaggccgtccggcgcagccggcagcacatcccgcgatgcggctgccacgttgacgtttctgaattgcagcacatcggccaccgccatcgatggcatcgaccggcaccatgcacagcgtcgcgcaggcgtgatccgaattgttctgctgtgttgatggaatcgttctgcacgcgtgcagtgcggtagacgtttcgactttttccacattgcagggcttgcgacgcacccctgtcagcatcattgtttagcggcgttgcggtgtgacaggccgcgcaactttgaagcgtaccgtctccctgacctgagtgaaccccgacgcaatgtacaagctctattcgatgcagcgctccggcaacagctacaaggttcggcttgcgcttgccgtgctgaacacgccgtacgaggcgatcgagatcgacatcctgcgcggcgagagccggaccccggaattcctggccaagaatccgagcggccaggtgccgttgctcgaggtcgccgaaggccgccacctcgccgagtccaatgccatcctctggtacgtcgcgatcggcacgccgctggcgccggagtcgcggatcgagcgcgccgaggcgctgcagtggatgttcttcgagcagcacgcgctggagccgaatatcggcgccgcctatttctggctgtcgctggtcaagggcgggcgcgacctgcagacccacgcgctggaagactggatggagcgcggctatgcggcgttgcaggtgatggaaaatcatctcaagaaccacacgttcttcgccgccgagcagttcaccgtcgccgacatcgcgctctacggctacacccacgtcgccgaccgctgcgacttcgacctggcgacctttccgtcgatccgggcctggttgaaacgggtcgagcagacccccggatttgtctcgatggattggcagccgggtcccgaggcggagctccaggctcgcctcgtcgccggcgtctgaattccgagaatagcggggaaattgcccaaattgcgggcaaaacctccgcatgggccgcattttcgccgctttcagtgggctccgccgccgcaatgttgccggtcacgggcggcagattcgctcggatgtcgtgagtgattcgctcgcgacctgagggatttagaccatgaaacggtggtccggcacggcaggcttccatggccgccctgccccggtggcatcatcccggctgaccaacgcgatcgccgcgtcgctcgcgcttggcgcattgacgctgtgcctggtcgtcgccgtgacggtgctgtcgggcaacatcatcctggcaacaccgatcccggcataatcaagcagtttccgattggcacctgatccgcggcgaggcgcgggagagacagcggcacgacatgatgaagacccccgtgggacttgtgaccgtgacgctgtcggcggcgatcctgctggcggcatcgctcctgatcgtgaccggcacgcagggcgaagaccgcgcgcaccccccgcaggtgacgacgcctgccgccaaaccggcccagcaccgctagactagcgcaaatgcgctagctccatctgtggaagatgaagaacgcgccggcggcgatgaaggcaaatccgagcgcgtgattccagcccagcggctccttcaggtacaagaccgagaaggctgcgaacacgaccagcgtgatcacctcctgcatggtcttgagctgtgccgcgctatagacctcgctgccccagcgattggccggcaccgccagccagtattcgaagaaggcgatgccccagctcaccagaatgacgatggggagcgagtgatccttgaacttgagatgcccgtaccaggcgaaggtcatgaagacgttcgaggcgaacagcatcaggatcggcagcagcgacggagaaatggcgggcatcgatatcctcttcgagcaaagcacgcggtaacccgcgggcccggaaccgggttccatccgacctgcatatcatttgatttgaaagcaacgaaagctcgctcggcccgcgcaagggtcgcttaacggtcggcacggaaatcccggcgccgttgcggccctgtcgtcaaactgcggctttatcgtttgtccgatggatagcgagaacgcgcatgcggcttgattggcgtgcaatttcaggtccggccctggcggcgatcacggggctcgccgccttcctgatcgatcgcctcatgatcgccgttcccaaccctgcgccgctgttcgtctgcatcgtggcgctcgcgagctcgatcagcggcatcacttccgggctgatctccgccgcgatcgcggtggccgcctcggcgctgttcttcctcgatcatcgcgccctgcccggctacgacatagccgacctcgcgcggatgctgatgctggcggcgaccgcggccggcaccgccctgatcacaggaatgctgcggcagaaatggatcgatgcctttgccgcggagcagcagcaccacgccaccgcggcgcggctcgctgccgcgctcgaccaggtcgacatcggcatcgtgctgctcgacgccgatacccgcgccgagttcatcaaccgcgccttccgggattatttcgcgctgtccgacgcccaggccgacagcaagccgcccttcgtcgcgctgatgtatcatggccgcgacaccggcgcctatcaattgcccgaagacgagctgagcgcgttcgtcgccaagcgcatcgagatgatgcgcgcaggcgattccacgccgatcaacctcaatctcgccgacggccaggtgctgcgcttcagctgcacggcgctgcccgacggcggtcgcatgctgagctatacgccggttaccgacctcgtgcgccacaccgacgatccggcccgcgccgacgaataccgggcgcagcgcgccgggcgcgaacgccatctcgcaaggctgctgcgcgccgccgagtgaggcacggcctcgttcgcaattgatccagcatcaccgcaccgatagaaggttgcatgcgatgcgcaggcatcgcgcaacgcaggatcgctcatgtccgacgacgtcaccatccgctttgtcacccgcgacgattacgcccaatggcttcctctgtgggacggctacaacgccttctatgagcggtcgggaccgaccgcgctcgcgcccgagatcaccgcgatgacgtggcagcgcttcttcgatgcatatgagccgatgcatgcgctggtcgccgacgccggcggcgaactgctcggcctgacgcactatctgtttcaccgctcgaccaccgcgatcgcgccgacctgttatttgcaggatctcttcaccagccaggcggcgcgcggcaagggcgtcggccgcgcgttgatcaacggcgtctatgcgcaggccaagcttgtcggatcgccacgcgtctactggcagacgcatgagaccaatcacaccgcaatgcagctttatgacaaggtcgcggaccggcccggcttcgtcatctatcgcaagattgtctgagcgggcattcgccgcctgtggtcggatagagatgtcaccggcacgttacaaagccgggctaggcttcgccctgcgtaagatcaggccccccgtctcagatcttcgccccaagcggtccccgtcagtcgccgcgtctgaccgggaccgctttttttgccgcactgctttcatgacattgcgtctgtgacactgccctgcgcgatcggcggtagaacggcaccttgcttgcgtcgtcccggcgaaggtcgggacccacaatcacaaatccgcggggtgatagcgtgctgtggctcgaacgtttttcaacaatcgagttcggtggtgatgggtcccggccttcgccgggacgacgccgtcgttgtagcgagtactacaccaccaaccccttcatcggcttcgcgggcgcgctgtccggaaacaccgcatccgccagcacgcgctcgccaattccgaactggtcatgcagcacgcccttgatcacggcgcgcaggtcggtggtcgcagcgaggtcgcgggcctggtagaggttggcgggcttcaggcccggccagtcggtaatcatgcggccgccattcaccgcaccgccggcgagcagcgcgatggtaccggtgccgtggtcggtaccttcggtgccgttgatgcgcgcggtgcggccgaactcggtggcgaccacgatcacggtgtcgcgccagcgcgcgccgaggccgctctggaattccgccagcgcgccgtcgagaccgccgagcagttgcgcgagccggccgaccggcccgccctcgttggcatgggtatcccagccgtcgaaggcgagcgcaccgatccgcggaccgtcatccgccgccatcagcttggcggcgccgcgcgccaccagacgcatcgccgccacgccgccgccgccgggcttcggcttcatctcgtcgccctgcgcctgcttctcgagttgcaagccttgcgtcagcgcgctcgccagcgtcggatcgcgatgctgatagagatcgagcagccgcatcgcggtgtcgtcggcggcctgcggcagcgcggtcggcgcccagccgacggtcggcgcggcgccgcgcaacaccagaggcgtggtcgggccgaccgcgagcgcgctcgtcacccgctcgcccttcggcaaggcttcgagcgcgcggttgagccagccggactgcacgcggccgggaccgggaaagccgctctccaacacgtcctggccgtcgaaatgcgagcgatcgcgataggaggtcgcaaccgcatgcaccaccgcggcctgcttggcacgatacatccgcgcgaattccggcatcgccggatgcagcccgaagaaggggtcgagcatcacggccgcgttcggcccatccgccctcagcgcgatcgcaccatgcaggccggcataatcgggatcgccgatcggcgcgacggtcgcaagaccgtcgagcgcgccgcgcaggatgatggtgacgaagcgtggatcgcggccatcggcggcacgcgcgaatttcggcagataggcccaggcggcaaacgaggcgccgccgagcagcagcgcgcgccgcgacgtcgcctgcatcatcaggctctcggagcaatccatcgtcatctcctctggaattccggcgacatcagcagcagcgccagcgcctgctgccgcgattccgcgcgctcgatcgtgcgccgcgtctccggcgatgcggcatctgccgcaatcagctcgagcaggtcgcgcggatcgaacttgtcggcgagctgtgaggcgagctgcgccgagatgtcgagcctgagcttgaggccttcaggcgccgcccaggcggcagcggtgtccggaaaaccgttcggcccggccggcgaccacagcggctggccgagcacattgaggccgttgagatagcggcccgggtcctcgggattgcgcgccaacagccggcccgacgcgaccaggaattcgtaaggcgaacgcatttttgtcaatggcgcctgccacgcctcgttggatccaacgagcgcggtggcgagcgccctgagatcgccgtcggtcttgctgaaagtgtcttgcagcctcgccaccagtgccggcggcggatcgtcggcaacgaagtgacgcgcgaacttggtcgcgatgaactttgcggtcgagggatgccgcgcgatgtccgacagcactgcctcgccctgcgcgatgccggcctgcgcataggtcttgcccagcacctgctgcggaccgggctggtgggcgttggcgttgaacacgaagctgccgggcgcgccgagctggccctgccgtccggcgaatgtccagccggtgatgacgcgcgccagcgacgtcacgtcgtcctgggtgtagccgccgccgacgccgagcgtatgcagctccatgatctcgcgggcgagattctcgttcaggccgcggtggcgattgatgccggcgcgcgactccgggccgagcgattgctggttgtcgaggaagaacagcatcgccggatgctgctcgaccgccttcagcatatcggcgaagcggccgagcacgtgcgggcggatcgcctcgcgctcgaacgagccggcccacatccgcgccagcgcgcccttgttggccgagatgcagaagtggttggaccagaacaccacgagccgctcggcgaaaccgcaatcggcgatcacgccgcgctgcagccgcgccaaggcctcggcgcggaacgtcttctggatgatgttgggcggctcggtcggcggcttcggtggattagccatcgtctgcatcgtcggaggctgcatcgcggccggcagcgtcatcgccgcattggcattgtcggccgactgcatcgccggatccttcgccgcgatctccttcgccgccgacgacagcgacagattgcgccgcggctgcggcttcgcgtccgagccctgcggtggcatctcgctcgcaccttgctgcgcggctttggcggcgttgcgctcctgctggatctcgaactgatagtcgaacacctgcttgccgagctctggcgtcgagagcaggcccggcacttcgagcagcgcaccgttcggacgcgcaagttccgtcagcacgaaaccgcgcggatcggaggccgcgttgatgaagtcgccggctgcgccgccgcgggcgccgaatccaaaccggttgagcgcaatcagcgccgcttgcgaatcacgggccatcggaattcccttaacggccgatcccggctatatcggttgccggcatcatagcgcggtccgggatgaacccgagattaattcgtgcattaaatcgcggttagaaatggacctctcgtcaagcgatcgttccgaacgagcttcaccacgtcggctcgcctgcgcggcatgcggcagcgagttctcctgctcgctcacgggatcgtgctggtgcttcgacgagagctttcgcctgccgatgccaaccgacggcgcggactgcctgtgccccgcatgcctgcggaaactggcggaccagcaagcggcggcgcgcggcaagtgaacatacaagtgaacacgccctggaccgtcgacgctatcctgctcgacatggacggcacgctgctcgacaccgagaaggtctacttcgagagcctggtcgcggcgctcaatgcatgcggttacaccgacgatgtcgtcgcgctgtgccattccatggtcgggcttcccggcccggtctgcgaagcgatgctgcgcgatcattacggcgcggcgtttccgctcgatgccgtcaaccttgcattcctcgaacatcgcgaccggatgatgcgcgcgggcctgccgctcaaatcaggcacgctcgacctgctcgacgccatcgccgccgcggaacgcccgatggcgatcgtgacctcgtcctcgcgccgctcggccgagcgcaacctcagcctcgccggcatccgcgatcgtttcgaaacgctgctgacgctcgacgacgtgacgcatggcaagcccgacccggcgctctatctcaaggccgccgcgcagctcggcgtgcgacctgcggcctgcatcgcggtcgaggactccaaccacggcgtcgccgccgcgcatgccgccggcgcgatcacgctgatggtcccggacatggcgccgccgaccgaggagacgcgggcaaaatgcgcggctgtgttgccggacctcaacgcggtgctggcgctgctgcaggagcgcggcgcgctttaagcgccatcgcgatcccgctcagatcgttcgcaccttcgatgacttcgcggtctttgcgcgtttcgccgcgacgtgactatcgcgcgccgcatggcggctgcgcgtcttcgtgtccagcgccgcctgtcgggtttcgccgccaccgcggtgcgcggcatattccttgccatcgatcggcgccagatggggcgggtcaaaaccgagataggggcgcgcgacgccaaactccttgccgtgcgcgtcgacccatttccagagcctttccgacgatctccaacggtcgtcgcgggtcgcgccgtcgatgctgacgatgtcggctgcgagcccatgaccgtaaccgccacggaagctgccgccgtgatacgacttgttgctggccgccttcagcccgcttgcaatcgactggcggtagtcatctcggaaggcgctggtgatgccgggcgacaggccggcctgttccgccgcgagaagcgcatgaaagagcttcagcttgaagctccgatcgacgcctcccatgacgtagtccatcatcggcatgccggctttttctgccgccttggcgtccttccaggcgaaatcctcatcgacgagcctggtgaaggttctggtgaccgtcaccatcttcttctttctcttgaccgtcacctgcctctgctccggcaccttgatggtgtcttccttgggcgtcctttgatagagcgcccacagatagcgatcgatgcaggcgtcgacgtcccagcactcgtcgaggatttcgacggagtccaccgccggcctggccgcgcgaggctccggatccggcgtgttcgctgccggcgcctgcagcgattgaatatccagcggcagtgccggatcggtcaacgcggcctcgacgaccggttccggttcgtgcgcagtcggcacagcatgggcggtcgtcactgcttcctgttcattcttggtccgtgcacgagggtcgtcgacggcagcgttcgacatggcagtcgccggcgaactcgccgagacggcatcggcggcgacagcaggtgcgcgggccccatcaatcgatgcaacgacggctgccgcatcggcgaccgacgcatcgattttctcgataccagccgaaccgaacgccgcaaaccacgagacaatgcagctcgacagaacgaccgtcccgcccaacgccgccgcccgcacccgccgcgagttcaccatcccagcctccacgggctccctcgggagccagattgcagcatgtgacgatgcgatcatccgctcggggcgtggtcgcgcaatggcgaatgaaggttaacgcctcatctttccggacgatgttgcccgaatgcaactcgtagcctgcctccgttttggccccttcatcgccagcgccgtctcgatcagcgtgcgcgcggcctcgccggccgtctccatgtagctggcgtcgcgatgcagcagcaccaccgcgaatgatccgtccagcagcagcaggatctgccgcgccagcttttgcggatcggcaatccgctgctccaagaaggtcgcgcgcagccagtcctcgaacttcttcttgtgcgcggcgccgatcctgatcgcgggatggccgggcatgttggcaagctcggccgaggtgcgcaggaagccgcagcccttccatttcgggtgccgcgccgagcgcgcgaggttcttgaagatcgcctcgaccttcgccggcaagccaccgtcggcctccgcgaaccatttccggaacagcgcgaggttgggttggtcgcgcgcggcgagataggcggcgaccaggtcgtccttgctcttgaagtgataatacagcgtgcgcttggtgaggccggccttggcggcgacctcgtcgacgctgacgcggcggatgccttcattgtagaacagcgcgctcgccgcctggacgatgcgcgcgcgggtcggctcggaggggcggggcatccgtcgtatgtatactaaccagtgaatatacacaaatcgcggctcaccctacattcaactccgacacacacgaatgccggagaccgcatcatgtccgaacctatcctgctcgagacccaagatgggatcgccctgatcacgctgaaccgcccggcgcagctcaacgcgctgaactacgcgctgatcgaccagctgatggcggcgctcgaccgcatcgagggcgaggccgcggtgcgcgccgtgatcgtgaccggcgccggcgagcgcgcgttctcggccggcgccgacatcaaggaattctctggcagcgtccaacagggcgcggccgtcgcggtgcgcgacttcgtccgccgcggtcaggcgatgaccgcacggctcgaggcgttcaagaagcctgtgattgccgcggtcaacgggctcgccttcggcggtggctgcgagatcaccgaagccgtgcatctcgccatcgccagcgaccgtgcgctgtttgcaaaacccgagatcaagctcggcatgcccccgaccttcggcggcacgcagcggctgccgcggctggccggacgcaagcgcggactggagctgctgctgccaggcgatccgttcccgcccgagcacgcgcgcgagatcgggctgatcaaccagatcgtgccgcacgaccaattgctgaatgcggcgcgcgagctcgccggccgcatcaccaggcactcgccgggcagcgttgccggcaccatcactgcggtgacgcgcgggctgaacatgccgattgccgagggcttgctggtcgagagcgagcagttcgccgcgctggtgccgagccgcgatctcgccgaggggttggcggcgtggaaggaacggcgaccggcgaagtatgtcggggcgtagtcggcgtcccgccctcgtcattgcgagcaaagcaaagcaatctatagaaccgcatgcgcggaaaaatgggttgcttcgtcgcttcgctcctcgcaatgacgtagagagagtcgggccctaccgcaccaccgccgcggtctgcccgaacagcaatttccgctcttcctcggtgcggatcgcgggctggccgaaattcgggttgacctccttggccttggcataggcgcgctcggtcgccgggcgcttgccgatcgtctccagccagcgcttcagatgcgggaagtcgtcgatctcctggccctggttcttgtagggcacgacccagggatagctcgccatgtcggcgatcgagtaggcgccggcaatgaattcgcgatcggcgagccgcttgttgagcacgccgtaaagccggttggtctcgttgacatagcggtcgatcgcgtaaggcagcttctcgaccgcgtagttgcggaagtgatggttctgcccggccatcggcccgagcccgcccatctgccagaacgtccactggatcgcgtcgtagcggccgtagagatcctggggcaggaattgtccggtcttctcggcgaggtaaagcaggatcgcgccggattcgaacaaggagatcggcttgccgccgcccttcggcgcgtgatcgacgatggccggaatgcggttgttcggcgcgacctgcaggaaatccggcttgaactgatcgcccttgccgatgttcaccgggaaaattttgtactccaatccggtctcttcgaggaagatcgtgatcttgtgaccattcggcgtggaccagtagtggagatcgatcatgggggtgatcctgttgtcggaagcgaaacatgcgtttgcatgaatttgaataatccggatgccaagtcaatggtgcagactgccattcgcgcgcaattgtgatgagccgattgagcggatgcgcgattgggcctaggctccgccgacagtttgtttgtttcaatgacgatatttgcagcgggaggaattgcgatgatcagggatctggcacgacgcgactttctgaaggcatccgcggcgctggccggcgcggcagcggcgaatgcattttcatgcgtcgagatcgcgagtgccgcgccgatcgaggtgccgaccgtcgacaagctctcgatccgcgtgctggtcgattccagctacgacctgttcttcaaaccgaaacagtcgggcggcgtcacgatcgcgccgccgccgcgtggagccgactaccagaagtcgctgcacaacgaatggggcctgtcgctgtggctggagtcggagaccaagggcgcgcagcgcacgctgatgctcgactacggctatacgccggaagtcctgctcaacaacatggcgctggtcggcgtcgatccgtcgaagctcgacgcgctgatcgtgagccacgggcattacgaccatttcggcggcctcaacggcttcctcgataaattccgcgacaagcttccggccgacgtcaagctctacgcgggcggcgaggacaatttctgccaccgcgtcagcgccaccccgaccaagggccagttcaccgatttcggcacgctggaccgccgccagctcgccgcgcaacgcgtcactaccgtgctgtgcgagaccccgaccgtgatcgcgggccacgccttcacgaccggcaagatcaaccgtcgcagcgtcgagcgcgtgctgcccaacacctgggtcgagttcggcatcaaggacgggctcggctgcaacgccagccactatctgccggccgagctggacggcaagatcgtgcccgacgagcacatccatgagcatgcgacctgcttcaacgtgcgcgacttcggcctcgtcgtgatctcgtcctgcggccatgtcggcatcgtcaattcggtcaagcaggcgcaggaggtctcgggcatccagaaggtgcacgcgatcgtcggcggcttccatctcgggccggcgccgaaggattacctcaccgaggtcgtcgccgagatcaagaagctcgaccccgacgtagtggtcccgatgcactgctccgggctcaacttcgtgcaggaggcgaccgcacagatgggcgacaaggtgctggtcacgaccaccggcagccgcctttcgttcggcatatgatccgacccatcctgcgcggtttcgcttgggtgggcgccggcctatggctgacgctggcgccggcgctggccggcgacgcgccagcgcaatcggcacgctcggccgccgagatcatggacatcctgatgtggaacagggagccggtcggcggcccgttcgcactgaccgatcaggccggccatgcgcgcaccgacagggacttccgcggcaggctgatgctggtctatttcggcttcaccttttgcccggacgtctgcccgaccgatctgcaggcgatcgggctggcgctcgacaggctcggccccgacggcgaccaggtgcagccgatcttcatcacggtcgatcccgagcgcgacaccgcaagccatctcgcagactatgtgccgatgtttcatccgcgcctgatcgggctgaccggcagcgccgatgcgatccgcaaggtcgccgatgcctacaaggtctattacgcaagggtgccgcaggacgccggcgactacaccgtcgatcacaccgcctacatctatctgatggaccgcgacggcaattatctcggcttcttcccgccgggcacctcggccgaccgcatggtcgagatcatccggccgaggctcgtcgcgccggcgcgctgacaagatcgtcaactatcgctgcatcggaggtccacctctccccttgtggaagaggtgaggaacgcggtgccatcgagatctcaatgcatccgcccgtgcgcgcgcagaaacgtctcgccactcgccgtcaccatcacccgcatgccctcgatcgagggacggcgcgcgacgtaaccgcggtcgacggcgtcctcccagatcgtcagccgcgggcatgaggtgcgccagacctcgagcacttcggtataaggccgcggctcgcgcgcgacccattcgacgagatcgagcaccagggcgtccgtggtctcagtcatttggtcctcgccgggtcagcagggattcatcgtccgctatgtctgcgccgcttggcctcgtcccgcaaactgagttatcttgcccttgcatcagctttcctgagggttcatgcggcggctgctctttctcaacggcatcaaggcgttcgaggccgcagcgcggaccggcagcttcgcggcggcaggccatgagctcaacgtctcggccgccgcaatcagccgcatggtgcatctgctggaagagcgactcggtgtcacgctgttcgagcgcaaggcgaaccgcctcatcaccacgccggccggccgcgcctatcagggcggcctgaccccgatcttcgacgcgctggcgagcctcaccgcgcaggtcacggcgtcggcgagtgcgcgcgtgctgaccgtcggcgtcgggccgacctttgcgatgaaatggatgatcccgcacctcgccgagtttcgcaaagcggagcccgacatcgaggtgcggatcacgaccggcggcatggcggtgccgttcgccgacgactggagctgcggcatccagctcggcgacggccaatggccgggcctcgtcgccgaaccattgttcgccgccgacctgatgccggtgtgcgcggcgcggctcgccaacgccctgaagcggcccggcgacctcaggggaccgagcctgatccgcgtcgcgcattcgccggacgactggccgtcctggctgaaggccgccggcgtgacgcgtgtcaccgcgcgcggcccggagttccagttctacggccaggcgttgcaggcagccagcgacgggctcggaatcgcgatgggcatccggccctacatcgacgacgatctcgccgccggtcggctggtggcgccgtttgcgctcagcgtgccgaaggggatgcgctggtatctggtctatcgcggcttccacgccgagcagcgcgacttcgccgcgttccggcgctggatcatccgcgccgcggcggaaccggccgcgcaccgcaagggagcgcgcaatggctgacgagaccgttgacacgctggtgatcggcggcggccaggccggactcacgatgagccatcggctcaagcagcgcggcatcggccatctggtgctggagcgggggcggatcgccgagcgctggcgcagtgaacgctgggacggactgatgttccagtttccgaactggtcggtgcggctgccggacttcgcgtttccgcacgccgatgccgacggcttctccgacaccgctgccatcatcgccttcatcgaagactacgctacattcgtcacgccgccgatccgctgcggcgtcgaggtgacaaagctgcgccgcgatgccggcggcttcgttgccgatcttgccggcggcagcatcgccgcccgcagcgtcgtcgtggccaccggcccgtatcagcggccgctgcggccggcgctgctggacgatcatcccggcctgtttcaggtccatgccagcagctacaagaatccagcgcaattgcctgacggcgcggtgctggtggttggcgccggcgcctcgggcgcgcagatcaccgaagagctgatgcgcgccggccgccgcgtcttcctgtcggtcggacgtcacaaccgtctgccgcgccgctatcgcggccgcgatctgttctggtggctggccgagatgggcgttgacgaaacgcgggtcgagcagcgcggcccgtcgcgcctgctgccggtgatctcgggcgcccatggcggccgcaccatcgatttccgccgcttcgccgccgatggcgtgacgctgctcggccgcgtgaccgcagcgcgcaacggcgtgctcgcgatcgcacccgatctcaccagcaacatcgccaatggcgacgcctactacgcgacgttcctcgggatcgtcgacgacttcatcgccgcacgcggcctcgatcagcccgccgatcccctggcgcgcctccgcctgcccgatccgccgtgcctcactgcgccgctggatacgatcgacctgcgcgccgagcggatcaccggcgtgatctgggccaccggctatggcctcgatctgaactggatcgacataccggtgctcgacgccaatggcgtaccgcgacaccatcacggcgtctccgaggtgccgggcctgtatttcctcggcctgcaatggctgtcgaagatgaaatcctcgttcctgtccggcgtcggcgacgacgccgcggccctcgccgatcacatcgcagcccgcggctagccgttttcgcgcggttcgccctaggaaacagcggcaaaacaaaaagccggagctggtttgcaatgcggaaataaaccgcgcgatttgtgatctggttcacataaggcgccgcgcgcccgtgcttcccttgagaagggcatcccgaggtcgcgaatgatttacagcggttttgagatcaagtcgttcgaagtggggaaagggcaatggcacgccaggattcaacgggtcgatcaaaggccggtcgtcatcgatggcatgccgtttccgacgctcgacatcggctttgcgtggtccgatccggatgcggcgatcgccgacgcgaagaaaactatcgaccggttcccacagcgctatggcataacgatgccggcaaccggagcgtcggcgtgaccggcaacgtggtgctcgccgtggtcccgcaatgcgagccggatccggtctggccggcgcaggtcaggaccagctgcccggaatgcgccgcccggctctcgctgctgcgcgtgattcccggccgtgccgccgaatactggaccctgcgctgcgacggctgcggcgggatccatctcgacatcgtcgacctgccgcgcgcctgaagcgggcttcgctcgctagactagcgcgccggcgcaacaccccccgcggcattcggctgcccaaccgaaccggtcgattccggctcgcgctgtggagcagcgatcgccttcggagatcctgacgtctcggtcggcgccgcaggccgccgcgcataccgcgagcgggtgcccaccgatgcgctgtagacgcgatttccctcgtgcaccttcacgaggatcgattctccggaagcctgcgcaatcgccttggtcagcacgtcggtgcaatccgcctgcttgagaagattgctgcaggaccgccagatcaaccgcgaaaccagcacgaagtgcggcgcataggcttcgatccccatgcccacatagttcatctgaaatgcgaagttgcgccaggcacgcaaatcgccgttgccgtagttcaggatgtagaaggcgtacgccttggtctggcaatcgagcgcaaagctcggtgcgggcgttccatccttgagcagcatggtgtcgcgcggcagcggattggggtccgcgcatgttcgggtgagcgtgtcggcgatgatccacatgttcatttcaagggagtcgcgatagagcggcagcagcgtcagcaccggccccaggcttgagaagctgagattcagcaggtcgtcgacgatcgtggtcgtctgattgattgccctcactccgaagattgcggccttcgccgacgcggacagcaccgggacctcaccgatcagcttgtcgcggatcgacgcgagctgcacgctcgttttctcgttgaagagcgagctcagcgcgaggcggtacagcgcgtagtcaagtcgcgccatcttctcatcaaagaactggcaaatggtggggtttgcgaagttgaccgcctcgaaggtgccgatcgcactggcggtgtcgacctgggtcgcgatcttcaaccagtttggcggcgcgccggcggggtcctgatagaggcactcataggcttcaaacgccacggcaagcgcggacttcaaattgccttcgatcgcagcgacatcggcctcgttgtgaccgccctgcctggccgccgccagcagaacgccgatcagcagatatgaacggaacagacggtgactcttggtatgcgcggcgaacaggacgtagtcctcgatttccgcgaccgttcctcccctgcgatcgatttccgcgcagccgatcaacatcgataacgcgacgacagccgcgacgacgcggcttgcagccctcaaaaacatcgcggcccccgaaatggcgtaatgaaagaaatcaaacaggcggatcacgtcatgcgcgagggcgattcgcgagctggttgtgagcaaaaccggcggctacctttggattttccacaagcttcggttcccgtcagcgcgcgcagtcgggcccacgcgtcctcgatgcagccgccctctgccaatgccgcccggctctgctgacaccctgctgtcagcagcatcgcccgcactcggatcaggacgccatttgccctttcctcgctgccggactcatcccatattccggccatggcgaagacaccgaacactccgaaaaagcccggcaaatcccccaaatccaaggcacaccggcccgaggtccagccgatcggaccggcgctcgcggaattgctcaatcccgcgatcaatcgcggcgatgccggcatgggctcgggcaccggcttgcagccgccgccggacaattcctgggaccgccgcgccggcggcgaggccgcggcgcatcgcgcgcgggcgtcgacgccgaagaacttccctcagagttccgccgatccttatccgatgccgttgcgacagaatccgcaaccgccgggcgcacgaaccaggcccgaagggctcgaggaggccccgcaggccaattacggcacctcggccaccatcccgacgctcgatccggaactggcgcggcagctcggcctgccgaccgccgaggatgacgacgaggcgttggcccgtccgccgcgcagcaagatggaggcgctcggcgtcaaggccaccgccgacgcgctggaaaacctgatccgcgacggccgcccggagttccgcaaggacgacggctcgatgcgggtatggaccccgcaccggccgccgcgcccggagaaatccgaaggcggcgtgcggttcgagatcaagtcgtcctacgagccgaagggcgaccagccgaccgcgatcgccgaactggtcgagggcatccagcgtaacgaccgcacccaggtgctgctcggcgtcaccggctcgggcaagacctacaccatggccaaggtgatcgaggcgacgcagcgcccggcgctgatcctggcgccgaacaagacgctggccgcgcagctctacggcgagttcaagagcttcttccccgacaacgcggtcgagtatttcgtctcgtattacgactactaccagccggaagcctacgtcccgcgcaccgacacctatatcgagaaggactcctcgatcaacgagcagatcgaccgcatgcgccactcggcgacgcgcgcgctgttggagcgcgacgacgtcatcatcgtggcttccgtgtcctgcatctacggtatcggctcggtcgagacctacaccgcaatgaccttcgcgctgaagaaaggcgagcgcatcgaccagcggcaattgatcgccgacctggtcgcgctgcaatacaagcgcacccaggccgacttcacccgcggcaccttccgcgtccgcggcgacgtcatcgacatattcccggcgcactacgaggaccgcgcctggcgcgtgaacctgttcggcgacaccatcgagaccatcgaggagttcgacccgctcaccggccacaagcaggacgagctcgaattcatcaagatgtacgccaattcgcactatgtgacgccgcgcccgactttggtgcaggcgatcaagtcgatcaaatcggaattgaagatgcggctcgaccagctcaacgaccaaggccggctcttggaggcgcagcggctcgagcagcgcaccaccttcgacctcgagatgatggaagcgaccggcagctgcgcaggcatcgagaactattcgcgctacctcaccggccgccgccccggcgaaccgccgccgacgctgttcgaatacgtgcccgacaacgcgctggtgttcgccgacgaaagccacgtcaccgtgccgcagatcggcggcatgttccgcggcgacttccgccgcaaggcgaccttggccgaatacggcttccgcctgccctcctgcatggacaaccgcccgctgcgcttcgaggaatgggacatgatgcggccgcagacggtcgcggtgtcggcgacgccgagcggctgggagatcaacgaggccggcggcgtgttcgtcgagcaggtgatccgcccgaccggcctgattgatccgcccgtgcatattcgccccgcccgcacccaggtcgacgatctcgtcggcgaggtgcgcgcgacggccgctgccggctatcgctcgctgatcacggttctgacaaaacgcatggcggaggacctgaccgaatatctgcacgagcagggcatccgcgtccgctacatgcacagcgatatcgacaccatcgagcgcatcgagatcatcagggatctccgcctcggcgcgttcgacgcgctggtcggcatcaacctgttgcgcgagggcctcgacattcccgaatgcgcgctggtcgcgatcctcgacgccgacaaggaaggtttcctgcgcagcgagacctctctgatccagaccatcggccgcgccgcgcgcaacgtcgacggcaaggtgatcctctatgccgacggcatgaccggctcgatggagcgcgcgatcgcggagaccaatcggcgccgcgagaagcaggtcgagtacaacgaggcccacggcatcacgccggagagcgtcaagaagtcgatcggcgacatcctcaactcggtctacgagcgcgaccacgtgctggtcgagatcggcgatggcggcatggccgacgacgtcatcagcatcgggcacaatttcgaggccgtgctgagcgatctcgaaaccaggatgcgcggggccgccgccgatttgaacttcgaggaagccgcgcggttgcgcgacgaggtcaagcggctgcgcgccaccgagatggccgtggtcgacgaccccaccgccaagcagcgcaacgttcagaagcaggccggcgcctatgccggcaccaggaaatacggcgacgccgccaatttgccggtcgccgcgctgaagaacaagaccgcgcagacctcgctgaaggccagccgcggcggcaagtccggctcccgcgtccacaagcccgacctcgacgaaatgcacggcccggaatcgctgccgttccgcccgggcggcgcactgccggcaaaaccgttcggcaccacgagccgcatcatccagccgacggattcaaggcagtcggggccggagttcggcccgtcgccgcggagcagcggtggtgcgccggggaagcgtggtgggtggaagaagcggtagagtatgacgcgcgccgagcttctcgccttcctgcggatgcaccggctcgctgtggtcagcacagtgcacgatggcgcaccgcaggccgccgtcgtcggcatcgcggtcggcgacgatctcgagatcatcttcgatacgctgaccacctcgcgcaaataccagaacgtccgcgccgatccccgcgtagcacttgtgatcggctgggacgccgagcagaccgcgcagcttgagggcgtcgccgactttccaaccggcgcggaactcaccgcctgcaaacaggtgtatttcgcggcgtggcccgacggcccggagcgcgaggcatggccgaacatcggctatgtccgcgtgcggccccgctgggtgcggttcagcgattttggcgcggtgccggagcgggttgctgagatcaaactggcgtagacgtgtagcgctggaaatttggttcggtttcgctacgctggcttcatgaaactcggcttcgaagaatcgcaaacctcttacaccagcggctcccaaagcgctcgtgcctggacggaggcctgggtcaaggcttgggcctattgtccgcactgcggcactgcaaagatgtcgcagttcccgaacaacagtccggtggcggatttcctgtgcggatcgtgcagcgaggagttcgagctcaagagccagaaggggaagttcggccctaaggttgctgacggcgcctacaagacgaagtgtgagcggctcgcggcgagcaacaatcccaaccttctcctgatgaactacgatctgaagccgcttgcagtcgtcaatctgctgatcgttcccaagcacttcttcgtccatgacatcatcgaggaacggaagccgttggccgccacggcccggcgcgccggctggatcgggtccaatatcctccttggcaaggtcccggaatggggaaaaatccacatcgttcaaaacggcgtcattcgcgacaaggagctggttcttgcggaatggcagaagacactctttctccgcgatcaatcgctggaggcgcggggttggctgctcgacgtgatgaaatgcgtcgaagcgctgggcaagcgcgactttacccttgaagaagtctatgcctttgaacggcatcttggcgatctgtatccgggcaaccagaacgtccggccgaagattcgccagcagcttcaattcttgcgcgatcgtgggtttatcgagttcctggctcgaggcaattaccgattgaaatcttgagaggtcgacatggcttggtttctcaatttctatagatgtgaaagttgccgccgccgctggacagatgaatggtcctgcatgtgtgacaatgaatgcccacactgtggcgcacgcgacatgacgccgatcaggagcgaagaccttactgatcttatcgagcaggaaggcagtgaattcgtcgtaatgcgctcgcccgacacggcagaacatgatcccgactatgaagaagtcggacgcttccctacgcgcgcaaaggcggaggaatttttggtctcgaccgagttagactaatctttggccgatatccatcggtaacgctcgtagctctaaggtattcttcaccgaacgctgaccaccgcgaccgccagcagcgacatcatgatcatcgtggtcatgagttgcagcgagaccgtgggctggctccgccactgcgcgatcttctcggaaaacgacaggccggcgtcggagaacatcggcgcgtaggcgccggcgaaacgtttcgggaatcttgcggcgagcagcggcgtgatcgcggcgtagaccagcgaggcgagcacgacgtagatcgcggcgccgtagcgatcgccgacgatttccggggcaccgatcatcttcagcgccagcacggcggcggcgaaggtcggcatcccctgcaggatggcggtgagcgcaaagccttcgagccggttccgcgcggatgacttcggtgcggcgatggcgttcatggcggcgtttcctcggcagtcgggtgatccgatgccgccaatctagccgcgcgtgcccgtctgcgacgtgatgcgcgtcacgccggcagcgggccccggcagatttattccgattttcggaatttaacttgacgcgggacccaactcagatgttcaat

SEQ ID NO: 42 - DNA, 63628 bp, Bradyrhizobium enterica
ggaggtggattcacactcgaagtgcaacacttgagcagcaaagacctctgccggggtcctgaagtcaaggcatttgcgcggggtgttgttgtaggcggcgatggacttgcgcaggcggcgggttggcagcttttcgaggtcggtgttgcgcgggatgaagcggcgcatgcggccgatggcgttctcgatgccccctttttgccagggggcgtggggatcgcagaagtacgtcttgatcaagaggctttgcaaggcaaggtgagatgcgaactcggtgccgttgtcgaaggtgacggtctggcggatcggctgtggcaggacctcgaacaggcgtacgagatggtgagcgacgccggaggcgagcttgcttgcgagggggacgccgagcaacaggcgggaggtgcgctcatgcacggccaggatctgctgaccgtatttggagaacatcatgaggtcggcctcccaatggcccggggtcttgcgatcggcgacctcgacggggcgcagatccagcgaaacacggccttcgatgaagcttgcgggactgccgccccgcttgccgcggcgaccgcgcttgctcttgccgcgcggcaggtagcgccgccagctgaagtccgaggtgcgggtgagctgggcataaatgaagcggtagatgctctcataggagatcaccttgcggccgtgctcgcgagccagccggccggcgacctgctcgggcgaccagccccggccaagacgttccaacaccgcacggcgcaggccggcctcccgttcgaggcgagagcccgtccagcgccgcgctcgcatctgttgctgggcatagctgggcttgtagccgacctgaacgccagaattacggttcagctcccgagagatcgttgatggcgggcgatccaaagctgccgcgatttgccggatcgagctgccaccggccgaaagcctggcaatctcgcatcgctcctccagggagagctgcttgtaagtccgccccatggcaacacctccagttggaagtgttgcacttcgtttgtgaactcaggggacccatgaccccaaatctcttttgttgtgcgacgctggggccgctgtcttgttcaccaccggaatgcggtggttatgggtcctggctttcgccaggacgacggcggtgggtggagcgggcgcctcgcgctaccgagagacctaccccagcttcaactccgcataccctgtcgcggccacctcatcgcaccgcgcccggtacgccggcgcgctgccgctgtagcgggcgacgatgcgcctctgcttgccctcgacgttgcggttgatgccggtcatccaggaatcgacctcgttggagagcaggccgacgccgagtgccttgacatgatcggtccagccggcggtgccttcgggcgtggcgtcgaggaaggtcaggcctttctgctgcgcgaagcggagcaggccggtgacccaatcgacgctgtattcgatgctgcgcgggatgttgccgagcgcggtgtgcgggcccatcagcatcatcatgttggggaagccgtcgaccatcaggccgagataggtttccggcccgtgcgtccatttttccttcagccgggcgccatgcgcgccgcggaaatcgatcttgtcgaagctgccggtgatggcatcgaagccggtggcgtagatgatgatgtcgaaggcgtagtccttctcggtcgtccggatgccctccggcgtgatccgctcgatcggcgtttccttgatgtcgaccaactcgacattgtcgcggttgtagacctcgtaatagaaggtctcgagcggcagccgccgggtgccgaaaccgtggttcttcgggatcagtttctcggccaccgcctggttcttgacgcgctcgcggatcttgcgcgcgacgaaatcgctgatcgtggcattcgccgcacgatcgatcaggatatccttgaaattgccctgccagatgccgaagccccgctcgccatagagcttctcgtagaacgcctcgcgctcctcgtcgctcacctcgaacgcgccgcgcggatcgggcgtatgcacgaagcaggcgaaggtttccttgcagcgggcaaagatctcgccatagccggccttgatcctggcttgcgtctccgcgtcgatcttgccgttgtgcagcggcgccgcccagttggcggtgcgctggaacacggtgaggtggccgacctcgccggcgatggtctggatggtctggatgccggtggcgccggtgccgatcacggcgacgcgcttgccggtgaaatccactttctccttcggccagcgcgcggtgtgaaacgattgccccttgaaatcgtcgatgcccgcgatccgcggcagggtcggggtcgacagcggaccgatcgcggtgatcaggaagcggcagctgtgctgcgcgccgctctccagcgtgatccgccagctccgcgtctcgtcctggtagatcgccgacgtgacgcggctcgcgaactggatgtcgcggcgcagatcgaacttgtcggcgacatagttgcagtagcgcagggtttcgggctgaccggcgaaatgctccgaccattcccattcctgcaagagctccttcgagaacgaatagccgtaggaatagctttcggaatcgaaccgcgcgccgggataccggttccagtaccaggtgccgccgacgccggtgcccgcctcgaatacgcgcgcgctgaggccgagctcgcgcagccggtagagctgatacatgccggacaggccggcgccgatgatgatgacgtcgtaatccagcgcagccgtctcggggctgttgtccgggcgcgatgcggccacctgtcgttgctccctgggttgattgccggcaaggctagccggtcttcctgtcgccgacaaacatcgcagagcggggctgccatcgggatttgcggagggctccctgcccgcgcgcattccgcgccgcggactgtccgccccgcggctttactcggccgcgggatacccgctatcgtcgggtggataagatcgcccgccaagcggcgacggaaccagcgggagtgaggcgatgggagaggcgctgcgcaggccgacgtcgacagatgtcagcaacccctggctttatcaggacgacacctggcggccgctgttcgcgcaactgcgtcgcgacgatcccgtgcattattgcgagacgtcggcttacggcccgtattggtcggtgacgcgctacgacgacatcttcgccgtcgagctggatcaccagaactattcctcggcctctgagctcggcggtatccaggtcgctgaccagccgaaggggcaggagcggccgagcttcatccgcatggatccgcccggccacaccgcgcagcgccgcacggtggcgccgatcgtggcgccgtcgaacctcgccaatctcgaggccctgatccgccagcgcacggccaccgtgctcgatgcgctgccgcgcaacgagaccttcgactgggccgagcgggtctcggtcgacctcaccaacatgatgctggcgacgctgttcgattttcccgcggaagatcgcgccaagctgacctggtggtcggatgtcgcgatcgccaacatcgattcgcccgacgcggtggtgcattcggaggccgaacgcaatgccgagctgatcaagatgggagaagctttccgcaagctatgggacgcccggatcgatgcgcctccgaccttcgacctgatctcgatgctggcgcattcggaagcgacgcggaatctggatgcgcgcgagttcatcggcacgatcgggctcctgatcgtcggcggcaacgacaccacgcgcaactcgatgtcagcggggctgatggcgctgtgcgagaatccggagcagttcgagctggtccgcgcccgacgcgaattgatcccgaacctggtgtccgagaccatccgctaccacacgccggtgctgcacatgcgccgcaccgcgcgcaacgatgtcgagcttgccggccgtcagatcaagaagggcgacaaggtggtgatgtggtacatctccggcaaccgcgacgaggacaagatcgagcgcgccgacgaattcatcatcgaccgcgccaagccgcgccagcatctcgccttcggcgccggcgtgcatcgctgcgtcggcgatcgcctggccgaacagcaactccgcatcctctgggaggaggttctggcgcgcgatctgcgttttgagattatgggcccgccgcaaaggctctattccaatttcatccgcggtatacgaagcttgccggtgagaatcgtcaattgagccgcatcaccagccgtcattgcgagcgaagcgaagcaatccatgtcgccacatggggagaggtggattgcttcgtcgctgtcgctcctcgcaatgacgaaagaggacatgccaaggaacaagaatgaagaacgatcccgttgacgtcctgatcatcggcgccggcgcatccggcgcggcggtggcctggagccttgccgataccaagatgcacatcctctgcctcgatcagggcggctggatgaatccggccgaatatccgagcaccgggcgcgactgggaggcgaaattctacggcgagtggtcgtccagcccgaatgtccgcaagcggcccgaggactacccgatcaacgacgacaattcgccgatcaaggtcgtcaacttcaatgccgtcggcggctcgaccgtgatgtacaccgcgcactggccgcggctgcatccgtccgacttcaaggtgaagacgctcgacggcgtcgccgacgactggccgatcgattacgacgcgctgacgccgttcttcgaggagaacgaccgcatgatgggcgtctcgggcctgtcgggcgacccgctgtcgccgctgagccacccgccgatgccgccgcagccgctcgggctgtccggcccgctgctcggcaaggccctgaacaagctcggctggcactggtggccgtcggacaccacggtcgcgacgatggattacgagggcagggcgcgctgcatcaatctcggccattgcacgccggcctgcgcgcagggcgccaaggcctcgaccgacatcacctattggccgcatgcgatccgcgccggcgtcgagctgaaaacccattgccgggtgcgcgagatcctgaccaacgagcagggcatggcctccggcgtcgtctattacgacaaggacggcgtcgagcaattccagccggccgaggtcgtgatcatcgcctgcaacggcgtcggcacgccgcggctgctgctcaattcggtgtcggggaaattccccaacggcctcgccaactcgtccggcctggtcggcaagaatttgatgttccatccctatgcgcaggtctacggcttcgtgaaggagccgaccgacagcaaccgcgcgccgccgacctgcctgtggagcaaggagttctacgacaccgatctgtcgcgcggcttcgtccgcggctacggcatccagttcggccgcggcgccgggccggtgttcgaggcggtcgcgagcgagcagaagggcatcctgccctggggcaaggaccatcaccgcgtgttccgaaggctgaacgggcatcgcctcgcggtctccgcgatctgcgaggacctgccggaggagcacaaccgcgtcacgctcgatcccgtgctgaaggacagccacggcatccccgcgccgaagatcgactacacgatctcggccaacagccgcaagatgatggaccatgcgctggcgcgcggccgcgaggtcctcgatgccgccggcgccaccgacatctgcatcaacgatccgatcccgtggggcggctggcacctgctcggcaccgcgcggatgggcaccgatccggcgcgctccgtggtcaacgaatggggccgctcgcatgacgtgaagaacctgttcatcgtcgacggcagcatcttcgtcacctcgggcggcgtgaacccgacctccaccatccaggccctcgcgctctacatcgccgaccagatgaagcagcgcctcgccaacctgttcgattgagaccgtccatgtccgaagcaacacaactgaccgcagcccagcgcgccgatcttcgcaccgtcgccgcgatgatcgttcccgaaagcgccgagtacagggtgccgggcgcggacgaccccgcgatccaggccgacatgctggcaacgctcggccgcgacaccgcgctggtcgctcaggcgctggatcatctgggaaagctcgccggccaaccgctcgccgagctcgacgaggtcaggcgcgacgcggtggcgcaggagtttcgcaagcatggcggcgcggccgcggccaccctcgttcgtgtggttctgcaatgctactaccgcgacgaccgcgtgctgcgctcgctcgggctcgagttgcgggcgccgttcccgaagggccatgtgctgccggacggcgactggtcgctgctcgatccggtgcgggcgcgcggcggggtgctgcggcgggcgacccagggctgatgagattgggctgacctccaccgacggcggtgcttcacctctccctttgggagaggtcgatttgcgcagcaaatcgggtgagggattacggtctatcgagagaacaagagccctcacccggattgcactggacgatgcttcgcatcgccaggcgcaatccgacctctccccaatggggagaggtgaaccaagcgcggccgagcggcttcgatccaggacttatcttgccctagccacccgggcaggcgggtggcgtaaccacttgcggcggcgggagccggtcaccatctgagaggaccaaaggactctcaccatgttggattttacctcagataccgccggtgacaggccgtcaccgcgaacggctgacgctgcgctggtcgatgaccgggcgttgctggatgcctattccaatgccgtgatcgacgtcaccgaccgcgtcggtccggccgtggtccgggtcgagaccgggccgaaggtgcgcaatgcgcgcgagcgcggcggcctcggttcgggcatcgtgatctcgcccgatgggctcgtcgtgaccaacagccatgtggtcggcgcgtcgaaggagatccggctgcgcgacaccgagggcttcgtcaccgatgcccatgtgctcggcgtcgatcccgataccgaccttgcgctgctgcgggccgatggcgcgcgcgatctgccttacgcctcgctcggcaactccaagacgctgcggcgcggccagctggtggtcgcgatcggcaatccgctcggcttcgaatcgacggtcaccgccggcgtggtgtcggcgctcggccgctcgatccgctcggtcagcgggcgcaccatcgaggacgtgatccagaccgacgccgcgctgaaccccggcaactcgggcggcccgctggtgtcgtcgcacggcgaggtgatcggcatcaacaccgcgatcatcaacggcgcgcagggcatctgctttgccgtcgccagcaacaccgcgcagttcgtgctgtcggagatcatccgtcacggccatgtccgccgcgcctatatcggcgtcgccggccagaccgcgccggtgccgcggcggcacgcggtgctcgccggcgtcgagaacaagatgggtgcgctgttgatgcagatcgagccggacagcccggccgcgcgcgcgagcctgttgccgggtgacgtggtcatcaagctcgacggcgttgagatcaacggcgtcgacgacctgatccgcgcgctcgatcacagccggatcgaccgcacgctgtcgatggacgtgctccgcctcggccgcctccgcgcgatcgatatccatccgatcgggaggaagccggcgaagcagtgagggcaatcccatctgcatgcgagatgcactcaggtgaggggtatctctccgcgagctcagctgcggagagaacccctcatccgtcgcggactacgtccgcgccatcttcttccacacagggagaaggaaagggggagttcgcggcagcgctactgcagcgcggtcagcagctcgtcgggctgctcgaccatcatcatgtggccggcgtctgatcgcacgacaatgtcgggtcttggaggcgaagcggagattccgcgctcgtgctttaccgactatgagaccccatagcggacatacgaccgctacgatggcgaagcggctaaggtcacacttcgccagattactggattaccctgctgttgttgaaaacgagcgctacttgaaacacacgctcggtattggttcgtacttcgacaacaaggtctcgccgttcatccataggcaggagatttcgggttagatccgccagtgtctgagccgcttcgacctcagcttcgcgctgagttccgcactccagtccttcctcatcgggataaagcccggtgtcgtcgcggatatcgaaataatagcgcgtcactccggcgcctcattgcttctggcgctggttcaacatcggcgccagccggctgttccctgtcagtgagagcgccgccggccgataggacagcgtgagtgttgctttgttccctcagcccgcggacgcggaagtccgcggcagggacggtttgcgttcggggagcttcttcttcgggggcgccggcagcagaccttccctgatcgcttgcttgcgagcgagtttgcgagcccggcgaatggcttcggacttttcgcgcgcctttctctccgagggtttctcataggcacgacgctgcttcatttcgcggaacacgccttcacgctgcattttcttcttcagaacacgaagtgcctggtcgacattgttatcgcggactacgacctgcattaaatctcctcgatgactgcaagctgggacgatcctgcgcgcagccggttgcgcaggagttcgttgcaaatggaagaatgagagcgaccgcgcattcctcgccagcctcgaacgagcaattttgctcgtcacggcgatgcggttcagtgggaggaagtgaccactcccgcgagaacaagtcaaacgataaaggcctgaagtcccattggaactgctgccccgaacggagccgcagcggcgagctgaatcaaattgtcaggcttccttgtaatatggcggtcatcgtgtatattaccattattcgattagccgctgtgccttgttgaacgtgcccgcgggctccttttccaaagacatcgacgaagttgaaatcgccgcgcgattgtcgcgcgaaacgcgtttgcgcgctttggagaagaaaatgacgacaggtacggttaagtggttcaacggccaaaagggcttcggtttcatccagccgggcgacggcagcaacgatgtgttcgttcacatcagcgcggtcgagcgcgccggcctttcgggtctcgccgagggccagaaggtcaattacgagctcaagactgacaagatgcggggcaaggtcagcgccgaaaatctctcgctggcttgatctcgtcgcgccgtttcacggatgtactgaaacggcaatgctgcccgctcgatccctggattgagcgggtttgcctattttcagcaggtgaaggatgagcgccaggaaatcggcagtaccgtcacctgaagcgatcgcgcgcgccgatcgtcagcgcctcgccgccgaagaaggcgtgcgggcaatcgcggatgtcgaacgccaggcgatcgaagtgcgcaagaacatggcgcgcctccgcgagctacgcatggccaaggaagctgcggacgcgacccttgcagcagcctcgccggcattcccggccaagaagcgcacgagaaagttgttgcggtagacaccctcgaccagtgtcgatggacttgccgaggacggagtgacagccgggagagtgctgatcgtgcccagagcaaaatcggacggtggtggaacgatcacgttcaccctcgcgctgggggcagcgcgacaaatgtgccggcttacgacgacgttccaaaccgacaagcaggcgttcagctatctgcacaaataccggacggaattcgagaggatcgcgcgagcgcgcctggctttaggagagctcgaagacggaatcgtcatgctcacgatgctttaggtcggtgcttcgataatgccgggctattccgcaggggcttcgccgcagcttcccgggccagacgctcagctttcaggcgctcgcgattctcgtgaaaggattgctccgccttcgcgtagtcggtcatcggtttggcattgctgatagccttgaaagctttgtcggcttcccgccgatggcgggtattcgcttcgtttttggtcattgtgacctccagactgggcttgtttttccgccgcgccgcccggggcgcgggaaggcttcgagattgcgtcaccaggccagcttgagaacgctgacaagcagtgccgacaggacagcaattgtgagcgcaatgtcgacaagaggagctgctagacaggcgcgcgccgggtcggcttcatcttgtcggtttcctgcgaaccgcagcgggcatcgccggatttcggaataatagaatgtatcgctgatttgcccgacgtgtcaagttgcttgtccaagtgtgcttatccaagtgtgcttgtccaagtcccggcgggctcccggctcctttgcatggggttgttttcgatattttgggaacgctcgcggtgcgccaccttctctcacagcgggagaaggcttcgcggccgccctactgcaacgctgccagcagttcgtccggcgtctcgaccatcatcatgtggccggcgccaggcagcacgacggtccgcgcgttcggcgtcgcggcggcgagcgccttgccggccttggcgggggtcatcatgtcgcgctcgccgaggatgaaggtcgcgggcaccttcacggccgccgcggcggtcaacccgttctggtaggcgttgcaggcgttgaggtcgttgtagagcacgccgggcttggcctcctgcagcacccgctgcgcgccctggtgcatccacagccccggtgcgaggctgccgccgagctcggccttgaagccgaggccccagatcgagaccatgtcgatcgctgcgccgtcatttgcttcggcggctttcagcagatcgaggccgaccgtcatggtcgcggcggtgccgatcaatgcgaggccggagaccttgtcgggatgtcgtgccgaggtctcgatcgcgatcagcgagcccatcgaatggccgatcaatcgggccttggttgcgccggcggcggtgatcagcgcggcgatccagtcggccatctcggcgatggtcggcagcggcttgccggcggagcggccgtggcccggcaaatcaggcgccagcacggaatagccgtgatgggcgaaccagcggctgtgcagcgcccaggtcgaagagtcgaagccggcgccgtggatcatcacgaccgccggcagcgagggatcgaacggcttgccgccggtcgcgatgaaggtgtctgcaccgttcactgaaagctgcatggcctcaagtcctttgcgaggcgcgcagcgcctggccgagatcgtcggtgatatcgtcggcggtttcgatgccgaccgacagccgcaccagctcctcgccgatgccggcggccttgagctgttcggcgtccatctgctgatgcgtggtgctggcaggatggatcaccagcgtcttggcgtcgccgacattggcgagatggctgatcaacttcagctgctcgatgaacttcttgccggcggcgcggccgcccttgatgccgaagctgatgatcgagccggcgccgcgcggcagcagcttcttcgccagcgcgtaatcggggtgcgtctccagcgacggatgcagcacccagtcgaccgccttgttcgcagtcaggaactccagcaccttttgggtgttgctgacgtgccggtccatccggacgccgagcgtctcgatgccctgcaacagctggaaggcgttggtcggcgacaggcaggcgccgaaatcgcgcaggccctcggtgcgggcgcgcatgatgaaggcggccttgccgaactgctcgtcgaagacgatgccgtgatagccggcatagggctcggtgagctgcgggaacttgccggaggcgcgccagtcgaaccggccaccgtcgacgatcacgccgccgatcgcgatgccgtggccgcccatccacttggtcgccgaattcatcgtgatgtcggcgccgagctcgatcggctggctcagatacggcgtcgcgaaggtgttgtcgatcaacagcgggatcttcgcgtcatgcgcgatttgcgccaccgcggggatatcgagcacttcgaggccgggattgccgatggtctcgccgatcacgagccgcgtgttcggcctgatcgcggcgcggaactcgtcgagcgcgcgcggcttcacgaaggtcgtggtgatgccgaaccgcggcagcgtatgtgcgaggagattgatggtgccgccatagagcgaggcggaggcgacgatatggtcgccggcattgagcagcgttgcgatcgcaagatgcatcgcggccatgccgctcgcggtgcagatcgcaccgacgccgcattcgagcgcggcgatgcgctcctccagcactgcggtcgtcgggttggagatccgcgtgtagatgtggccggcgcgttcgaggttgaacagcgccgcggcgtggtcggcatcctggaacacgtaggacgtggtctggtagatcggaaccgcgcgcgcaccggttaagggatcggggcgttggccggcgtgcaggctcagggtttcgaaggcaggcggcttgggtgcgggcatgcgaggctcgtcaggtcagtcgatgaggatatttggtctgcagctctatacgtgaactgcggtgcggacgcggccgacattgccgaacacccgcagatagcgctcgacctccgaggggatgccggtcgccttctccggattgtcggagagcttcacggccggtcggccgtcgaccgacgtcaccttgcagacgatcgagatcggatcgagctcggcggtgccgtcaggcgcgcagccgacgaaatcgttggtcaggttggtgccccagccgaagctgacgcgcacgcgccccttgaagtgatggaaggtctcctcgatcgagccgacatccatcgcatccgagaacaccagcagcttctccttgggatcgcgccccttctgcttccaccatttgatgatgtcttcgccggcggtgatcggcggcgcgctgtcggggcggaagccggtccagtcggcaacccaatccggcgcgtcgcgcaggaacggcttggtgccgaaggcgtcgggcagtgcgatcaggaggttgccgccataggcgtgtcgccactggtcgaggatgcgatagggcgcccagcgcagctcctggtcgtcattggcgagcgcggcggccaccatcggcagctcatgcgcattggtgccgatcgcctcgaggtcgttgtccatcgccagcagcacgttggatgtcccagtgaacgacgagccgaggccttccttcaccgcctcgacgcaccagcgttgccacaggaagccgtggcggcgccgcgtgccgaaatcggacagccgcaggccgtcgagcttgcgcaaccgctcgaccttggcccacagcttggccttggcgcgggcgtagagcacgtcgagcgcgaagcggccgtaggtcttggtcgccgcgcgcgagcgcagctcgttgaggatcgcaagcgccgggatctcccacatcgtggtgtgggtccacggcccgtggaaatgcagctcatactggccgtcgaccttgtgcagctcgtattcgggcaggcggaaggtcgagagccagttgatgtaatcgggcgagaacatctgggtcttgccgtagaacgtgttgccggcgagccagatcagctccttcttggagaagcggatggtgcgggcgtggtcgagctgggcacgcaactcgccctcgtcgatgacttcggcgagcttgatatgggtcgaccggttgatcaccgaaaaggtcgtgcgggtgtccggataggattcccggatcatctgctgcatcaacagcttgtagaaatcggtgtcgagcaggctgcgcacgatcgggtcgagccgccagccgtggttgtaggtccgggtcgcgatatctgtcacggtcatgccggaaccttagcctgccgggcgcggtccgcccagtgggtatcgggcggaacatggcaggtcagcgcgctatggtctgccgtatacggccaaccgtggcggcgacatcggcccaggccggcctggcgggggcaaactggcgccgcaggaagccgacaagctcagcaacctggctgtcgctcatgctgtccttgaaggccggcatgtagccgagatcggttgcggccggcttggcgatgccgtgcaggatgacctggatcagattgtcgggcacatcgctgtgcagattgctgttcagcgccagcgacggccggctgccgaacagcggcggcccgccgacctcatggcagaccgcgcaggcgccttgatagatccgcccgccggccgaggcggccgtggtgacggccgtgctggcttcgagcttcgcggcgagcgcatcgtgagccggccggtcggcggcttcgttgaacgaggcgaggtagaccgccatcgcgcggatgtcctggtcgggcagcgcggcgagctcctttacgaccggcgccatcggtcccgcggcgacgccatgcaggcgtgactcgccggtgcgcaagtaagcgtagagctcgtcttcgctccatgggatcggcgccttcgatagcgaggtcagcgccggcgcctcccagccctccgcgaagccgccggcaagataggcgcgctgccgttcggcgccgagcccattgcgtggcgaatggcaggcgctgcaatgtccgaggccttcgatcaggtaggcgccgcgattccagatctcagatttcgatggatcgggccgaaacgtatcaggccgatggaacagcgcattccatccggcgagcagcggccgcaggttgaacggaaaggcgagcgtgttcgccggcgtcgccgcgcgcaccggcgcctgcgccgtcaggtaggcatagagcgcctgcaggtcggcatcattggtcctggcgaaatgcgtgtacgggaatgccgggtaaagatggcgcccgtcgcggtgaatgccttcgcgcatggcgcgctcgaaggcgggataggaccaggcgccgatgccggtgtcgacatcgggcgtgatgttggtcgtgtagacggtgccgaacggcgtctcgagcggccggccgccggcattcaccacgccatgctccgacgtgtggcagacggcgcaggcgccgagcgccgcgagctccttgccacgcgcgatggtggccgcggaatagaccgaggcatcgggctgggcgatcggcgcgatcgcacgccagggcaggacggcggcgccgatcccaagcgccgcggcgcagagtgcggcgatgccggcgagtacgccgccgcgctttgcgaacggattttgccatcggttgagctcggccggccgcgcgggcggcggcagcggtgcaggcgctgtgggttgctcgccgcgcaagcctttcaaaatgcgctccggcgtgaacggcaattcgcgaaagcgcacgccggtagcatcatagatcgcgttggcgatcgcggccgcgctcggcaccgaggcggattcgccgacgccgagcggcggctggtcctgccgcggcagcatcagcacatcgattttgggcagctcagggaatttgatgatggggtaggcgccccattcccgcgccgtcaccgcgccgcgctcgaaggagacctcctccatcagcgcgcggctggtcgactggatcacattgccttcgatctggtgtcgcacgccctcgggattgatcatcaacccggaatcctggccggcgacgacgcgggtcacgctgacatcgccggtcgccttgttgaccgcaacatcggcgatccacgccgaccatgccgcgccgtaaccgggaaacttgctgtgcacgtagagcgcataggcgaagccgcggccgcggaggatgtcgccgtcggcctcgggctctttccgcaccgggcgcggcgtccagcccgcgcgttcggcgaccgcgttgacgagatcgatcgcgcgcttgtctttcaaatagcgcagccggtactcgatcggatcgacttcggcctcggccgcgagctcgtcgatataggactcgtgcgcaaaggtgttcggcagcgccgagacgccgcgaaaccaggaagcgcgtacgatcggcggcatgtcgttggcgaccacgcgcatattctcgtagtcgtagggcgggatcgcggtgcggtcgcccatctcgaacattgcggcttcaggtgcgatccgcccggtgagcagcagcgccaaggtcggcgcgccgttcgagggatagcgcgtcgagaagtcataagcggcgacgctgccatcggcattgagcccgccattgacgtccatcagctgcgcggtgcctttcggctcccaggcatgttcctgttcgcgggtgagctgcacgcgcacgggcttcccgatcgcgcgcgacagcagcagtgcgtctgcggagacgtcgtcggcgcaattgcggccatagcagccggcggcttccatccggatcacgtcgatctcggattccggccgctggatcaggagcgcgaggtcgccgcgcaggatgtgcgggttctgcgtgccggaccagacgcgaattccatcgtctccgtagctggcgaccgcgcaggacgggccgatcgagccgtgcatctgatagggccagagatacgtccgttgcatcggcttggccgccgccttaatcgcggcatcaacatcgcccttgtcgatcagctgccgtggcgtcgatggattggcgcgcagcgcctgctcgatatcggagagatcggtcagatcaggtcccggcttccagctcactttgagctgcgcggcggccttgatcgcgttctcctcgcgttcggcgacgacgccgacgaaatcaccgatccgcaccaccgcgacaagtccgggaatatcccgcaccgaggcttcatcgaccgcgatcaggctggtgccgacgaacgggccggcgtcgacgccggcatagggtgggcggacgacgcggccgtgcagcatgccgggcacgcgcacgtcgtggacatagaccagctcaccggtggcctttgccggcagatcgacgcgcggcaccgacttgccgacgacggaataggcgctcaccgccttgacctgaacgtcgtcggcgagctcgaggcggatggtctcgtcggcgatcagctcgccatagctgacgctgcggttgtcgtggccacggatcaggccgtcttcgatggtgagatcatcgaccggtagctccagccgctcggccgcgcgcgagagcaggaaatgccgggcttgcgctgcggccttgcgcaagggaacggcggtgatctggatcgtttcgctcgcgatcgtcgcgccctggttcggcaccacggcggtgtcgccgaggatcaccacgacgcgggcaaacgagacgtcgagctcttcggccacgatctgtccgagcgcggtgcggatgccggtgccgagatcgacatggccgttataggcgttgaccgaaccttcagccgtgacggtgatgaaggtctcgaacgcgccttccgcgccaagaaccgcggagcgaaccaccgacagcgcgccgcgcatgcgttgctccggacccgccatcaaccgcgcgcctcgagcgcgtgaccggcggcgcgcatcgcggcgcggatgatttcgatatgcgcgccgcagcggcagagattgtagcgcagcgcttccagcacctcatgctcggaaggattgggattgcgcgtgagcagcgccttggtggtgatgatcatgccgttgaggcagtagccgcactgcgcggcctgctcgcggatgaaggcctcctgtaccgggtcgggatgttcgcggctgccgagcccttccagcgtgacgatgtcgcgtcccgcacagccctcgatcggaatcacgcaggcgcgcgcggcgacgccgtcgatcagcaccgcgcaggcgccgcactcgccgagcccgcagccatatttcggtccgttcaatgcgagatcgttgcgcagcacgtagagcaatgcggtgtcgggagcggcgtcgacgtcatgattcctgccgttcacggtcaggcgcattgccccggttctcccctgatgtttgcgctgcaacgtcagcgtcaaatcgaagacgaggataacgtttgtgtacaaacgtgcaagcggcggcatgccgcgctgcagcgcgtgcacgctttatgaacagggtgcgcaagcgaagggcagcttttgattgcaaaggccgcttgacaggtcccgggctcgcgcgcaggatcattcgtatacgaacgataagcaccggaggcggaagcgcagtatgatcgaccgccgccacaagtccaggtctggtcacgatggctgacacaatgaccgtcgccgccggcgacaagatccgctgcgatgcctgtccggtgatgtgctacatcaagccgggcgcggccggcgcgtgcgaccgttacgccaatcatgatggcacgctggtgcgggtcgatccgcatgtcgtgctggagcgtaccgtctcgcatggcggcaagctggtgcctttccaggtcagcggcgactgggacggcaagatcgtccggcagcccgacctgttcgtcaccgcgatcggcgccggcaccacctatccggactacaagccggcgccgttcatcgtgtcgtcggaagtcgacggcgtcgacatggtcacggtggtgaccgagggcatcttctcctattgcggcgtcaaggtaaaaatcgacaccgaccgctatctcggtccggagaccgcgactgtgcgcgcggacggcgaggcggtcggccatgtcacgaccagcgaatatggctcgcagatgctctcgctcggcggcgtgcatcacctgaccggtggctccaagaaagagggccgcgtcacctgcgacacgctaatggatctctccaattgcaaggcggtggagctgaccatcgatggcggcgccaccgtcgtggtgcaagcgggcaagccgccgatcgtcaacggtgtggccgaagagcggatgcgggtcggctgcggctcggccaccatcggcatgttcgccaagcagtggcacggcaaggtcgatgaggtcgtggtggtcgacgaccacatcaccggcgtgctcagcgagcaccaggccggcaagctgctcgacatcgccgacaccggcatcaagatgaagggccgccgttcgacgcccggccgctatttccaggtcgccgatcccggcaccgggtggggcggcaccaacatctccgatccgctgtcgatcctcggtcccttcaatgccaaggaggcgcggcccgggctcaccatgctgatggtctcgacgaccggcgagcatgcatcgtactacgtgctcgacgaggcgttgcagccggtcgagaccgagatgccggccgatctccgattctcggtcgagcgcatccaggagaattgcgaacccgcgctgtgcaccgtgctgttcatgggcggcgcgggcggatcgctgcgcgccggcgtcaccgacaatcctgtgcggctgacgcgctcggtgaaggacgcgctgacgcgcgtgaccagcggcggcgcgccggtgtacgtgtggccgggtggcggcatcacctacatggtcgatgtcacgcagatgccggccggcgccttcggttatgtgccgaccccggcactggtggcgccgatcgagttcacgatgcggctgtcggactacgcggcgctcggcggccatatggattatgtccgtccgctgtcgtcgctgcgggacagcgccgacatccggccgatgccgtacctgcccgggcggcacgcatgacgcggctcccgcaaatcgcgcttcttcctgacggcaagcggctgcatttgcaggatgggcccattgatctcgtcatcgaagccaggggcagggatgcggaagttcgatccgcctatcaggcggcggcggagcacttgaccggtctgctcgatgaactctgctcggaacttgccgaactgcgcagcgcggcgcatcccgatcgctgcttgctgaagggcgtggtcgcgcggcgcatgcatgcggcggtcgcgccgtttgccgcggattgcttcatcacgccgatggccgccgtcgcgggctcggtcgccgaggaaatcctcggtacgatgttgcgcgtagcggcgctcgaccgcggctatgtcaacaatggcggcgatatcgcgttgcatctcggcgagggcgaacaatttaccgtcggcctgatggaccggccagaccgtcatggcgtgatgcgcacgatgtcggtcgatgccgacatgccggtccgtgggattgcgaccagcggccgccacggccgcagcttctcgcttggcatcgccgacgccgtcaccgtgctggcgcgaacggcatcgcaggccgatgcggctgcgaccgtgatcgccaacgcggtcgatctgcccggccatcccgcgatcatgcgcgttccggccaacgaattgcagcccgacagcgacctcggtggacgactggtgacgcgcgatgtggagaatttggcggaacacgagattgggcaggcgctcgaggcgggcgcggcgcgggcgcgcatgctcctgatgtcgggattgatcgagggcgcggcattgcgtctactgggcgaaacgcggcttgttggtgcaactgggatcggggcgccgaagtcgcacgcgtttcaggaacgaacgatagaacacatgctgcaggcatgaccgggagcgaggcacaatgagcgccgttattcgcaagatcgtcaccgtggtcgaggagatccatctggagatgggcaagaccatcgcgccgccgacccgccgcgccgccgccatcgccgtgatcgagaatcccttcgccggacgttatgtcgaggatctgtcgccgctgatcgcgatcggcgaggaactcggtgaattgctctccaagcgggccgtcgccgcgctcggcatcgatggtgccaaggcgcacagctacggcaaggccgccgctgtcggcgagaatggcgagctcgagcacgcggccgcgatcctgcatccgaaaatgggtgcgccggtgcgcaaggtgctgtcgaagggcgcggcgctgatcccgtcgtcgaagaagcgctcggggcccggcaccacgctggatattccgctcgggcacaaggatgcggccttcgtgcgcagccatttcgacggcatggaggtgcagatcaacgatgcgccgcgggccaacgagatcatggtcgcggttgcggtcaccgacagcgggcggccgctgccgcgcgtcggcgggctgacggtcggcgaagtcaaaggcgaagacggattgcgttaatctctttcaaggaaactggaggacgggatgcgtggttatttcgtaggggcgggattggcgatcgcggtcgcggccatggcaacgggcgccatgacgacgcaggccatggcgcagagcgaaatcaagatcggcgagatcaactcctattcgctgctgccggcgttcaccgagccctatcgcaagggctggcagctcgcggtggaggagatcaatgccgccggcggcatcaatggcaagaagctcgtcgtcatttccaaggatgatggcggcaagccggcggatgcgcagaccgcggccaacgaactggtgtcgagcgagaatgtcgcgatgctaaccggtacgttcctgtcgaatatcggcctcgcggtctctgacttcgccaaccagaagaaggtgttcttcctcgcggctgagccgctgaccgacgcgatcacctggtcgaagggtaatcgctacaccttccgcctgcggccgtcgaactacatgcaggccgcgatgctggtggcagaagccgccaaacttcccgcaaaacgctgggcgaccatcgcgccgaactatgaatacggccagtcggcggttgcggtgttcaagaagctgatgtcggagaagcggcctgatatccagtgggtcgacgagcagtggccgccgcagggcaagatcgacgccggcccggtggtgcaggcgaccgccgccgcgaacccggaggcgatcctcaacgtcactttcggcgccgacctcgtcaagctcgtgcgcgagggcaacacccgcggcctgttcaaggggcgcacggtggtgagcttcctgaccggcgagccggaatatctcgatccgctgaaggacgagacgcccgagggttggatcgtcaccggctatccctggtattcgatcaagacgccggagcacgacgcgttcctcaaggcctatcaggccaagtacaacgactatccgcggctcggctcgatcgtgggctaccagaccatcaaggcggcggcggcaatcctcgccaaggccggctcgagcgatccggagaagctgatcgcggcggccgaaggcatctcgacgccgtcgccgttcggcgagatcaccttccgcaagatcgaccaccagtcgacgctcggcgccttcaccggcaagaccgcgctgaaggacggcaagggcatcatggtcgataccgcctatcgcaagggttcggactatctgcctggcgatgccgagatcgagaagatgcggccgaaggattgaggcctcttagtttcccctctccctgttcttacggggagagggttaggacgagggacgtctccaagagtgggctcgtggagagttcccctcacccgaattcaagctgcgcttgaattcgacctctccccgcaggcggggcgaggtgaagaaaaactccaacgcggaccgcctatggccttctatatcgtccagttcctgaccggtcttgccagcgcggcgtcgctgttcctggtcgcttcgggtctgtcgatcatcttcggcgtgacgcggatcgtgaacttcgcgcatggcgcgttctacatgctcggcgcctatgtcgccttcaccctgaccgagcgtttctcgggcgcattcggcttctggggcggcatcgtcatcgccgcgctggcggttgccgcaatcggcgtgctggttgagatggtgctgctgcgccggatctaccattcgccggagctgttccagctgctggcgaccttcggcctcaccctgatggtcgaggacctcgtggtgctgatctgggggccggatgatctcgtcggccgccgcgcgccgggcttcaagggcgcgatcgatttcttcggccagaatattccgagctacgacctgttcctgatcgtgctcgggccggtcgtgctcggcgtgctctggctgttgttccagcgcacccgctggggcgtgctggtgcgcgcggcgacacaggaccgcgacatggtcgcggcgctcggcgtcaatcaaaaatggctgttcaccagtgtgttcgcgctcggcgtcttcctcgccgcgctcggcggcgcgctgcagattccgcgcgatgcggtcaaccacgcgatggacctgcgcgtcatcgtcgaggtcttcgtcgtggtcgtgatcggcggcctcggcagcatcatcggcgccttcgtcgcggctgtgctggtgtccgagctcaacgcgttcggcatcctgatctttccgaagatctccatcatcctggtgttcctggtaatggcggtggtgctgatcgtccggccgtgggggctgttcggcaagccggaggcgccggcgcggcgcacgccgggtctcaccgtcaatccatggcggccgctgacgacgaacgaacggcttgccgcgatcgccgtgctcatcgtcgccgctgcgctgccgttcgtcgccggcaactacgtgctcaccgtcggctccgagatcgcgatcttcgtgatcttcgcggtcagcctgcatttcctgatgtcggtcggcgggctcgcctcgttcgggcacgcggcctatttcggccttggcgcctatggcgtggcgctgctcgccaagatggcgggcttgccgatgatcgcctgcctgctgctcgggccgctgctcggccttatgggcgccgccgtgttcggcttcttcgccgtgcagctctcgggcgtctatttcgcgatgctgaccctggcctttgcccagatcgtctggtcgatcgcgttccaatgggtgtcggtgaccggcggcgacaacggcattctcggcgtctggccggaaaaatgggcggggagcccgtcgcatttctattggctgtcgctcggcatcgccgcgcttgccgtggtgatcctccgtatcatcgtgttctcgccgttcggctttgcgctgcgcgcgacacgcgattcgccgctgcgcagcgaggcaatcggcatcaacggcaagcgcatccagtggaccgccttcgtgatcgcgggcacggtcgcaggcctcgccggcgcgctgttcgcctatctcaagggcagcgtcttcccggacaatatgggcatctcgctgtcggtcgacgcgctggtcatggtgctgctcggcggcgtcgagacggtgtccggcgcggtggtcggcgccatcgtctacaaggcgctgaacatctggctggtcagccagaccgactggtcgaagctcgtgctcggcggctttgtcgtgctgatcgtggtcgcgttcccgaagggcatcgtcggtacgctggaagcagtcatgcgccggcggcgtaaatcgccctcgtcggcctcgcccctgctcacctcccgcatagagaccgccgaatgagcatggtccccgcattgttgtcggtcgaggggctgaccaaatcctatggcggcgtgcacgcggtgcgcggcgtctcgttcgagttgcgtgccggcgagatcctggcgctgatcggaccgaacggtgccggcaagagcacctgcttcgacatgctgaatggccagaacattcccgatagcggccgcatccgcgtgctgggcgaggagaccaccggcaagaagccgcgcgtggtctggcgcatgggggtggggcgcacgttccagattgcagcgacgttcccgaccatgacggtgcgcgagaatgtgcaggtcgcgctggtgtcgcatggcgggcaactgttcaatctgtgggcttcgactgcgcgtcaggcccgcgacgaggccgggcggctgctcgatctggtcggcatgggtgcctatgcggagcggccctgcggcgagcttgcctatggcgacgtcaagcggctggagcttgcgatcgcgctcgccaaccagccgaagctcttgttgatggacgagccgaccgccggcatggcaccgcgcgagcgcatcgagctgatgcggctgacggcgcggatcgcccgcgagcagtcgatcggcgtgctgttcaccgaacatgacatggacgtggtgttcgagcatgccgaccggatcctggtgctgaaccgcggcagcctgatcgccgagggctcgcccgaggaggttcgcggcaacgcgcaggtgcgggcgatctatctcggcgaaggcctgctctacgacgcaaggcaccgcgagggagcatcggcatgaagctcacggtgaacgacctcaacagcttttacggcccggcgcatatcctgttcgacatcgcgctcgaggtcggcgaaggtgaggtggtcgcattgctcggccgcaacggcgccggcaagtcgaccacgttccgctccatcgtcggcctggtcgagaaccgttccggccgcatcatgttcgagggcaaggacgtgtcaacgctgccgacgcatgcgatcgtgcgcggcgggctcggctacgtcccggaggagcggcgtatcttcacggatctgacggtcgaggaaaatctcgaggtcggccgccagccgaagcgaccgggcgcgccgcaatgggatcgcgacaagttgttcaagctgtttcccaatctcggcgagatgcgcggccggcccggcgggcggatgagcggcggcgagcagcagatgctgacgatcgcgcgcacgctgatgggcaatccgtcgctggtgctgctcgatgaaccctcggagggcctgtcgcccaagatcgtcgagcagatggtcgatgcgatcctggcgatgaagcaagagggcgtcagcatcgttgtgtcagagcagaacctgcatttcgcccggctgatctcggatcgcgcctacatcatcgagcggggccggatctgcttcggcggcaccatggccgaacttgatgcgcgtccggatgtccgcgacgcgcatctgtcgctgtaaagggcaggggttaagacaatggcgcggagtgctgcaccgaagcgaagcgtgaaggccgcaaagccgggctatgtgctggacgagcagatcggcttcatcctgcgccaggtgtcgcagcgtcacgccgtgatcttcgcccgcgagatcggcatcagcctgacgccgacgcaatgggcggcgctgtcgaaactgtctgaggtcggcgcgtgctcgcagaaccagctggggcggctgacctcgatggacgttgcgaccatcaagggcgtgatcgaccgcttgaccgcgcgcggcctgaccgagaccgcacccgatcccaatgacggccgccggctgctggtgagcctgacgcgcgccggccagcagatggccgacaaggccgcgccgaatgcgcttgtgatctcgagggagacgctggcgccgctcgacgccaaggagcgcgagacgctgatggcgctgctcgggaagctgcggtgatgatacgtactgctccatctacgcgattgcgagcatagcgaagcaatccattttccgcctgcggcgatgtggattgcttcgtcgcttcgctcctcgcaatgacgacagcgtgcctacttcgccacgatctccggcaccttgcccgcgggcggggtgttgcggctgcgctgggtgcggacgatgccgtcgatgatggtcatgccgatgccggggaggtcgccgagctgaacgctctccaggatgttcttgcccggtgaatgctgcgccttgtccatcagcacgaaatcggcggagcggccgacctcgatcaggccgcaatcgagctcgcgcatccgcgcggtgttgccggtcgcaaggcagaacgccagctcggcgggcagctcgccgagcgaggacaacagcgagaccatgcgcaggatgccgagcggctgtacgccggagcccgccggcgcatcggtgccgaggatgacgcggtgcaggtcgcccatctcgcgcgcggtgcgcagcgtgaacagcgccgagcgctcattgccgttgtgcaccagctcgaggccgcgcttgcaaccctcgcagatgcagcggatctggtcgtcgggcagtgcggtgtggccgccattgatgtgaccgaccacgtcggtgtcggcctccagcaccacgtccttgtcgatcaggcccgatcccggtatcgacgggccgccggtgtggatcgtgctctggatgccgtatttgcgcgcccagccgaccattttccgggcggtggggccgtccttcacgccaccgagcccgacctcgccgagcagcttaacgccggcggcggccatctccttgaaatcgtcctctaccatctcgcattcgatcacgggcgcgccagcatgcaccttcacaccgccgggccgcaacgtccagaacgcgcgctgcgcgaagatcgccatcgccttgacgccgaccacgtcgcgcggccggccgggcatgtgtacctcgccggcggagatcatggtggtgacgccgccatgcagatagctgtcgatccagttgatctggttctgccgcggcgtccagtcgccggcgaccggatggacgtggctgtcgatcaggccgggtgcgaccgtcgttcccatggcatcgacgatcgtggtggcgccttcggtatcgacgtccttgaagcggccgatcgctgatatcttgccgttctcggcgacgatggtatcggcgtccagaatcggcttctccagcgctcccgacagcaacagcccgatattgcggatcaccagcttgctggggccggtggcctggggcgcgtcgtgagccatgggtgttttccttctgtttctgccgaattgcccgggaatttgagcccggcttgacttttggatcaagccggattattcattcgtatacgaatgatcgtatacaaacgatccggccggtcaacagggttcaagtccttccccgccgcagcacaaatcagggattggtgcgatgagcaatttcaaccgggaaagcgtcctcagcgttcatcactggaccgacacgctgttctcgttcaagaccacgcgcaattcgtcgttccgcttccgcaacggcgagttcaccatgatcgggctcaaggtcggcgagaagccgctgctgcgcgcctacagcgtcgccagcgcgaattacgaggacacgctggaattcttctcgatcaaggttccggacggcccgctcacctcgcgtctccagcacctcaaggagggcgacgagatcatcgtcagccgcaaggctaccggcacgcttgtcatcgacaatctcgaggacggccgcaatctctatctgatcggcaccggcaccggcctcgcgccgttcctcagcgtgatcaaggatcccgagacctatgatcgcttcgagagggtcgtgctgctgcacggctgtcgccgcgtcaaggagctcgcctatggcgagatgatcaccgagacgctgccgcaggacgaactgatcggcgatctggtgcgcgaccagctgatctattacccgaccgtgacgcgcgatccgttccgcaaccgcggtcgcatcaccgacctcatcacctcgggcaagctgttcgccgatatcgggctgccggcgctcgatgccgcgcatgaccgcgtcatgatctgcggctcgccggcgctggtcgccgacacccgcacgatgctgaacggccgtggcttcgccgagggcaatcacggcgagcccgcccaattcgtggtcgagaaagcgttcgcagagcgttgatcttcgcagtgatccctagccccgtcattgcgaagggttcgcgacaagattgcacagcaatcttgcgctgaagcgacgaagcaacccatcttccggtacagccgggagcaatgggttgcttcgcgtcgtttccggtgatgcggttagcgttacggcctgacggccggcgtctccaccggcatgccgcgcgcccgtgtcatcagatagagctcgagctcgaccagctccggcgagccgtaatcataggcctgtgcccggatgccggtgatgcaggcgcgcagccggcgctgcagcgatccgagcgactgccattccagccggtagagcggatagccggtcggttgtccctgcgtgatcgcgctccccgcgagcttcttgtcccaattgtcgtcgtgacagttggcgcaggccaggttgagctggccctgccgctgcacgaacagcgcgtggcccttctcgacgaacggcgtcagctccggatcgtcgccggctgcgatcggctcgccgcgcgattgctgcgcgacataggccgtcagtgccaacagctcccggctttcgtaggcgaagggcgaggcctgctggtgattggcacgacagaggttgatccgcccttcgaggtcgaccggccgtcccagtgccttctcgaacgcgggataacgcgcagcgatacccttcatggtgacgcgcgcatcgctgtggcagtcagcgcaggccttgtccgcggtgccggctttgcgcttccacaaggcctcgccgtcgagcacggagagcatgcctggattggcggtgtcctcgtcctgcattgccctggtgtccgggctcatgaagctatagccggagcggcgctggtccagcggaatctcggcagcgagcgccgcgcccgccagcgccgtcagcagcgcaatgcagagcgcaatcctcattcgaccgtgatcgaagcctgcgcggtctccgaaaatcccttgtcgccgatccattcgaattcgaacctgccgctctcggtcacggtggtgaagaaagtgatgaacggattggccgcgattgccggataaaggtcggcgcggaatacttccacgccgttgaagcggcaagtgaagctcgtgatgatgtcgcgcggcaccacgtcgccggaggcggtgtggcgatagcctgtctccatgatgtgcgacatcagcgtcttgatctcgatcacgtcgccgcgcctggccttcttcggcacgttgatcagggccgacggcatcagatcgcctcctcggtgcaggcggcgagcgtcaccacgacgtcggcggtcgcggaccagaacgtgtcgtcggacagccgcgcgatcgcggtgaccttctggctgtcggcgaggcgaatgcgggtcgacacctgggcgcgcccggcgcgcggcccgagatagaaattgccgatattcggctgcgggttcttctcgttgaagacgtagatgctcttcacatatgcctccgccgtcatcgggccttcgacgctgaccgtcatcgggacggtgttgccgttctcgaccagcggcggaatatcgagcctgaccttgccggtccgcacgttggcctcgccgacgatgttgcgtatcgccgccgactgcatcgccggtgtggcggccacgggacggacgatgaccatcacggcagcaccgccggtaaggctcagaaacgttcgcctggtttgattcgaatccaccatgcttgatcctagttccgcaacgttaccagataggccacgatatcctcgatctgctccgccgacaggataggcttgccgcgccatgaattgccgacccgtgtgagaccgtcgacgcgataataggacggcatgatcgtcgccgcatcgaggtgcgacgcatcgaccagccgcagccgcaattgtgtttccgaccaacgcgcgccgcttccggagaggttcggcgcgaggtcgccctggaacgcctgctccggaaatgggccgctgtggcagaggatgcaagtggacgaacgctcgacgatcagcgcgcggccgcgggtgacgtcacccttggttcccgtcagcgattgcgggatggcatcgcccaccacggcgtaaggccgtagcgtctcggcgccggcaggcgcgcaggccgcgagcagtccggcggcgaggaacatcgcgagcgcgagcctagccaaaggcctctcccgtgatcgccttgaaccagtcgaccgcctgatcggcctcgtgctgacggagctcgcgcggcgcttcgaccgggctcgtggtcacctcggcctcggcgtactgatcgtccttcggctgatagatgcccttcaacgagaatgcgtagccgggagccacggtgttgtagcaggcgccatcgagccgtggcgtgtccggcgccttgccggccagtgaattcacgatcgctgccgcacaggcgcggccttgcgctgccgcggcggaggcggattttggaatcccgccggcgattgcggcatcgccgatgacgtggatatttggcacgagttttgaggcaaagctcaccggatcgatcgggcaccagccggtgtgatcagccgcgccggcgatctcggcgatgcgaccggcgcgctgcggcgggatcacgttggcgaccgccgcggtgtaattgccgaaatcggtgacgatctcgttggtggccggattgaccgacgtgacgcgcccgccctgcgacagcgcgatccgttcgatcatgccgggatagagttcggcccaggctttctcgaacagtttctgctgcgagtaattgtccttggcgtcgagcaccaggattttcgacttcggcttgttcgccttcaggtaatgcgcgatcaggctggcgcgctcgtaaggcgccggcgggcagcgcagcggtgcggccggcaccgcgatcacgacgaggccgccgtcgtccatcgcctcgagctgccggcgcagcagcaccgtctgctcgccggctttccaggcgtgcggcatcttttcggcgttggcctcgtcatagccgggcagggcatcgaagtgcatgtcgatgccgggggccagcacaagccgatcgtaggggagcgtcgtgccatcagcgagtgcaatgccgcgcgcctgcgcgtcgatcttggtggccgcctgagcggcgaccgtgatgccgtcagccgcgaccttgtcgtaggtgaattgctgtgcggtgagttcgcgcaggccggcgatcacttcattgctgaacgggcacgcggtaaaagtcttgttcggttcgatcaacgtgacctggagttttgcgtcgcgccgccgcagcgcccgcgcgcaggccgttccgccgaagccgccgccgattaccgcgatgcgcggcgctgcttgcgccagcgacggacgcgccaatgccgccgccgcgacggcagcgacgccacggatcacatccctgcgcgtctgatgacgcgagacggccatgcacgacaatccggaataaggaagcggcggccgctcaggccgccgcttcgggtttgatcaggcgaaggagatgttctggttgcgcagcgggaaagagcggatgcgctttccggtcgcggcgaaataggcgttgagcaccgccggcgccgcaacgccgatggtcggctcgccgacgccaccccagaacccgccgctcggcaccatcacagcttcgaccttcggcatttcgttgatgcgcattgagttgtaggtgtcgaaattggtctgctcgatgcggccgtccttcacggtgcagccgccgtagaacagcgcgctgagaccatagacgaaggagcccgcgatctgccgctccacctgcgccggattgacgacatagccgggatcggtggaggcgacgatgcgatgcaccttgatcttgctgccgtcggtcaccgagatctcggcggcgccggcaacatagctgccatagcccatcacctgcgcgatgccgcgataaacgccctgcggcgccggcgtgccccagccgatcttctcagcgaccgcattgagcacggcaagatgcttgggattcttgcccatcagcttgcgccggaattcgagcgggtcctggccgacagcctgggcaagctcgtccatgaagcattccatgtagatcgcgttgtgattgacgttgacgccgcgccagaagcccggcgggacgtgcggattgcgcatcgaatgctcgaccagcaggttcggcaccgaatagccgatcgcggcttcgccggattgcgcgacgccctggaacgcggcggggtccatgccgttctgcagcgcttccgggcgcaccgagaacaggatggattggccggacaaccggtagtgcagcgccaccaggttgtcgtcggcatcgaacgcgccggtcagcttgcactgcgtgaccgggtgatatttgccgtgctgcatatcctcttcgcgcgaccacagcagcttgatcggcgtgcccggcatctgcttggcgatcgccaccgcctgccggacatagtcggtcatgccgcgccgaccgaagccgccgccgagcatcagcttgtgcacgtcgaccttctcggcgggcaggccggaggcctcgagcgctgcggcgaacgccgcctcgccattctgcgtgccgcaccacacctcgcatttgtcaggcgtgtagagcacggtggcgttcatcggctccatcgtggcgtggttctggtaggggtagctgtagaccgcttcgaccttcttggccgcgcttgcgatcgctgccttggcatcgccgttctggttgccgacataggccggctgcgcattgtcgagaccttcggcaagccacttcgcgatcgtctcgctggagacttttgcgttgtcgccttcgtcccagacgatcggcagcgcatccagcgcagtcttggcgcgccaccaggtgtcggcgacgacggcaacagcgctgtcgccgaccggcaccaccttcttgacgcctttcatgttggcgatcttggcttcgtcaaaactcttcaccttgccgccgaacaccgggcagtccttgatcgcggcgttcagcatgcccggcagcttgacgtcgatgccatagatcatcttgccggtggtcttgtcgacggtatcgagccgcttcaggcccttgccggcgatggtccagtccttcggatccttcagcttgacgtcggccggcggctcgagcctggcggcggcttccgcgaccttgccgtaggtcgtggtcttgcccgacgccgtgtgggtgatgacgccgttggagaccttgcactccgcggccggcaccttccactcattggccgcggcctggatcagcatcacgcgcgcggtggcgccgcccttgcggacatagtcctgcgaggtgcggatgccgcggctgccgccggtcgagaaatcgccccaggcgcgcttgcgggcgacgctctggccgggcgtcggatattcggtggtgaccttcgaccagtcgcattccagttcttcagcgacaagctgagcgaggccggtcagcgtgccctgacccatctcggagcgggcgatgcggatcaccacggtatcgtcgggccggatcacgacccaggcattcacttcaggcgcgccatcggctgcgcggaccacggctgggccgccgaacggcagatcgaggccgagcgcgaggccggcgccggcggtggccgtgccgatcacgaaggcgcggcgattgagcttgacgtgctggttgacttgcagattcatggctgcttcctcacgcgttcgcggcagcatggatcgcctcgcgcacctgctggaaggtgccgcagcggcagatgttggtgatggcgtcgttgatgtcatcgtctgatggcttcgggttctccttcaggagtgccgcgacggccatgatcatgccgctctggcaatagccgcattgcggcacgtcgctggcgatccaggcgagctgcaccttgtgcatcacgccgcccgccgcgagaccctcgatcgtggtgatgtccttgccggccacctcgccgaccgtgacaccgcaggagcgcatcgcgaccccgtcgacatgcacggtgcaggcgccgcattgtgcaatgccgcagccgtatttggtccccgtcagtccgacattctctctgatcgcccagagcagtggcgtgtcgtcctcgacgtctaccgtggttgtcttgccgttgatcttgaggtttgccatcgcgttcccctgaatggtccaatcctccgactggacttcagcgcgatgttggcctcgaaactggaacggttcaaatcaagaatatgcgcttgcagtgcggaagaaagttgatgcagcggtgtaaggtcgcgcctctgcgcgcgctacatgcctgttatgtcttttgcggtgaggcgacggccaggcgcaggaagctcatcacgctgccgagtgcggcgaagcctgcgcccaatgccagtgcgacggtggcgccctcgcgatcggccagggcaaaacagagggcggcgagggcggcgccgatcgtctgcccggtcagccgcgcggtcgcaacgatgccgctggcgctgccgctgcgatgcgacggcgcactcgccatgatcgccttcatgttgggggtctggaagaagccgaaaccgatgccgcagatcatggtgcgccagacgatgttggcgacgctgggttcggccggcagggtcgcgagcagcaccatgccaaggcccagcaacagcatgccgatgccgccgaggatgccggccggatagcgatccgacagccggcccccgatcggcgccatgaacgcaaccaccagcggccaaggcgtcatgaagaagccggtctcgacctgcgagcgatgcaggatgtcctcgaaatagaacggcagcgacacgaaggcgaggccctgcacagcgaatgagcagactgcggtcgcggccgacagcgcgaagatcgggcggcggaacaggtcgatcggcagcatcggcgccggatgatcggcatggcggcgggtcaggatccagccgaacaggatggctccgatcagctcggcgatgacaagcgatggcgcggtcttgtgggcggcactgccgatgccgatgatgaagaggccgaggcaggcgcaggcaagggctgcaccgaggaagtcgaaggcgtgtttggcgcgtggcgtcttcggcagcgtcttcatgccgattagcaatgcgatgatgccgaacggaatgttgacggcgaacagccacggccatgggccgagcgcgaggatgccggaggcgatggtcggtcccaatgtgaacgccgtcgcaacgaccagcgcgttgtggccgaagccgcggccgagcatccggctcggatagacgaagcgcaccagcgcggtgttgacgctcatcaggccgctggcgccgagcccttgcagggtccgcgcgaccagcaggctcggcagtgaccacgccagcgcacagccgagtgacgccaatgtgaacagcagcaggccgccgagatagatccgctggtggccgacgatttcaccgagcgcgccgagcggcagcagcgtcgcgaccagcgcgatctgatagacattgacgacccagaccacttcggcagggcttacatgcagatcgctggcgatcgcgggcagcgcgatgttggcgatcgcggtgtcgagcgaggccatcgccagcgccgtgaagatcgcggccaccgcccagcgccgccgttcccacggcaatccatcggtgatcggcgccgctgccgcggtggtcggggtcttctcgagcatgcctgaaactgtctccgggaccgccatgtactacgccggcatcccgttccacagccgcagcattgcatgatgcatatgcgaagtccgccgtcgtcctggcgaacgccaggacccataatcacgaatggatgttgtgagagggatcgtcgctacagcgtcgtgcaacaattggcagtcggggtaatgggtcctggctttcgccaggacgacggcgagtttgttcacgctccaataacaacaactcgcagagatggattctcgtgacgtgaatcgatcgagctttggatttcgtttcgccctctccacatgtcgttccggggcgacgcgttagcgtggaacccggaatccgttcttccacgaaccatgcggccaaatggattccgggttctcgcctgcggcgagccccggaatgacgaaagtgggcatgcggcgcgctctattcttccatcaccagcgcgcggatgctgcgggcgagaccgaggatgcgcgggccgcattcacgctcgatctgctcggcgctgaagcgataggaagggacgccgcaattgaccgacaggcactcgccgcccggcgtgcgatagagcggggcggcaacgccgaagatctcgcgccgccattcgccgagtgagatggcaaagccgcgctggcggcataactccacatccggcaacgtgcgcttctgcacgtaatcgaattcatctgggcgctcggccttgacgcgcgccacataggcgccgagctccggctcggtgaataacgacagcagagcgcgtccgaccgcggtcggcgccagtgtgctgacgaagccgacgtcgggcacatgcggcgccgtatccgtcgtgcgcagcgtctcgacatagatgaagtcgatcccgaacggcattgcgatcgacaccgtgccgccggcataggtggcgaagtcgcgcatcagcgggcgggcaagctggcgcaccttcagcgaggacagtaccggataggcggcggcgagcgcgccgagcccgagcacgaagcggcccttggcgtcgcgcctgagatagccgagctgctccagcgtataggtcagccgcgacaccgtcggccgcgacaggccggtgtgcagcgcaagctcggcattcgacagcgagcccgggtgacggcggaaggccgcgagcacgtcgagcccatgggccagcgtggtcgcaaaggacggatccgcctgaatttcggcaggagaaatcactgtcatgcaaaataatgatctccggttagccaatctgtcaagatatcgaaatgaatttgcaagtcgtgtcgagatttgtttatctgccgggaacaaggacaaaaaaccgctggaacgaggcgcccttccgatgacgatgaccgagcaagcccgagacgcaaagcccgccgcgatcgacaaggagcggttgcgctcgaagtaccgcgaggagcgcgacaagcggctccgtcccgacggcaatgaccagtatctccagatcaagggccagctcgcgcattatctcgaggatccctacacgccggtggtcgagcgcgcaccgaagacggatcacgtcaccttcgcctttatcggcggcggctttgccgggctcgccactgcggcgcggctgaccgaggccggcgtcaaggatgtccgcatcgtcgagaagggcggcgatttcggcggcacctggtactggaaccgatatcccggcgcgcagtgtgacaccgcgtcgatggtctacatgccgctgctcgaagagaccggccacatgccgtcggagaaatacgcgcatgcgccggagatcctggcgcactgccagcggatcgggcggcagttcaatctctacgacaatgcgctgtttcacaccgaggtgacgggcctcgattgggacgccgcgcaatcgcgctggatcatccgtacgacgcggggcgacaccttcaccgcgcaatatgtcggcatcggcaccggcccgctgcatgtgccgaagctgcccggcattgccggcatcgagcgcttcaagggccactcgttccataccagccgctgggattacgactacaccggcggcgatccccggggcgcgctgatggacaagcttgccgacaagcgcgtcggcatcatcggcaccggcgcaacgtcggtgcaatgcattccgcacctcgcgcgtgcctgcaaggagctctacgtattccagcgcacgccgtcttcggtcgacgtgcgcggcaacggcccgatcgatcccgcctggtttgccgatatcgcaaccccgggctggcaacagcgctggctggagaacttcaccgccaaccaggccggcggatcggccgaagaggatctggtgcaggacggctggaccgacctgtcgaagcggatccgcgccaagatcatgctgctgccgcgcgagcagcgcagcgtggaaaacatgcgggcggcgttcgaggattccgacttcgagaagatggaggagatccgcaaccgggtcgacaccatcgtccgcgatcccgagacggccaggaatctcaaggcctggtacggccagctctgcaagcggccatgcttccacgatgcctatctgcaggcgttcaacaccccgggcacccatctggtcgataccgacggcaagggcgtcgaggagatcaccgagaacgggatcgtcgtcgccggcaaggaatacaagctcgactgcatcatctacgcgtcgggtttcgaagtcggcaccgaatacaagcggcgggcgggattcgacgcgacgggccgcgacggcatcaagttgtcggattattggggcgagggcatgcgcaccaagcacggcatccacgtccatggcttccccaacctgttcttcgtgcaaccaacgcagggcgccaatctgatctccaacgtgccgcacaatctgaccgaagccgcgcgcaccatcgccctgatggtcggacacgcacaggccaatggcttcagggaaatcgaagtcagcaaggacgccgaggaccgctgggtcgagttgctgctgaccgcggtcggccggatgatcggcggccccgattgcacgcccggctattacaacaatgagggacgcgagcccgggcctgcggccaagctcaatgtcggttatccggcgggcgcgctggcctatttcaaatatatcgacgagtggcgcagcagcggccagttcgaaggcgtgcaattccgctgagtgaagcacggccgggactgatgtctgcccaacgagggagtgctcgagtatgacccagacaaccgcaggtgaaacctcgcacgatggtccgaaggcggcatccgcgccggtcatcgcgcagcacgaggcgaggttgaaggcgctgccgttcgccgacaccagggatttcgacgatgccgcgcgcggctttctcggcactatcgagaacgcccgcgtcacctcggcgcagggcagggtggtctggagccttgagccctacggcttcctgtccgaggagaaagcgcccgcgaccgtcgacccgagcctgtggcggcagtcgcgactgaacatgcatcacggcctgttcgaagtggtgcccggtgtctatcaggtgcgcggcctcgacatcgccaatatgacgctgatcgagggcgacaagggcgtcatcgtggtcgacaccctgacctcgatcgagggcgcccgcgccgcgatggagttgtatttccagcatcgcggcaagcggccggtcgccgctgtcatcttcacccatacccacaccgaccattggggcggcgcccgcggcgtgctcgacgacgccatgctcgcggcgggcgtgccaatcatcgcgccgaacttcttcatggagcatgcggtctccgagaacatcatcgcgggtccggcgatgctgcgccgcgcgcaataccagttcgggccgttcctcgccaagggcgtgcgcggccaggtcgattgcggcctcggcaagaccatggcggccggtggcgtggcgctgctgcggccgaccgacctgatcatcgcgaccggcgacaagcgcgtgatcgacggcgtcgagttcgaattccagatggcgccgaacagcgaggctccggcggagatgcacttcttcatcccgcgctacaagctgttgaacctcgcggaaaactgcacgcacaatttccataatttgctgccgttccgcggcgccgacgtgcgcgatgcgctggcatggtcgaaatatctcggcgaagccttgcagatgtggggcggcaaggccgaggcaatgtgcggccagcatcactggccggtgtgggggcaggagcggatcgacaccatgatccgcgagcagcgcgacctctacaaatacgcgcacgaccagaccatccggctgatgaaccacgggctgaatgccgccgagatcgccgagacgatccggctgccgcagagtttggagggggcctggcacggccgcggctattacggtcacatccggcacaatgtgaaggcgatctaccagaagtatctcggctggtacgacgcaaaccccgtcaatctcgattccttgccgccggtcgaggccggcaagaaatatgtcgagtatatgggcggcgccgacgcgatcctgaagcgcgccgcggctgacttcgccaagggcgaattccgcttcgttgcgcaggccgtcagccatctggtgttcgccgagcccgacaaccaggcggcccgtgcactgctggccgacacgttcgagcagctcggctacgccgcggagagttcgacctggcgcaatgcctatctgttcggcgcccaggagcttcggcagggcatgccgaagacgccgccgcgttcgccgatgccgcgcgagacattggccgcgctgcgcaccgagcagctctgggacgtgctcggcattcgcctcaacggccccaaggccgaaggcaagcgcatcgtgctgaactggaattttaccgacacaggcgagagcttcgtgctcaatctcgagaactccgcgctgacctacgtcaagggcacgcaggcacccgatgcgcacgccggcttcaccttggcgcgcagcgtgctcgacgaggtcatcgccaagctgaccacgttcccggaagccgtcgccgccggcaaggtcaaggtgtccggcgagccgctgcggctcggcgagttgatgatgctgatggatgaattcccacggatgtgggagatcgtcgagccgaagcggactgtggtgaggtagtgccgaaacgaagtcgtcattccggggcgcgcctcttggcgcgagcccggaatccatcgggccgcaaccccgcggatcgatggattccgggctctcgcttacgcgagccccggaatgacgaacggacatctcaaatcccgagatacgccgcctgcacctgcttgttgtcggcgagctcggcgctggtgccctgcatgatcacattgccgctttccagcacataggcgcgctgcaccagcgacagcgcgcggctgacattctgctcgaccagcaggatcgcggtgcccatcttgtggatctcgccgatcttctcgaaggtcacgtcggtcatcacgggtgcgaggccaagcgagggctcgtccagcatcagcaggcgcggcttcagcatcaggccacgtccgaccgcgaccatctgttgctcgccgccgctcatggtgccggcaagctgtttccggcggtcggcgagccgcgggaagatgctgtagaccagctccatcgtgcgcgcgcgatccgccttcgctttcggcgtataggcgccgatctcgagattctcctgcaccgtcatctcggggaagacctggcggccttccgggacgtgtgcgatgccgagctcggggatccggtagggcggcagcgtcgcgaggtcgacgccgtcaaaggtgaccttgcctgcgaacagtttgacgaggccggagacggcgcgcagcgtcgtgctcttgccggcaccgttggcgcccaacaggccgacggcttcgccctcgccaatggcgatgctgacatcggtgatggcagggaccgagccgtagctcgcgctgacgccggagagctcaagcatgtgcgtctcccggcgccggcggatgcacgtaggagccgagataggcgcggatcacctccgtattctccacgatctccttcggcgcgccctcggcgatcttctggccgtggtcgagcaccacgatgtggcgcgccaccgccatgatcgcgcgcatcacatgctcgacgatcacgatggtcaggccgcttgcggagagtttcttgaccagcgccaccgcctgatcgatctcggccgggttgagcccggccatcacctcgtcaagcagcaggatcctgggctgcgtcgccaacgcgcgggccatctcgagccggcgctggtcgatggtggtgaggtccttggccggggtctgctccctggcgccgaggccgacgaattcgattgcttcgcgcgccttgctgcgggcggcggcgatatggcggtcgcgcaggaacgcgccggtcatcacattggcaagaaccgtcatcgcgccgaacggctttgcgacctggaaggtgcgcgccatgccgagcgcgcagacgtcatgcggcttgagccccacgacttcctgcccgaaggcgagcaccgagcctgagtccggccggtgaaatccggtgatcaagtgaaagctcgtggtcttgccggccccgttcggcccgatcagcgccaccgtctcgttctcctgcacggtgaagctgacgtcctgcacggcgcgcaggccgccgaaacgcttgctgagacccctgacgaccaatgcttctgccatcggggcgacctcaggcgcgcgccggctggcgccggacacagcggcgatagagatcggtcgcaaacccgatcagcccggtcggccgccacaggatcaccgccatcaggatcaggctgtagaccgtgagctggatgccgcccaccgagctgccgagccagctctgcagcagcgccgaggtggtttccagcagcacagtgccgatcacggggccccacagcgtgccgatgccgccgacgatcgacaccagcgcggcctcgatcgagacgttgaagctgaacgcggtcgcaggatcgatgaagtagatgtactgggtgtagaaggtgccggcgagcgcggtcaggaacgcgctgatcatgtagatgtcccgcttgaccttcggcgcgttgacgccgatcgcctcagccgcatcttcatcctcaccgatcgcgacgaggtagtagccgatccaggatttctcgatcctgtgggtgatccacagtccgaccacgagcaagccgagcacgacgtagtaatacgacgacttctcctcgaactgcatcatcagcggcgcgctgccgaggttcgggatcgtggtgccctcggcgccccaggcgaagtcgcggaacttgaggaagatcagcatcagcacctgggccgtcgcgatcgtcgcgatggtgaaataggggccgcgcaggcggaagcagagccagccgatcggcaggctcgccagcattgccaccacaccgcccgcgatcatcccgatccagggcgagatgccgtaattcacttgcatgatggtcgaggtgtaggcgccgaggccgaaatacgcggcgtgcccgagcgaaagctgcttggcatagccgcccatcaggttccaggcgacgccgatgaacgagaacagcaagatgcggatcaagatgtcgatcgcaaacgacgacgtgacgatttggggcagcgccagcatgacgaccgcgccgatcgcgagcccaagccatttcaatgtgcctgacgtctgcatcagcggcccctcctggcgccaaggccgcttggcctgaaggcaagcgttaagagcaatagcgcgaacaccacgatcagcccggaatcggcgccgacgaactggatgccgagcgattccgcaatccccatcatcaggctcgcgaccagcgcgcccatcacattgccgagcgtccccatcacgacggcgacgaacgccatcagcacgaatacctggccgacgaatggataggccgaatagaacggcatcaggagcgagccggcggcgcctgcgagcgccagcgcggtgccgaaggcgaccgcgaacacgcggttcggattgatccccatcagcatcgcgacgtcgcggttctgcgatgccgcacgcatggcgcggccaagatcggtggtgtgcaggaatacccagagcaggccgctcagcgccatcgcgaccgcgaaggcgatcagcttggccacgggaacatacagcccgccgatgtgccacgcttcgtccgaatagaaagtgtggacggtgcggtaattggcgctgaacaacatcagcgagaggttcaacagcaagagcgacagcgcgaaggtcaggaagatctgcggcatgtcgttcggtccgagcaccctgcggatcaggaaatgctggatcaggacgccggcgaggaacagcgccggcatcgagaccaccagcgagaccagcggatcgatgccgaactgggtggcgaggaagaacgagatgtacatcccgatcatcacgaactcgccttgggcgaaattgacgatcttgaccacgccgaagatcagcgtgacgccgatgctgacaagcgcgtagatgccgccgatgagcaggccgttgatgacagcctgggccagtgtctcccacatgcgatgcgaccgtggttcaggtcttcatcagcggggcgcgggcgtcttccttggggaagatgctggcgaggtcggcgttctgccactgcacgccgaccggacggccatagacgttcttgccgtcggggccgaacttcaccttgccgcccggcgccatcgcggcaaagcccgaggagacgtccagggtcgagagtgcctcgcgcaccttcttcgggtcggcggaggcggcgcgttccagcgcgtcggccagcatgaaggtctgcgcgaccagcccgccggcatattcgaacgcgaactcgccggtgcgcttcttgaattcggcattgaccttctgcgcatcgtcgttgacgtcgtggttccagtgcgcgacgccctgcaggccctcggccgccttgccgacgttcttgtagaagtccggcatcacaaagccgcccgagccgccattgatcgcgatgttgagtccgacctgcttcacggtgcgcacgatcaggatgagatcgttgaggtaggacagcgagaacagcgtgttggcgccggaggccttgaccttgttgatcagcgggctggcatcggtgaagccggccgagtagggctcgaacatcacgatctcgacgccttcgcccggcgccagctccttcagcccgttcgaggtcgaggtgccgaacgcggtgttctcgaagatgacggcgaccttggcctgatcgctgacgagcttggccatctgcaactgcgccttggcgaattgcgaggcgcgtgcgaacggcgtgaaagtgtagctgcgtcccttgttgagctggtcggagctcgatccggtgatgatcggaacgtgagcgcgctcgcacacctcgctcgcgatcaaggtcagggcgctggcgtagcagccatggatcgccgacagcttgttgccggtgatgagacggtcggtctcggtgcgcgtcaccgtggtgtcgctctgcacgtcggagacgatgaggttgagtttggcgccgccgagcgacttgatgccgccggcctcgttgaccatgtcgaccgcgagcttcgccgcggccacgcagccggtgccgatctgcgccatgctgccggtggtcggatagagcgcgccgatattgatcggatcggcggcccagccccggatcgggaccgcgccgaatgcgccggctgcgagcacgccaccggtccgggcgaggaatttgcggcggttcagcttcttctgcgaggctttggacggtgcgacattattaatggccggcggcttgcggtcctctgtcatggcgttccccctgtgcgaccacggcgcggctctccgtccgctcgcttattatttttggctcaagcggggcgcataagagcacgtaatttgccaatcgcaaagacgatagccgccggggcgctgagcaaacgcgttgcgagtggtgcgtcgcagcaatcacgcgacgcgcgtatgccgacaacttcgatgcgtgggagttgccgacggacacggcagtattattgataatcggatgacccaacggaccggcacggacactgccggccggcctgccggattattcgatcgaccgctgcaacttctattccgcgcttgccaccagcttgaagcgcggcttggcttccatcaggctgcgataggcggcgagataatcgagggccatccgccgtgcggtgaaccgggtctcgaactgcttgcggatcgcgtcgcggttgagcatcgacaggcgcccgaccgaggagatcgcgctgatctcgtcctcgacgatgaagccggtcaggccatcttcgatgatctccggcactgagccgcggttataggcgatgacgggcgtgccgcaggccatcgcctcgatcatcacgaggccgaacggctccggccagtcgatcggaaccagcagaccgatcgcgccgctgagaaagtccggcttctcgcggtcgctgatttcgccgatgaactcgaccagcggattgtcggcgatcagcggcttgatcaactcgtcgtaatattcctggtcggcgcgatcgaccttggccgcgatcttcagcggaatgccgcaacgggttgcgatcctgatcgcgcgatcgacgcctttctccggcgcgatgcgcccgagcacggcgagataggattgcctggccggttgcggcgtcagcagattctccggcaggccgtgatggatggtgcgcacccagtgcgcctgcggcaccggccggcgctgcgcattcgagatcgagatcaccgggatcttggagaaagtgttgaagaccggctgatgctccggcaggtcgagccgtccgtgcagcgtggtcacgaacggcgtcggctgccgcgcaaacagcgaccacggataatagtcgagatggcagtgcaggaagtcgaactcctcgtcgtcggccttctgccgcacgcgttccagcatcaccatgtgcagcgcattgggatcgcggacggagccgtcgaggcgcagtgccttcggccaagtcgcatcgagcttcgcggaggtctgtgaatcgccactggcgaacaacgtcacgtcatgtccaagggttaccagttcttcggtcagccagtgcacgacccgttcggtgccgccgtagagcttggggggaacagcctccgtcagcggggcaacctgcgcgatgcgcattctccgtctcctgtttgtaatgtggaatgaactgccctcagccctctgatggcaccgacatgccaaagacgggaacgttctcgcacgtgcgaggttccttaggtgtgggagatctgccgcttctttcttccatcacactgtggtcttgctgatgccatcacgctccaacaggttttcgccgacgccagcgttgcaaaattgttgcgcagtgatggctgcatcaagaaatccaagcgccgcccttcgcgtcatcgtgcacgagagcttcaattaaaattttctcgttcaccttcaacagcttttgcaggacgtcatggaccatctgtcaggatacgcgcatcgcccgttcccttttgtgctgcgctatctgcgccggcggcttccgtcgcatgttgtaatcttgtcggctgtcgtcgcagcggttgcctgctcggtaggcacgcaatatggcgtgaagaacctggtcgacgcgctgtcggccgggccgtcggccgcgcatggcgtatggctggcattcgcgctgctcatgtcgctgatcgccgccgacaacttcctgtggcggatcgcgagctggaccgcgagctacaccttcgtcagcgtctccggcgacctgcgccgcgacatgttccgccatctcaccggccacgcgccgagctatttcaccgaccggctgccgggcatgctgaccagccggatcacggcgacgtcgaacgcggtgtttacagtcgagaacatgttcgtatggaatgtgttgccgccgtgcatcgcaacctttgccgcgatcaccctggttgggaccgtaagcctgacaatgtcagccgtgctgatcctgatcgcgggaaccatggtggtggcaatgttccgcatggccgccgccggccgacccttgcatgacgattttgccaaccgggcggccgcggtcgatggcgagatggtcgatgtgatcaacaatttgccgctggtgcgcgcgttctgcggcctcggctacgagcacgaccgcttcgatgcgacggtgaatcgggaactggtcgcgcgcggccgttccctgcgctatctcgaaaagctccgcctcgttcacgctgccgtgaccgtcgttctgactattgcgatgttggcctgggcgctctcgctctggcagcagggccaggccacgaccggcgacgtcgtgctggtctgcacgctcggcatctcgatcctcagcgcgactcgcgatctcgccgttgcgctggtcgacgtcacccagcatgtcgcgcgcctcaccgaggcgctggcgacgctgttgcagccgcacgagctgaaggaccatccggaagccgaggtgctggtgaagagcggtgcagcgatcgcgtttaacaacgtgtcgttccgatatcccggcggcctgcaggtgttcgagcgcttcagcctccgcatccagcccggccagcgcgtcggcctggtcggccagtccggcggcggcaagtcaacactatttacccttctgcagcgcttttacgatgtcgagcagggcagcatcgcggtcgacggccaggatatctcgcgcgtcacccagcagagcctccgtgcggcaatctcggtggtgccacaggacatctcgctgttccaccgttcgatcctggagaacatccgctacggtcggccggacgccaccgacgatgaagtgctgcgcgcggcgatcgcggcgcgctgcgacttcatcgagagcctgcccgagggcatgaacaccatcgtcggcgatcgcggcgtcaaggtttcgggcggacagcgccagcgcatcgcgatcgcgcgcgcgttcctgaaggacgcgccgatcctgctgctcgacgaggccacggcggcgctcgatgccgaatccgaggaggcgatccgtgaggcgttgtcgcgcctgatgcgcgggcgtacggtggtcgcgatcgcacaccgcctcgcgacgctgcgcagcttcgaccgcgtggtcgtgctgcagggcggccggatcgtcgaggacggtccgcccgatatcctggtgaagggaaggggtccgtaccgcgacctcgtggcgcgcgaaatgggccgcctttccaccagcgcggcctgatccccgcgtcatcaagcctgtgcttgcgttcccgtgcgttcgttgagcttaggattcgagctgagaagagtcgccagaggttcagatggcagctgacgtcgttacgcagatcatcaccgctcgtatcactgagcacgtagccgaatcgccgttctacattccgatgaccgggccggcggcgcggccgcggcgctcgctcaagcatgacgacaccttcatcgtgctcgatagccatggcgacatcggcgcctcggccggcgggccggacggcctgttcaacgccgacacccgctacctcgcgcggctggaaatggtgctggaggacgtgcagcccttgctgctcggctccaacatgcgcgacgacaattcggcgctgacggtcgatctcaccaattccgacgtctatcgcgacggccgcctgacgttgcagaaggacacgctgcacatcgtgcgctcgatcttcctgtggcgcggcaccgcctatcagcgcattggcctgcagaaccacggcgatcatgccgcgagcttcgatctgacgctgctgttcgacaatgacttcgccgacctgttcgaggtgcgcggcgagcggcggccgcggcgtggcatcggttcgagcaagctgctcggcccgaccgacgtggtgctggagtattgcggtctcgacgagcagacgcggatcaccgcgctgcatttcgatccgcggccgacccggctgtcggtcaacgccgcgacctatcatttcgatctcgagccggggcagctcacctcgttgttcgttgcagtgtcctgcaacaagccgatcatgcagaagccggtgccgtttttccgcgggctcctggcgcaccggcgcgagatgcggaattcgtcggctggtgcggcctcgatcgaaacctcgaacaacatcttcaacgaggtgctgtgccaggcgatggccgacctcaacatgctgatgacggagacgccgcagggccgttatccctatgccggtattccctggtattcgacgacgttcggccgcgacggcctgatcaccgcgttgcagatgctgtgggtcgatccgcggatcgccaagggcgttctgaagcggctggcgctgttccaggccaaggcggtcgatccgctcgccgatgccgcccccggcaagatcctgcacgagatgcgcggcggcgagatggccgcgctgcgcgaggtgccgttcgcgcaatattacggcagcgtcgattcgacgccgctgttcgtgctgctcgcggggctctatctggagcgcaccggcgacgtcgagacgttgcgcgagctgtggccggcggtcgaggccggattgcagtggatcgacggtccgggtgatcccgaccgcgacggcttcgtcgagtatcagcgcgccaccgaaaagggactgcggaaccagggctggaaggactccttcgacgccatctttcacgccgatggcacgcttgccgagggcaatatcgcgctggctgaagtgcagggctatgtgttcgccggcaagcagctcgccgcgcgcgcggcgcgcacgctcggctttgcggacaaggcgttgaagctcgaagccgaggccgaacggctgcgcgcgcggttcgaggaggcattctggtgcgaagagctcggcacctatgcggtcgcgctcgacggcgccaagcagccctgcagggtgcgcacgtcgaatgccggacagaccttgttttccggcatggtgcgccaagaccgcgcgcgacgggtcgccgcggatctgatgagccaaaaattcttctcgggctggggaatccgaaccgtcgccgtcggcgaagcgcgctacaatccgatgtcgtatcacgacggctcgatctggccgcatgacaacgcgctgatcgcgctcggattggcccgctacggcctcaagcgttcggtcgcgcatcttttcaaagggctgttcgacgccgcgagctatatggagctacggcggctgcccgagctgttctgcggcttccgccgcgagcgccggcgcggcccggtgctctatcccgtggcctgcgcgccgcaggcgtgggccagcgcgacgccgttcacgctgctggaggccgcgctcgggctggaattcgacaccgcgcgcggcgagatccgcttgcgtgatccgtgcctgccggagttcctcaacgacgtggtgctgcgcgatctcaggctcggcgcatccagcgtcgatctgcggctgcgccgccacggcgatgaggtgtcactcgaagtgttgcggacgcgcggccagatccaggtgtcgatcgtgttgacgcattgagcgtcgctgcgcggcacgcgcgctacggaaattgtggggagagcaacatgcgtccgaggatcatggttgttgcagcggcgttgctgacatgtgctggtgtccgcgccgccgacgatgcgtcgccgtcgccggtaccatcaccgccggcagcggcccaagcgccggcggaaactcccgcgccgccagcggccgccgcggcaaaggagtctccaccgccgtcggtgacggtgatcggcgcgcgtgacgcgcacggcattctcgggcgcgacgtgcgcagttccgccaatgaggacatgggtcgcatcgtcgacgtcatcgtcgaccgcgacggcaaggtgcgcgccgcggtgatcgatttcggcggctttctcggggtcggcagccgcaagatcgtggtcgactggaacgcgctgcggttcgccggcgtttccagcaagagcgacagcatcacgctggacctcaacaagcagcaggtgagcgctgcgcctgaatacaaggaagatacgccgctgatcgtgctgggcgcggccggcaatctccatccatgggattacgagcattagggggcagaagctggtcgcgcgtccgaactcttccttcgaggcggttggcgacgatcgtgacgagcgatctgccggtggcactcatgttgtgtcaattgtcgctgaacggcccggcccggagcagccgagtgcgccgtcgcgcgaaagccagcgcgggctggactggttcgtctttttcctggccgacgtgcaaaccgggtttggtccgtttatcgcggtctatctgacgacccagaaatggacccaggtcgagatcggcttcgtgctctcgatggggggcatcgtcggcctgctcggccagatacccggtggtgcgatcgtcgatgcggcgcgctcggagcgcgtggtcgcgggctgcgcggtggccgcgatcgggtcggctgcgctggcttacgcgctgtggccgatctttcccgtggtgacgctcgccgcgacgctgcacgcgcttgcaagctgcgtgctgggaccggcgatcgccgcgatcagcctcggcctggtcgggccgctggcgatcggcgagcggctcggccgcaacgcgcggttcgcctcgctcggcagcggctcggccgcggcgctgatgggggcctgcggctatttcctgtcgagccgttccgtgttcctcgtcaccttcctgctggcaattccgacgctgttggcgctggcgcggatccgcgagcgcgagatcgacatcgcgcaggcccacggtgcggtgaagcgcgaggtgccggacaagaaagcaaccagcgtcctcggcctggtccggcagcgctcactgctgatcttcgccggtgcgatgctgttgttccagctcgccaatgccgcgatgctgccgttgatggccggcgtggtgacgacgcgttcgagccaatgggcgccggtcctgatcgccgcctgcatcatcgtgccgcaggcgatcgtcgcgttgtgttccccctcggtcggccgcaaggcccaggcctggggccggcggccgctgctcttgatcgcgttcgcctcgctggtgatccgcggcctgttgttcgcaacggtgcgcgatccctatctactggtcgtggtgcaggtcttcgacggcatcactgcggcgatcttcagcgtcatggtgccgttgatcgtggccgacgtcgcgttcggcagcggccatttcaacctggcacagggcatcgtcggcaccgcggtcggcgtcggcgcttcgctcagcacggtgctggccggctatgtcagcgacaagctcggcagcggcacggccttcacgggcctcgccggcgttgccgcgctcgggctgctcgtgatctggctggtgatgccggagacgcggcggacggcatgacggaggcaggtttggctccaggcacccttcctcacgcatgcgccgtcatatatgagtgatttgctgctggaacgagctgacagtcccctggattaatcaatccaaaatcgtgatctggtacggatcggcgtagcgcgggcaggcatttcgaccgaggaacggcatggaaaatcgtaggacgacggcgcaaatcaccggaacgatgcggcgttgggggcctcccgcctttgtgactttcgcggccatcgtcacacttgcgtcattgaccggcggcgtcgctgcaaagcagcagcgcccagcggcaactgccgaggcgaccgcgccccgcgcggcgggcgagccgatcatggcgatcgtgtcgatcagcgcccagaaggtgaccgtctacgacgccgacggctggatttaccgcgcgccggtatcgagcggcgtcaagggacgcgagacgccggccggcgtgtttgcgctggtggagaaggacaaggaccatcactcaaccatgtacgacgatgcctggatgccgaacatgcagcgcatcacctggaatggcgtcgcgttgcatggtgggccgctgccgggctatgcggcctcccacggctgcgtgcggatgccctacgactttgccgagaagctgttcgacaagacgcggatcgggatgcgggtgatcatcgcgccgaatgacgtggccccggtcgatttcagccatccggcgctgttcgtgccgaacgcacaggccattgccgccgctccggcgcgtgccgagacgctggcccgcgaggccgcggatgccgccaaggtcgccgacgaggccaagaaggcgtcagccgccgccacgaaggaagccgcactgttcacgccggcctcgctgcgcaagctgcaacaggccaaggcccgtgccgatgctgccgttgcgttcgccgacaagacgctcgccaatgccaagaccgatcaggccaaggcgcgcgccgaggatctgaagcagaaggcggctgccaaggccgcggaggcgaccacgcaattcgaggccgcccagggcgacgccaagccgaagctcgatgccgcggcagcggcaaaggacgcggccaaggcggccgaggccaagaagaccgagacccagaaggcagcgaccgaagcgaagctcgcgctcgagccggtctcggtctacatcagccgcgcgacgcagaagctctacgtccggcgcaacacccacaagccatgggccgacggcggcgaggtgttcgattcaagcatcgaggttcccgtcaccattcgcgatccggaccggccgatcggcacccatatctacacggcgatggcgcgcaacgattccggcctgcgctggaccgaggtgacgatcgacgacggcgacaacgccaaggacgcgctcgaccgcgtcaccatcccgcaggatgtgctggatcggatcgcgccgaccgtcgtgccgcgctcctcgatcatcatctcggatgagccattgagcgccgagaccaactatcgcaccgagttcgtcgccgttttgagcaaccagccccagggcggtttcatcacgcgcaagccgaccaggccgatggagaccgacgacatggttgcgagctcggacgacgacggtttcggtttcttctcccggcgcagctggaatccccagtccggtacccagtacggctatccgcaatacggcaatccccaggcgccgacccagtacggcacgccgtattacggcaatccgcaagccggcaatccgcgccggcgcggcggccagtactactggcaatcgcaacaggactggtagcccggcgcattgtgagcatggacggcggcgtgacaccgccgtccatcgctcggggcgactacgggcgcgcttccaggatcaggttgaacggcgtttccgccgcgcggcggaagcgcgagaagccgccctggcgtgccacctcgcgcaacctggcctctccggcctgagcgccgagcgcaagcccgacctcctgatccagcgacgccggcgtgcagatcattgtcgaggccgcgtagtagacgcgcccgatcggattgaggttgtcttccagccggtcgttggcgaacggctcgatcaacaggcaggtgccgtcgtcggcgagggtagagcgggtgtgcttgagggcgccgaccggatctcccatgtcgtgcaggcaatcgaagaagcacaccagatcgtaccccttggcagggaatgtcttggcagaatgggtctcgaaatggacgcggtccgacaatccggcctctcgcgcggattgtcgcgccgtctggatcgagccgtcgtgatagtcgaagccgtagaaggtcgattttggaaacgcttccgccatcaaccgggtcgagacgccgtgcccgcagccgacgtcggcgacgacggcgcccttcttcagcttgtcgacgacaccttcgagcgccggcagccattcctgcaccaggtagtgcttgtagctggtgcggaagaagcgggcagtgccgcagaacaggcactcgttgcgcttgttccagccgacgcccttgccggtcttgaacgcgtcggtgattttcggctcgtcgagaaacgtcgcgccgaccaggcttcccaccgcgccgaggaagaccgggctgtcctcgtcggcaagcgcgagcgcctgctcgggcagcatcgagaatttcccggacttgctgtcatattcgatgtagccggaggcggcctgcgccgagagccattcctgcacgtagcgctcggccgttccggtcgccttggccagcgccgaggcattcatcggtccctgctttgcgagtgcctggtacagcccgagcttgtcgcccagcagcatcagcgaggcgttcatcgccgcaccgacatcgccaatcatctttcccatgaatgaattgaggcgttcttggttgacgtccatgatgtttctccatcgcaatcgcgtttggtcaaaagtccatcattcgcaatttcatgcatgcgtcgtccagccgtagggcgacgcgatcgccggaaaggttcgcagcaatgaagtgattgtgaccggcccgctgggatcccagtcgatgcgatgtcgcgggtgcgggaaacgccggctacgccgcctgcggtatcaccagccgtctgtagagcgcgctgtagcaggccgccgacaggttccagctgtaggacttggccatcgcgctggcgcgcatcgcgttgaggcggtctttggcgcgataggtgtcgaacgcacgcctgacgccgcccaggaaggactccgccgacggctgcgagaacaggaagccggtctcgccgtcggcgatggtttccgcaagcccgccggtctggtgaccgatcgggagcgaaccgaagcgctgcgcgtacatctggctgaggccgcagggctcgaagcgcgacggcatcagggtgaaatcgctgccggcgaagatccggcgagcctggccgtcgttgaagccgatgatgacgccgatcgcgtcagggcggcgccggtgcgcggccaccagcgcgtcctcgatcgcgggctcgccgctgccggtcacgacgatttgtccgccgtccctgatgatttcgtcggcggccgacagcacgaggtcgacgcccttctgatgcacgagccgcgcgaccaggccgaagatcggcccgcgcgagaccgcgagcccgaactgccggcggacatagtcggcgttggcctgcttgcctttccagtcgccggcgccgaacggctgcgcgagctgcgcgcagtggcgcggatcccagctctcgtcgatgccgttcaggatgccggtcagctggtgggcggcggagcgcacgcgcagcagcccctccagcccgcagccgagctccgcggtcgtgatctccttcgcgtaggtcgcgctgacggtggtcaggtgcgaggcgtagacgagcccacccttgaggaaggagagcttgtcgtagaactccagcccgtcgatgtggaatgagctgtccggtgcgccgatccgccgcagcgagtccttcggaaacaggccctgataggcaaggttgtggatggtcaggatcgacggaatccgcagctgacgccaggcgaggtaggcgggtgtgagcgcggcctgccagtcgttggcgtgaaccaggtcggctgcccaattcttgtccagcgttccggctgcaagttcggcagcggcggaggcaaagcggccgaaccggatgtcgttgtcgggccagtcgcggccggactcatcgccatagggattgcccggccggtcgtagagctctggacacagcagcacatagaccggcagcccgtccttggtcgatgcgcgcccgagcgtgcaggccggcatctcggccagggctgcgcattgtccaacgatttcaatatgggtgaactgttcgaccacatcccggtagccgggaagcatgatcctgacgtcgctccaggggcggagcgcccgcggaagcgctgcggaaacggcggcaagtccgccgacacggacgaaatcgtccatttccgtcgtgacgaataagaccttcaacaagcgccctcgttccagcccatgacagggccatgcaagatcgggtccaatctgcctttgagtaaaatgcaagaccgcccgcgggcccggcctggaggagacgctttcctgtcgggacggctcactttagggtcgcgcgacgccaaacaatgacgaagctggaggaagccttggcaacgacaatagccgctgacgatgaggggaatttgacacggagctttgacggccttcgggtgctcgatttttcgaccacgatcgccggacctcattgcacgcggatgctcgccgacatgggcgcggaggtgatcaagatcgagcccagtgagggcgagacgatgcggacgcggccgccgctgcgcaacaactgctcgaccgcgttcggccaactcaatatcggcaagcagagcctggtgctcgacctgaagtcgcccgccggcgtcgaggccgtgcgccggctgatcgcgaccgccgacgtgctggtggagaatttccgtcccggcgtgatgcggcggctgaagctcgattatgcctcggtccgcgacatcaatccgaagctgatcttctgctcgatctcgggttatggccagaccgggccgtcggcggaattgcccgcctacgcgccggtgatccatgccgcctcgggctacgagatggcgcatctcgcctaccagccgggccgctcgcgcccggactattgcggcatctaccacgccgacgtgctgaccggcgtctatgcgttcggcgcgatctcggctgcactctatcagcgcgccgccagcggcaagggccagcatatcgacgtctcgatgctggaatcgatgctgagcctgaccctgaacgagttgcagtggtcgcaattcgaggtgaagcagacccagcgtccgatgttcggcccgatcgagaccaccgacggctatgtgatggtggccatcgctagcgagaagacgttccaaaacctgatgcaggtgatcggccgacccgaatgggtgtccgatccgcgcttcgccaaatattccgatcggcgggacaattgggctgatctgatggagggcgtcgaggcgtggtcgcgcgcagtcagcacgcaggcctgtcttgccgcgctcaatgaatatggcgttccgtcgtcggcctatcgcaccgtgcgcgaggcgctcgccgatccgcagatcgcccatcgcggcgcactggctgaggtcgcggacggcggcggcagcttcaaggtgctcaacctgccgttccggatgtcgggtgcaacggtcggtgcccgcaagcggatgtcgacgctcggcgagcacacgctgtcatacctgaaggagatcggcctctccgacgatcagatcgcaggcttcgcagcgcaaccggcgaagacggcgcgaagttaagcctgcggcttttcatccgttttacggtcttgtcgcgcgcggcgattccggacaagctgccgcccgacatacgacgatccggaacaccggacgtcgcccacctgggagggagcatcgatgaagctggccgggcacgcgcacgcggttgcgcgcatatttcttgtggcgggattagcggccgcaacattcgctgcgcctgcccacgcgcagaagccgggcggcacgctgaccgtcggccaggaacttgatatccctggcttcgacccgctcaaggtcggcgtctacgacacatcggccaacaccgcggcggccgcgatcttcgacacactcatgacgctcgacgacaagggtgagccgaagccgaagctcgcactatcctgggagcattccgaagacttcaagacctggaccatcaagctgcggcccggcgtcaaattccacgacggcacgccgttcaatgcgcaggcggtgaaggagaacttcgaccgccagaaggatccggccaacaagtgccgctgcgcgttctacatcaccagcatcaagagcgtggacgtcattgatgacctcacggtgcgctacaatttcagcgatccggcggtgaacttcccggagacccagtcgatccagagctccaacaacgtgatgcagtcgccgacggcctggaaggccaagggcgatgattacaaccgcaacccggtcggcaccggtccctatgtcctgaaatcctggaccgccggcgaccgcatggtgctggagaagaacccggactactgggacaagggcaagccctatctcgatcgtatcatcctgaagccgttgccggacgcgcagtcgcgctttgcttcgctgcaatcgggcgaggccgatgtcatctgggacgacgagtacgacgccgacaacatcgtgaaggcgcagaaggacaagagcctgagcgtgaacacctatgccggctcaggcgcgcaggtctacgccttcaataccaaggcggcgccgttcgacgacgtccgcgtgcgtcaggcgctggtgatggcgctcgaccgcaagaagatatcgcaggcgatcactaacggcttggcgcggccggccaccaatccctatggcgacggctcctgggtcaagtgcaaggacgacggcgcgctgcccgaagacatcaacaaggccaaggcgctgctcaaggattacggcaagccggtcgatttcaagatgatcgtatcggcgacgccgcgcggccgcaccgtcggccaggtgttgcagcagctatggaagcgggtcggcgccaacatggagatcgagcaggtcgatcaggccacgatcgtgccgcgcgccttcatgcgccagttccaactgacgccgtggcgtatcgtcgatctcgccgatcccgacccgcagatgtacgccaacttccacaccggcagcccggtggcgctggcgaacttctccgatccggaactcgaccggctgctcgagcatgcccgaaccaccgccgacgtcgcccagcgcaccgaggactattgcgcggtcagccgactgatcaacaaggaggcgatctggttctggaccttccagaatacctactacgcgatatcgagcgcgaaggtgaagggcgtgccaaagatgttcaacggggtgctcgacgtctcctacgcctggaaggaatagcctttcatgctgttgttcgtcgcgcgcaggctcctgtacctggtaccggtgctgatcgcggtctcggtgctgaccttcgtgatcgcctcgctgctgcccggcgatctcgcttacgtgatacttggcgaccaggcgacgcctgagaacgtcgcggcgctgcgccacgacatggggctcgatcagccgatctggctgcgttatctgggctggctgtggcacatcctgcagggtgatttcggacgctcgttccgcaccgggcagaccgtgtggcaggcggtcagcgagcgcatcccggtctcgttcgagctgatgatcctcgccgagctgatcgggcttgcgatcggcgtgccgctcgcaatcgcctgcgcggccaaggccggcagtgcgttcgaccgtctcatgactggatcggccttcggcatgctgtcggtgccgaccttcctgtcggcgatcctgctgatctatctgttcgcggtcgagctgcggttgttgccggcgaccggctacgtgccgttcaccgaggacccgatcgccaatctgcgcttcatggtgctgccggcgctgacgctcgggcttgcggaatggcccggcatcatgcgggtgctgcgttcggacatgatcgcggcgctccaggaggactatatcgcgctcgccaaggcgaagggcctgaagccgtcgcgcatcctgttcgtgcacgcgctgaagccgtcctcgctgacgcttgtcaccatcaccggcatcaacatcggccgcctgatcggcggcaccgtcatcgttgaatcgatcttcgcgttgccggggatcggccgtctgctggtcggcgcgatctatacccgcgacctgatcatcctgcagggcgtggtgctgctggtcgcggcgggcttcgtgatcatgaacttcatcgtcgatttgctttacgccgtgctcgacccgaggatccgccatggccacgcttgagctcagcctcgatgagaccaatgcggcaccggtgcggcgcaagcgccggctcggcgcgctgttctgggtcgcgatcggctggatggtgctggtgttcgcggtcgcgatcttcgccgatctgctgccgctgccgagcccgactgacatggacatgctcgaacggagggggccaatatccgccgagcactggctcggcaccgacggcctcggccgtgacgagctgtcgcggttgatctacggcgcacggatctcgctgatcgtcggcctctgcgcgccgatgatcggggtcaccatcggcggcgcgctcggcatcctcgccggctatttccgcggccgtttcgaatccatcgtggtcggcagcatggacgtgctgctggcattcccgccgctgatcctggcgcttgcggtcaccgcctatctcggccagtcgatcttcaacctgacctgcatcctcggcgtgctcggcattcccgccttcatgcgggtggcgcgggcagcgacgctgacgctggcgcggcgtgaattcgtcatcgcggcacaggcgctcggcgccacgcatgcgcgcatcctgctgcgtgagttgctgcccaatgtgttgctgccgctgcttgccttcttcttgctcggcgtcgccgtcaccatcgtggtcgaaggctcgctgtccttcctcggcctcggtgtgccgccgccgatctcgagttggggcagcatgatcggggaggggcgtgagagcctcgatgtggcgccaatgcttgccttcattccggcgatcgcgatgttcctcaccgtgctctcgttcaacctgatcggcgacaccatccgcgcgttgaccgacccccggcaaggtgcactatgagcggcgcgttgctgtcggtcgagaatgcggtggtcgacctgccgacgccgcgcggcaatttgcgggcggtggatcatgtcgatctcaccgtcggcgccggcaggacgctcggcattgtcggcgaatccggctgcggcaagaccatgctgtcgcgcgccgtcctgcaactgctgcccaagaaggcgaaactgtccggccgggtgatgttcggcggacaggatct

SEQ ID NO: 43 - DNA, 61491 bp, Bradyrhizobium enterica
atcgaccaaaagctccttggcggcgtcgcagaccgacagcgccagcgccgccgaggtcaggtagccgtggaaggtgtacttgttcttctcgtagtcggcgtggacgctcttgctgatctcgttcgaggcggcgccgggcgtgacgaacggcgtcttcagccgcgaggcccagggctcgagcgccagcaccacctcgctgatgtagctcgagatgacgacattgaccttgtcctcgttgaccgcgcgctggaatgcgcgcaccgaatccgccgaggacgagtgattgtcgtaagaaacgatttcgatcttgcggccgtcgatgccgcccttggcattgatctcgtcggcggcgagctgcgccgcctgcgggatcgatgcgccggcgattgcctgcgcttcggcaatcacgccgatcttgagggtgtcagccgccagcgctccgctgggactggctgccaaaagacccaacacggccgctccggcaagttgctgcatcgcatgaacaggcagtcgcgatgttctcttcaccctgtttctctcctctttttgttcggctgcttcgagctcttggggcgggactatagctgcgacaaaatgcgcagcaagtgaaactgcgcgcagatcgccatgcgcggacggcaactaaagtagtgggtcggcgccggcgggctgaataaatatgaggcagagcgggaataaatgagagtcgtgggcgacgatctctcctcgcgtcgctgcccggctcgaccgggcgatgacaccgaacaagctgcatgaccgggcaacatacgcgccgtcgtcctggcgaaagccaggacccattacccaaaatctcaattgctgcgcgacgctggggccgcgatcccgctcatcaccgaagggcggtggttatgggtcctggctttcgccaggacgacgaacgacgagtcccgcctgcaacttgcgctgcgacgtaagcccgcccctactccgccatctccaccggctgcgcggcggggccggcgagcgggcgctcttccatcgtgatcatgcagatcgaggcggtggtcagcagcacggcggcggcgccgaacacgtagcggaacgcatggatcatgtcggccatcgggattgcgctgaccgtgctcgccgccgcggcctgatgctcgccggcgagcgagatgtcggtgccgagcgtcatcagcaggatcgtggtgaaggcggcaaccgtgaaggacgccatcatcgcccggaagaaattcatcgcgccggtcacggtgccgacctgcggccgcgccaccgcgttctgcagcgacaccacgctgatcgggaatgtggtgccgagcccgagcgcgaacacgctcatcacaagcagcaatccccagagcggcagcgtcgtcatcgccatgccgacggcgcagattgccgcaaccgaggtgccgacgattgcgacccgcttgtagtgcttggccttcgccatggtccggccggcgattgccgcgccgaaggtcgagatcgccgcgagcggaatcagcgccaggccggcctcgctggcggtgaggtggtagaccacctcgtaatagagcggcagatgcacggtgagcccgaccatggcgccgagcgcgcagccgcccgcgcccatcgcgaacggcaccaccgagccgccgagcagcgacagcggcaggaacggctcgtcggcgcggcgcgcatgccagacgaagccgccggcgagcgcgatcgaggtgccgatcatcgcggtgatggtcggcgacagccacgagagacgcgtgccgccccaggtcagcaccagcatcagcaccacggccgaggccatcagcagcacgccgccgagccagtcgaccttgcgcttgcggtggaacaccgggatcttgcccatcttcggcagcagcagcgcgagcgcggcggctgcaagcggcaggttgatccagaagatcatcgaccagtgcagatgctcggcgaacacgccgccgaccaccgggccgagaatgccgccggccatccagacgctggagaaataggcctgatagcgtccacgctcgcgcggggtgacgacgtcggagatcacggtctggaccaccggcatgatgccgccgccgccgagcccctgcaggccgcgggcaatgatcagcatcgtcatgctgggcgcgatcgcgcacagcaccgagccgactacgaacaggctgagcgaggtgatgatcatgacgcggcggccatagatgtcgctcagcgtgccgaacaccggcgccaccgcggtcgaggccagcagataggccgtgatcacccaggaaagattggtgacatcgtgaaactggcgtccgatcgtcggcagcgcggtcgcgacgatggtctggtcgagcgcggccaggaacatcgtcagcatcaggctgatcacgatggtgcggacttcatccggattgagcggtgccggcggcgccagcggcggcgcgtcgctgagttcgatcacctcgctcgggaggtgagacagctcttcggcaatatcgtcaggcaatgtggattggtcggcaggacacgggctctgccgttcatacttgttcatttggggcgtaatgctgctgcgcgggcgcgtcccgcgatggaatcattctctgtttcgcaatttatgcagcaattgcctgctgaggcagccaccccagcgcatgggtgcatcccgcagcgatgttctcgcgatgacgtgatcgcggcagcgccggcaccagttccggcgacggcatcgccacgtcctgaaaatctacttggaggccttcgggcgcttcttcaattgggctcgtttcggcagcaaggccggccaacgtacgatgtgatcctcgagatcggcgtcgttgacatcgatctcggtaccctcgacccggccgcgcaccgagaccccggcttcgtgaacggtgttgggatcgcccgagatgaggggatgccaccaatagaggtcccgcccctcggccacgaggcggtagccgcagctcggcggcagccagttcagggtgcggacattttcgggggtgagacggacgcaatccggaacctgctcggagcggttcggatagtccttgcaggcgcacagaccggcatctagcagcttgcaggagatatgggtgaagtagatcttgccggtgtcctcgtcctcgagcttctccaggcagcaccgcgcgcagccgtcacacaggctttcccattcggcgttggacatctcctccaacgtcttggttttccagaagaatccctcctggtccgacgggcgcttgggcggtgcggtcatgatgtccctggaaatggcggtgcaacccttcttgggacgccggcgccggctccgcaagggggtgcgattgcggggtcgcaaaagccggtgggcagcgttaggcctttcattaaattcaccagccgcgccattggtttatggcagccgctcggatagaacgtggaacgagtccccaacgacgcaaaagcgccttgggattgccgcaacatcgaagcaagacgctggcctgtgcccatttcgggcgcccgcagcgctgtcgaactgatcaagggacccggtgccgtcgcattggaaacagaaggtccggaatttcttcctggacctcgatgcgcgtatcgactcgacgctgttctcgtcgggcaagggcctgcgcgagctctacgagcgctattccaccttcatggaccgcttctatgtcggccgctggaagcgctgggtgttcatcgagccgctgtcggaagccgcaacgctcgggctcggcggcatgatcctgatgctgacgctcgcgattccggccttccgcgagaccgctgacgaggactggctgaagaagtccgacctcgcggtgaccttcctcgaccgttacggcaacccgatcggcagccgcggcatcaagcataatgactcgatcccgctggaagattttccggacaatctgatcaaggcgacgctcgcgaccgaagaccgccgcttctacgaccatttcggcatcgacgtgcccggcctcgcccgcgcgctcgtcaccaacgcgcaggccggcggcgtccgccagggcggttcgtcgatcacccagcagctcgccaagaacctgttcctgaacaacgagcgcaccatcgagcgcaaggtgaaggaagccttcctcgcgatctggctggagacgcgcctcaccaagaacgagatcctgaagctctatctcgaccgcgcctatatgggcggcggcaccttcggcgtcgacggcgcggcgcatttctacttcaacaagtcggtgcgcgacgtgaacctcgcggaggccgcgatgctcgccggcctgttcaaggcgccgaccaaatacgccccgcacatcaacctgcccgccgcgcgcgcccgcgccaacgtcgtgctcgacaacctcgtcgatgccggcttcatgaccgagggccaggtgttcggtgcccgccgcaatccggcggtcgcggtcgaccggcgcgacgagaactcgccgaactactatctcgactacgccttcgacgagatgcgcaagctggtcgacaccttcccgaaatcctacaccgagcgcgtcttcgtggtccgcaccgcgatcgacatcaacgtgcagaaggcggccgaggaagcgatcgagaaccagctccgccagttcggccgcgactatcacgcgacgcaggccgcgaccgtggtgtccgatctcgacggcggcatccgtgccatggtcggcggccgcgattacggcgcgagccagttcaaccgcgccaccgacgcctaccggcagccgggctcgtcgttcaagccgtatgtctacaccaccgcgctgctgaacggcttcacgccgaactcgaaggtcgtggacggcccggtctgcatcggcaattggtgcccgcagaactatggccactcctattcgggccaggtcacgctgacccaggccatcacgcgttcgatcaacgtggtgccggtcaagctctcgatcatgctcggcggcaaggaaggcccgaaggccggccgcgccaagatcgtcgaggtggcgcgccgcttcggcctcaaggcaccgctgccggatacgccgtcgctgccgatcggctccgacgaagtcaccgtgctggagcacgcggtggcctatgcgaccttcccgaaccgcggcaaggcggtgacgccgcattcggtgctcgaggtgcgcaccggcgccggcgatctcgtctggcgctgggaccgcgacgggccgaagccgcggcaggcgatcccgccgaatatcgccgccgacatggccggcatgatgagccacgtggtcagtgaaggcaccgcgcgccgcgccgcgctcgacggcattccgaccgcgggcaagaccggcaccaccaatgcctatcgcgacgcctggttcgtcggctacaccggcaacttcacctgcgcggtgtggtacggcaatgacgactattcgccgaccaaccgcatgaccggcggctcgctgccggcgcagacctggcacgacatcatggtcgccgcgcatcagggcgtggaggtacgcgagctcaacggcgtcggcatgggccagaagctgccgccgcagccggcgcaggccaatgcccaggccaacgcggcgccgcgcgtgctggaaaccaagccgggtccgccgccggtgctgaccaagcgcggcgcggatatcctggtacgggtcgagaagctgctcgatgacgctgccagaactgctgagaagaccaccggcaagaccacgctgaacgagcccgcgaagatcggcaagccggagtcctcgagcgcgctggcgttccccgaaaactacgttgccgcggccggcccggacggcgcgacgccccccgtgccacgcaagaactgacgtgcggctcctcctcaccaccctgctggcgctcgtcatcgccaccgccgtcggcctcgggctgacctacgcgactgcgacgcgcggcaccgatctcggcacgctgaagatcggcgcctggaccgcgcggccgaaaagcggcacctccgacgtcgacccctattcgcgcgccaccatcgcgcgcagcggcgagctgccgatcggcaccggcgacggcatcgcattctcggcgacctcggacgacaagaacaagccgctcgacggccgctgcgacgtcgtcgtcagcggcgtgacgccggcggcgcggttctggacgctgacgctgttcgaccgcaagggccacctcgtcgcgaactcgctgcaacgctacggcttcaccagccaggagatcatgcgcgcctccgacggcacgttcgagatccatatcgcctcgcgctcgcgcgccggcaactggctgccgaccggcggcatcgaacgctacgcgctgatgctgcggctctacgacacgccggtcggggtcgcgacccgcacccagcgcgacgcgccgatgcccgcgatcacgacgacgggctgcccatgatccgcgtgctgctcacgatcctcgcaggcgtgctgctcggcggcgtggtgcatctcgtcagcgtgctggcgctgccgcggatcgcctcgcaggacgcttattcgcggctgacgccgatgaccaagctcaacgaggtgacccagctgccgctggccgaccccagccactcgccgatgccgctgatggatccggccttcgcagtcgcgatctgccgctacgatctctcgaccgggccgctcaagctcaccgtgccggtcagccaggcctatacgtcggtgtcgttctacacccgcaacgaggtcgcctattacgcgatcaacgaccgctccgccggcaagaaggtgatcgagctcgacctgatgacggaagcgcagcacaacgagctgccggaggacgaggaagtcaccgccgccgaccggctgatcatcgactcgccgacctcgaccggcctgatcctcttgaaggcgctggcgccggagcccggcctgatgccccaggcgcaggcctcgctcgcggcctcatcgtgcaaggtgcaggccgagccggctgcggccaagcaggaggccccgccgccgctgcctacaccggcaccaccgcctgcagcccgtaagcgctaacgcgcagccggcgtgtgccggccgcagcggcagctctcgtagtcgacgggatcgtggctgttgacgatcgtgacatcagagccatgcgccgccttcagctggcgcagccgctcctggttccggatacgcgtcgcgcgatccatgtcggcccggcgctggaacaggccgagcacgagcgggatccggggcctggcgtcgagctgcgcatggtggaaataggcatcgccagcgtgcagcagccatctgtccttgtcgcgcactgcgatgccgcaatggccaagcgtgtggcccggcagcgggatcatcaggatatcaggctcgtgatcgccgagcgcccgcaccccctcgaagccgaaccagtcctcgccgccttcgccgtagatcgcccagtccggcccgtgcttccactgcgtggtgatgtagcgtcccgcgggcggtgtgacctgatgggtcaccgccatgtcgtactccttgcgatggacgtgcaccttggccttcggaaagtccggcacgccaccggcatggtcgcgatcgagatgggtcagcagcacgtgacgcacctcgtcgggcgagaagccgagcgccttgacctgccgcacggcggtctcggttggatcgagccgcggcgtggtctgccgcacccatttgcggccgagccgcggcgggtctgcgatgtcgccaagcccgataccggtgtcgaccagcacgaggccgtcattgctctcgaccagcaggcagtggcagaccattcgcgcccgccggaagaggctgccgctgccgttcacgagccgttgtccgatcgggcacatcgtgccggtgttgagatgatgaatccgcatgacaaatcctccgctgacctgcgcagacttgccactcgcgtttccataggtaaaatattgtctctctatcgatacgataggatcagactatggatatccgcgaacttcgctatttcgccgcggtctaccgcgagcgcaatctcaccgctgcggcgaagcgctgtttcatctcgcagccgtcgatctccgcggcgatcaccaatctcgaggccgaactcggcaccacgctgttcatccggcacaagaagggcatggccccgacggaatccgccgcgcagttccacggcatcgcccgcaagatcatcgacgaggcggacgcggcgcgacacctgtttcgcaaaccgcggacgaaacagacgctgacgctcggtctgttgcggacgctcgatcaggcgcggaccatcgccctgttgaagccgctgaccggcaacgccgatctcgcgcttcggctggtcggcgccagccagaagtccgacgcgcggatcgtcgcgagaaccatgatcgtgcccggcgagcacttcatcccgctctggagcgagcgctatgtcgcggcactgccgccgtcgcatcccctcaccctcaaggagacgctgcggaccagcgacttcgccggcgttccgatgatcgatcgttgccattgcgaacagcaggagcttttcaagcgcaccgcgccgccgcgcaagccggtggcgatcgcagaatttgaggagtgggcgatggcactggtcgcggccggggtcggcgtcgcgatcgtccccgaaggcgtggcgcgcggcaatcctgatgtcgcggtgcgcgcgatcgatgtcgacgtcacgcgccaggtcggcctcgcctacccctcggcccatccgccatccgatgcgctgaaggaattcattgcgagcctgccgcggcaggcgaacagccgccgcgtcaggtccgcaatcaagaaggtgaagcgcgcctagcccttggtcaccacggcctggcccgtgaccggcccggagaccagcggcgcgttggcggtgagccgggcgagttcgttgatctggcgttcggcatcggcggccatgccgtcgggcgcctggatcaccaaacgctccagcgcccagcgataggacgagatccgccgttccagggcctgctggacccactgcacaatcagcgtgttctcttccatccgcgccaccgcatcggcccgctcgcgcggcgacacgtcggcgatcatgttgaggctggcactgcgcttgcggtcgagctcgatcacctggatcgcggtggcgaagaacggctcgaaccgcgtgatgtcgtcgcgcacctggtcgatcagcagcgaatagcgcgaggcgaacgagcggtgcggctcgtcgatcaaattgcgaccataggcggtgcgatcgaacaccgccttctgccgccagggcgagggcagcggctggtagtcgccgaacacgctcttccacgccgggcgcgacagcggcggctcgacgaactgataggcgagatcgcgcaactggcgttcgtgttcggtgagctggaattgcgaggcgttcttgccgatgctgccggtcgcctctgcgcccatccagcgatgcatgtcgtcgttgcggaaatcggcgcgggtgcggccgaaatcgccgccgctgcagcccgcgagcgccgagcccgcgatcagcaggatcagcgccgggaatgaccgccaagcggcggtccgctgcacaggcgcgggcattgcacgctatccgcgatcaggagcgacggcggcgacggcgcccctgcgcagtgccctgctccggtccgcgaccaccgccggtctcctccgtcgttcgttcgatccgcacgacgggaaggatcagcacggtccccaagccttcggtcctcatgccttcgccggcagcaccggccgtgctcggccgccgtgcagccgcatccgccggaaactcaacgatggtacccatgttccgttctctctggcccgcacggacatgatttgccccgcgcacgccgagttaagaacgggcatggttaatgacatcttaagctgccgatacggacggttacggatatggcgctgtgccttaatggacacgcgcaaattcgagcgttcgccttcacggcttgttttccttaactgcgtcttaaaactgcctgcgtaggctcgcggccacagggtttttcaaaccgaatcttactggctagtcgcgtacgcccgagatgagcgcagctccgctatttcctggttttgatgggctgatgaggctctcccgtcgtgagggcgtcgacatccgccccactttgctgcgcgtcctgaccgacctctatgtgcaggcgagcgcgcactccgccgatgaagagcgccagttcgtcgagctgacgtcgcgcctgatcgacgaggtcgacgacgcgacccgcgccgccgtccgcgcgcggctagcgatctatccggcaacgcccgccccgatcatggacaaactcgggctccggcgcgccggtccggatcagccgatgccggcggccgcgccgattgccgcgccggcatcctccacgccgccggcgaagaccccgaccgaggccgaacagcggatggccgcgagccttgcgatgcggccgaacgatgccgccgaaatctccgacatgttctttgccgccagcgccagcgagcgcgcgcagatcctgcacaatctgcaggagacgccgctgaaggccgcggcacggattccgccagcccgcgccgcgcgcgcgatccacatcctggagatggcggcgttcgccgaggacctcgacaacttcacgctcgaactcggcgaagcgctgatcctgccgtcacggatcgccgccgacgtggtcaacgatcccggcggtgagccgctcgcctgcgcgatgcgggcgctcgacgtgtcgagcgccgcgttccagcgcatcctgatgttcctcaatccggaagccggttcgtcggtcaactatgtctatcggctgtcacggctctacgatcgcctcagcgagcgctcggcgctggtgatgctggcggcatggcgcggctcgaccatggcggtggcccgcgccaagtatcgctcggcgctctatgacgacgagcgccatcgcgtgcgcgccgcatcgacgcagacgcgatcgtcggtgcagcccggcagcgcagccgcgatccgcaaccagaaatccggaagctaaggcgcgatcatcgcgccttagcttttcatcttgggcatgatctatccggaaaaccgcttcacacttttccggatcatgtcctagcccttcgccagatcgaggaagtgccgccccgcgcggtcctcggtctcgacgatccaggcatcgggatcgaagcgcagctccttggtcaatcgctcctcgactgacggctcggataccggctgcggcgccgtcggcacgaatagccgttccgccggacggctgtcgtcatagaccgtctgcggcgccggtgcatacagcatcgcgttgccgtccatcagcgccaccttgacgaacacggcgccggcctcttccgcacccttcttgcggaccgcaccgaacacgccttcggtctggcagcggcgcagataggccgcaacccaaatactggttttcaatcgcatgcgccgacctataggccagcggcgcggccacgtccaattgtcacgcatgtcgtcgcgcagcggcgggttgaccgatacaggcctcgctcatatccttccatctgcggtgcaagccgcgcccgggtccacgggaagggtcgaacccacttgcaccgaatacgcggccaaccaagcctttgtgcagccggttttgtggaccatcggcgatgatgcacggaggttgccatgaaccgatcgcccgcgcgattgaatctcgaacatctgaagaagcaagccaaggagctgatccgcctgtaccggcggcaggcaccggaggcttacgcccgtttccggcaggcgctgccggctgcggccgggcgcagcgacgtgcagatcgccgcactcgatctgcggctccacgacgcgcagtcctgcgtcgcgcgagatctcggcttcgcctcatggccggacctgcggcgctatgtcgaagcacaattgccgccaggcaagagcaaggccgatcgtgtgcggcgatggctgcaactggtctacgccgcagatgtcgccggcaccagcgaccgcgccaatccgcgcgtcgcaatgcgcatgctccgcgaggatcccggccttttcggcgatgatccctatctcgcctgcgccatcggcgacgagagcacgatccagcgcatcgcgaccagcgatcccgcatgggtcaaccgacccggcggtcccctgaaactgccgccgctggtcgcggtcacgcattccagcctgctgcagattccggaatttcaggcgcggctgcatcgctgcgcgcgcctgctgctggcggccggcgcagacccagaccagcacatcagcagccgctggccgcccggatcgctcgacgcacccgatgacagcaatccgctgtcggccctgtacggcgccgccgggcagaatcacgacctcgggttgaccaggctgttgctcgaggccggcgccaatccgaacgacaatgaatcgctgtaccactcgctcgaaggttccgtgacgacgggcgtgctgctcgaacatggcgcgcggatcgccggcaccaacgcgatgtacaaggtgctcgacgacgagaacgtggcggctctcgaattgctgctgcggcacggcggcaacccgaacgagcccgcccgcaacgcgccactgaccgattgcggttcacccttgatgtgggcgatccggcgacggcggtcgcgaaaatgcattacgaccctgctcgacgccggcgctgacccgcgcatcacgacaccggacggattgagcgcctatcgatacgcgctgcagttcggcctgaccgaagttgccgaactgctgcgcgagcgcatcggcgaggagacgctcgccgacgacgagcggttcgtcgcggcgtgcagcagcggcaatgcgaccgaggcgcgacagatccaggccggccggcccgatctcccggcttcgctttcaccccagcagctgcggttgctgcccgaactcgccgcggcaggcggcgacgatgcggtgcggctgatggtcgagctcggctggcccatcgcggtgcgcggcggcgactgggatgcgtcggcgctcaatcatgcggtgttccgcggcaatgccgggctgacacgcttcctgctcgagcacggcgcagagtggaccgagcagcacggcttcggcgacaacgtctccggcagcctagcgtgggcttcctgcaatgagccgatcagtggcggcgattgggagggctgcgcacgggccctgctcgatcacggcatgccgcgcgccactccggatcgcgacgatccggaatgggtgctgctggccggccgcaggaagctgttctccgacgatgtcagggacgttctgctcggcgaagccgcctgacggcgcgtcaatgtgtcagatgcgaaatggccgggctcaagcccggccagaacaagcactagtcgatcgagtgcccgatcatcgcgcccagttcgcgcaccagacgatcggacatctggccagtcacgggcagcttgcgggcccgctcgaacttggcgatcgcgtgctgggtgtcggcgccgatcgtgccggtcggcttgagctggccgtagccatattcggtcagcgtgcgctggaccgaggcgatgcgtttgccggccgggctcagatgctgcgtcgggatcggcgccggcgggcgcatgacgctggacggagcggcggccggggccggtgcggccgccggcggcgcggcggtcgacttcagcaccaggttggccatcggatcggcctgcttggcctcaaccggaaccggcttcggctccggcttggcttcaacggacctggtctcggccggcttggtctccaccggcttcacgtcgaccggcctggacggctccacgccggccggctcgaccgatcgggcggcagcctcggctggacgcgggcgcggcatcgggctcgtgaccgcggcaaccggagccggcggcggcggcaacgtcaccaccgaaccgccgaacatcggcgacggatgacggccggcctgcaggaacagcgcattgatcagaatcgcaacaatggcagacgttgccagcacgcccgcgacgaggtccttcggactgtgcagcagcagtcgcagcactaggccgcgctcctcctcagccgcgatggccactgccttggcgccgcggcgacgccgcggcgtttcgtcatcgtccaaagtctgtctaggcactcttcttcacctgatgggtttgctcttgcagtccggatcgcagcgcgggcttcagggtcgacacattgctggacggctcgacagccggcggtgtgaacgccagcggcagcgcgaccgacacgatggtgccctcgcccaccttgctctccacgttcatgtcgccgtgatgcaggccgaccagccccttgacgatggacagaccgaggccggtgccttcgtggcggcgctgataggtcttgccggcctggaagaacggatcgccgagccgcttgagatcgtcggcggcgatgccgacgccggtgtccgagacccgcagcaatagccgcgatccctcgatgccggccgacacggtcaccttgccgccgcgctcggtgaacttgatggcgttggaaaccagattgagcacgatctgcttgaacgcgcgcggatcgccgttcacgatcggcaggtcgtcgggcacgcgggtgacgaggtcgacgccgctctcgcgcgccttcagcgccaccaaattgcagcagttgagcaaagccggccgcggcgcgaacggttccggcgaaatctcgaaattgccggattccatcttcgacatgtcgaggatgccgttgaccaccgacagcagatgctggccggagtcgttgatcagctgggcgtattccttgcggcgcgccgcgtcgagcccgagcacgtcctcctgcgcgatcatctccgagaagccgatgatggcgttgagcggggtgcgcagctcgtggctcatggtggcgaggaagcgcgtcttcgacgcatcggcctgctcggccacattgcgcgcctgttcgagcgcctgctcctgcaccttgcgatcggtcacgtcgcgcatcacggcgacgacttcggcatcggccgagggctgatcgagcgcgcggcagcgcatctcgacccagatgaattcggcggcggcctcgccccgcgcgccgtcgcggcgcacccggaactcgacgctgcgcgcctcgccccgcgcggcgtccgacagcgcggtgagataggccggccgatcggcgacgtggacgcggtcgaacaggccgtggcccgacagccgcgaggctggcacgccgagcatgatctcggcggcaggcgaaatgaagcgcaccgcgccgttgcggctgtgccgcgacagcacgtcgctcatgttatgcgcgagcaggcggtagcgctcttcctcgacatacagcagcgccacgctggtgcgcgccagcgactccgcgccgaaggcgagcccggcagcatagaagatcgccgatacgacgccgaaaccgaccagcgtgctgttcgaggcgaccgccggatcgacggccggcagcacatgataatgtgcgagcacgctcagcaacgccgcgcagatcatcgccagcgcgaacgcaaacgccaccacgcgccgcgaggccgacagcgcggcctcgatcggaatcacgatgagccacaccgcggcgaacgatgcgatgccgccggtggtcgcggcgatcatcatcacgagaccgcccagcgccagcgacgacagcacgtgcgcgccctcgtagcggccggtgcgcgacaggaaccaggacagcaggataggcgcgatcagccaggcgaacgccgcgacctcgatcgccgacggcgcaccgcgcatcgccagaaaggcagggaacgacgccagcgccgctaggctgccgagcagccgcggcgccatgaaggcacgatggcgcgcacgcgtcagcgcatcatactgcgccgacggatgcagcagcgcatccaggcaatcgcggatcagactcaaactactcacagcactcgcgcttcggctcaatcgtcagttagacgcgccggaacgcctccttcgtgattgcaggtcaacgtgtcagagcgaacttaagcgaacgctaaggcggggtggcctgctgccaaacaccgtgcattgggaggcttcgaggttgccattcaccggtcatttgtcagggatggtgaacggctggtttccgggtgcgcccgtctatggtttcgaaatggtggacgcggcgcagccggtgtcctcgcgctcactagccgccatcaatcgaatatttacggcgaatcaattcgggcgaattttccgcgatttttcggcggatttgcttcaatgcagatacttccgatttatcgaccgatgctaaccctgaggacaagagcggcatcgaccgcgaagaagcaaaagacaagatagacgaccgggatcgcgccatgttcttcctgctgcgtttggcattctggctcgggcttgtgctcgtgctgctgccgagagacaaaacacctgaagcggacaagacgccgcagatcagcgcatcggacgcggtgtcggccgcgaccgcgacgatcaacgacatgggtcagttctgcaagcgtcagccgtccgcctgcgaagtcggcggccaggccgcgaccgcgatcggccagcgcgcgaccgacggcgcgcgcaagctctaccagatcatcaccgacaagaagccgcccgatcacaccggctcgatcgacagggacgacatcgattcggccaccatgtcgcgcgacacgctgaccgcggacgatcagaccatcgagttccgcctgccgccgacgccgtgaatgcaagccagcgcgtttccgggtgacgtggcatccggttcgcgtcaacaaaacgcggccaacaacccggaaccggttccattttcgtcgctttcgcggcccgccttcctatataagccgttaaggacaggatgcgggccacgatgacgacgatcgacgaaatcagggataattttgcgctgctggacgagtgggacgaccgttaccgctacgtcatcgagctcggccgcacgctggaaccgttgtcggaggcggagcattcggccgagaacaaggtgcagggctgcgtcagccaggtctggctgtcgaagcggatcgagcgcgatgccaatggcgaaccgcggctgatctatctcggcgacagcgacgcccacatcgtgcgcggcctggtcgcgatcgtgctgacgctgttttccgggcaaacgccgcagcatatcctcgccaccgacgcgctcgcgctgttcgacgaattcggcttccgcgaccatctgacgccgcagcgctccaacgggctgcgctcgatggtcgatcgcatccgcaacgatgcacgcgaggcgctggcgtcagccgcgtagagcttcttgcttggcgcgccgtcctcacgtgaaccggaaacgccttagacgctacttccgcttccgcgcctgctggccgaggcccatcttcttggcgagctgagagcgcgccaccgcgtagttcggcgccaccatcggatagtcggccggcagcccccatttgtcgcgatactgctccggggtcatgttgtactgggtgcgcagatggcgcttgagcgacttgaagcgcttgccgtcctcgagacacaccagatattccggcgtgatcgacttcttcatcgacaccgcgggcttggccggctcgctcggcgtatcgctgcgcccgctcgacacgcgcagcagggcggcgtggacctggccgatcaggttcggaatgtccgaggccggcgtcggattgttgctgagataggccgaaacgatgttggcggtcagttcgaccggcgttttgcctgacgtatcggacatggctctaccttccccgtgctctcgacggcgcggcgcggcacggcacgccgttgcgcagtatccgtgcgcgacaatacatcaacagaatcgcgtactacttcgcgaatatgaacggattacaagaaatctgacaagaactgccgtgttctagacttcgcgccggccgttcgcaagtattgccgtagatttacggcctttgctccagatgcgagcgaagctcgtcgatcgaggcaaaccgcatcatgccctccggcatctgcgcttcgatggatccgtccgaatagagcgaataggccatgccgtcgacgacgcccgatttgagtaccgtcaccgggggctgttcctgcggcggcggcggatgaccggacgacggcgccacggccgccgactgcgcctcgccgaaggtcgatggcgcccgtgggccacgccgcggggcgacatcgaccggcctcggccgatccgccttcggccacgcatcgtcgaacgttgccggtgcgggatcggccgccgtggcaggacctggacgcagctccggcgacagcagatccggcgtcagcggctcggcagcccgtgcctcggtccgttcacgctccttccgcgaggaagagaacaacagattgcgccgcttcggcggcgcgccgccgtccgcggccgctgcacccggcacgggcggtgcgacctcagctggcgcgccgcgtgcagggatttcatcgtgccagggcggcggcgccgcggccgtcggcgtagctgacgggaccggcgggggtgcagcgaccttcgcttgccgcggcggagggaacaccgtatcgtcgggggcattacgcggggaagttgcaggcgacgggacgtcgaccccggcagccgcggcaccggattcgagccgcgcggcgatgacctggagttccccaaccaccgcggcaagcgccagcacgatcgcacccgtgcacacgccggtcacgcctgtcgtgatcaatgtgccgccgacgctgaattccttgtaggggattcccaagccgaccgccgccaagcccgccacaaccaggcccgcgccgacgaccaacagaccaaccttcatcgaactaacccccgggagacccgaccgaaaatcggtgtgggccaccaacgccacgataccgtcatattgcccacaccgccaaccgccaattgtagacggagttccctaaaatcccgcttaaccgacggacaggtgtccgcctcgcgggcctcaccaactgcgccggcgcccgcttccgtagatttactggctacgaattgctgccaatttattgcaacgcatctgggaaattacgccacaattcccaattactcggaaactgaactgcgctatggatgccggggaatgaggccctaaagcgccaaactgggccacaggcacgccggtatcactagctatgtcatcgattacgacgtccgccatcgaggcgcctgcgcggcgctccgtggagaagacctgcgacgatctcgcattcctcgtcctcggcgtggtcgccgtggtcgcagggctcactttccgcgattatgggctgggctgggacgattacacccacgctgaatatgccgacctcctgctgcggatgtacgggtccgggttcaaggacaccggcgcgctgtcgttcgccaatctctatatgtacggcggcggcttcgatatggctgccgccctgctgcacaaggtcgttccgctcgaattgttcgagacccgccgcctgctcggcgcggttgtcggcgttatcgggctcgccgtaacctggcgcctggcacgccgtgtcggcggcccgctggcggggctggcggcgctgctgctgctggcgctgtgcccgaccttctacggccacatgttcatgaacccgaaggatgcaccgttcgccgtggcgatggtggtgctgatcctcggcctcgtgcgcctgatcgaggaatatccggccccctcgccgcgcacgatcctgatcgtgggcctgggtgccggcttggcgatcggctgccgcgtgcttggcggcctcgctttgatctacgccgtgatcggcttcatcccgctctggatcgaggaagtccgcaagcagggtgcgcgcgaggcgacccaccgctttgcccacgtcgtctatgtgctgctgccagggctcgctctcggctatctcgtgatgggcctgatctggccgtggtcgatcatggagcccgggcatccgctggaagcggtgacctatttctcgcacttcttcgaaaagccgtggaaggagatgttcgacggcgcgctggtgtcggtgccggacatgccgtggtcctatctgcccacgctgttcgcgctgcagcttcccgaagtgctgctggcgctgctcaccgcggccgtggtcgccaccttcatgtcgctgtcgcgcaacgatgtgaccgcgaagcgcaagacgatcatgctgatgctgacgctggcggcgaccctgccgctggtgatcgcgatggtgaagcggccggcgctctacaacggaatccgccacttcatcttcgtgatcccgccgatggcggtgctcgccggcgtcgcattcgcccgcggcatggactggctcggcgagaaccgccgcgcctggcagccggcggcgctcgcggtgttcgcgttcggcctgctgctgccgctcagcgagatgatccgtttgcatccgtaccagtacacccacttcaaccacatcgccggcacggtgcggaccgccgacaatctcttcatgctggactattggggcctggcgctgaagcaggcctccgacggcttgcgcgagcagctggcggagcggcaggaagtgccgccgcagcatcgcaagtggaaggtcgcggtctgcggaccgcagcgtcccgcgcaggtcgcgctcggccccgacttcacgatcggctgggacagcaatgcggccgacttcgcgatgacgctcggcgagttctactgcaagggccttgccgcacccgtgatggtggagatcaagcgcgacgacgtcgtgttcgcccgcgtctacgacatccgcggccgcagcatttcgagcctgctggcgatcccggcgccgtagcgcgacacgatctcagaagatccatcgcgcggttgcccaccgacgatcgccgttcggatcgtgggccgcatgccgacatgactgtcacgctggtatgctgccttgctgcgctagggcgacggcgctaggcttgaaccaagcaacaacgatcaatggagcaatcgccatgtcgccagcggaagcgcgtctcaaggaagtgccatcgaacatgagtgcggcggaatgggagcagcggatcaatctcgccgcctgctaccggctggtggcgctctatggctgggacgatctggtcgatacccatatctcggcccgcgtgcccggccccgagcatcacttcctgatcaacccttacgggctgatgttcgacgagatcaccgcctcgagcctcgtcaaggtcgacctcgacggcaaccagctctcgcagagcgactacagcatcaacccggccggcttcaccatccattcggcgatccatgaggtgcgcgaggacgccggctgcgtgcttcatctgcacacgatcgacggcaccgcggtgtcgagcggccccgaggggctgctgccgctgaaccagaccgcgcagctcgtcacccacgatctcgcctatcacgactatgaaggcatcgcgctcgaccatgacgagcgcccgcgcctgcagcgcgatctcggcaccaagaaccacatgctgctgcgcaatcacggcacgctgacggtcggccgctccgtcgcctccgccttcgagcggatgtaccatctggagcgcgcctgctcgatgcaggtcgcgacccgcacgctcggaccgatcgcctatccggtcgaccagctcgcgatcgacaagaacaccgagctgctctccaatccggaccgtgccgagctgcgctcgacccagctggtctggccgccgctgctgcgcaagctcgaccgggtcaatcccggctaccgtgattgaaatttcacaatcctggggtaagctgcccgtcaacaccctctgcactacctgaatcaaaacgccgcccaattccgggcggcgtttttacgttcggggcatcccgcctatttggcgtcggcgaaggccgccaggatccgcgcccacgagcggatccccttgtggtagctcttgagatcgtacttctcgttcggcgaatggatgttgtcgtcgtcgaggccgaagccgatcagcacgctgtcgaggccgagcgtgcgcttgaagtcggcgacgatcgggatcgacgcgccggagccgatcagcagcgcctccttgccccactcatcggtcagcgcgcggcgggcggccgccagcggcttcatgttccagtcgagcgcgatcgccggcgcaccggaatgatcgatgaactcggccttgcagtcggcgggcaggcgcgccgtcacgtaatcccggaacgccttgcggatcttctcgggatcctgtccctcgacgaggcggaacgagaccttcgccgacgcctcggccgcgatcaccgtcttcgagccctcgccggtatagccgccgacgatgccgttgatgtcgcaggtcggccgcgaggagacctgctcgatcaggagccgatccttttcgcctgcgggcaccgagaggccgatcggcttgaggaaactttccggcgtcagattgagctgcttccactgcgccaggatatccggcggcagatccttcacgccgtcatagaagccggggatggtgatgtggccgttgtcgtcatgcaggccgccgaggatccgcgtcagcacgcggatcgggttctgcgcgccgccgccgaacacgccggaatgcaggtcgcgattggcggccttgatcttgacctcgtcatagaccaggccgcgcagcgaggtggtgatcgccggcgtgttggggtcccacatgccggtgtcgcagaccagcgcgaagtcggccttgagctcggccttgttcgcctcgaggaacggcacgaaattcttcgaaccgatttcctcctcgccctcgatgacgatggtgatgtcgaccggcagcgatcccgtgacattcttccaggcgcggcaggcctcgacgaaggtcatcagctgacccttgtcgtcctcggctccgcgcgcgacgatgatcttgcgcccgtcggcatggtcggtcaccacgggctcgaacggcggacggtgccagagattcaagggatcgaccggctgcacgtcatagtggccgtagaacagcacgtgcggacgcccgtcggtcgagccgttcagcttgccgaccacggccggatggccggcggtcggccgcacctcggtcttgaagccgagggttgcgatatccttggcgagatgatcggcagccgccctgcagtctttggcgaaggccgggtcggccgagatcgatttgatccgcagcagcgtgaacagccgctcgagactgttgtcgaaatcggcatcgatgcggtcgaggacgggctgcagcttggcgttggacatcgcggatatcctttttgtttggacgttatgccaagttgtagcgcgccggccgcgcgaggcaaggccggttgcccgttccagcctggagcgtcgcgatgctacctgcgcaggattccgccgagcgcgccgcgcaccaatgcgcgaccgatcgagccgccgaccgaaccgccgaccgacttgccgagatctgcgaccacgccgccgaccaccttgtcggtcaccgagcgcgtgacgttgcgcgcgatcacctgtccggtcgagagccggccacgcttggtgccgaagatcgtggcggcgatcgcgccgatctggccgaggatgccgccaccgccaccagcggccggcgccgcagcgcctgacaaacgcttctggatgatctcgtaggcggattcagcgtcgatcgcggtgtcgtatttgcccttcaccgggctcgcatccatgatggccttgcgctcttccggcgtgatcggcccgatccgcgctgacgggggccgcaccatgacccgctcgaccatcgacggcgtgccgccaccctcgaggaacgacaccagggcctcgcccttggcgagctccatgatcacccgcgcggtgtcgagcttcggattgggccggaaggtctgcgcggcggcggcgaccgccttctggtcgcgcggcgtgaaggcgcgcagcgcatgctgcacgcggttgccgagctgcgccagcaccttgtccggcacgtcgatcggattctgcgtgacgaagtagacgccgacgcccttggagcggatcagccgcaccacctgctcgatcttgtccatcaacgccttcggcgcgtcgttgaacaaaaggtgcgcctcgtcgaagaagaacaccagcttcggcttcggcaggtcgccggcctccggcaattcctcgaacaattccgagagcatccagagcaggaacgtggcgtaaagccgcgggctctgcatcagcttgtcggcgacgaggatgttaaccatgccgcggccgtcgcggtcggtccgcatgaaatccttcagcgtcagcgccggctcgccgaagaatttcgcgccgccctggttctcgagcaccagcagctggcgctggatcgttccaacggtggccttggacacgttgccatagctctgcgcggccttgcggatcgacgccagcggatcttcgccctcatcggctcccttcttgctgccgtcgggcgcgatcgcatccagcagcgcgcgcagatccttcatgtcgatcagcgcgaggccattctcgtcggcgacacggaaggcaacattgagcacgccctcctgcacgtcgttcagatcgagcatccgcgacagcaacagcggccccatctcggtgatggtggcgcgcaccggatggccctgctcgccgaacacgtcccagaacacggtcgagaactgatctggctggaaggtcagccccatctccttggcgcgcttcaggataaagtccttggcctcgccgacttccgagataccggagagatcgcccttgatgtcggctgcgaaaaccggaacgccggcgcgcgcaaatccctcggccatcacttgcaacgagaccgtcttgccggttccggtcgcgccggtaacgaggccatgccggttggccagcgccagcgtcagccaggctgtctcctcgcccttgccgataaaaattttctcgtccgtatcggccaacttgttgtcggaggtcgccatcgtctcgcctcttcgcgcagattttagatcgtttcgatcatcgcaccgggttcgacgtcacaccccggttcggtaccgaatggctgccatcatattgcatgttgaggaccgattgaaaccgtcagccgatgccgacgtatatcgtcgctgcaccagttcctcatattttattcccgtcaaagtgacgaaaggcattgcgcattgcgacaagatggtgtgaatccgccgctcactcttgcagcgaggccacagtcacggcgcgatcgaaaaagaatacgaactgaaatgcgcggatcgcttgtatttcgtgacacaggcgctcaagataaatcctcaagaacgatccggcaaagtccggttgaggcggggcaagatggacgaactggttggacagctggccgcgaaggccggcatcgacggcgctgtcgctgaaaaaaccatcggcatcgttctgggtttcctccgtaacgagggaccttccgacaaagtccaggttctgatcgaccaaatccccggcgccgaagcggcaatcgccgcatccaacaacagcggtggtctatcgcggttgatgggcggcgggttgatggctgtcggcacccggctgatggcgcttggcctgagcatgagtgaaattcagaacgtcgcgcgtgaacttttcaggttcggtcgcgacaaaatcggagcggatcaaatgggcgagatcatctcggggacgccgggcctcagccagtttgcctgaagcactctccccacgcccttgcacgcgcgctcccttctacctgcatacgagtatcatgacataccccctctccgagatcgaaggcctgtccgcctattgcgccaccaaactgaaatcacagggaatccgcacgaccgacgcgctgctagaagccgcccgcaccgtcaagggacgcaaggcgctcgccgccaagaccgggatcagcgaacaacaactgctcgaatgggccaacatctccgactatatgcggattcccggaatgggtaaggcgaaggtcggcctggtccgcgccgccggcgttaccacggtgcgcgagctcgcccaccgcaacccgtcgcggctggcacagagcatgaaggacgccaatgtgcgccgaaagctcgtccgcgtgatgccatcggagaagtcggtcgagttgctgatcgaagaggcacgcaagctgcctcccaaaatcacctattagcatcccccattagcctgccttaacggcattcagcactgccggggccggccatcatcgcgacaccttgacttggcgttacggccagcgcaaagccagcgcatgacggcgaccaagcccatagcatctgttgtgaccggcccggccgcatcggcggtgctgccgacgctgctgtcgcggccctatccggccgtgatgggcatcctgaacgtgacgccggactcgttctccgacggcggccggttcgtcgcgcccgaacaggcgctgacgcaggcccgcaggctggttgccgagggcgccgacatcatcgatatcggcgcggaatcgacccgcccctatggctcgcagccggtcaccgccgacgatgaactggcgcggctgaagccggtgctggccgaggtgatcgcactcggcgtgccggtctcgatcgacagcatgaaatccgaggtggtggcctgggcgctcgaccagggcgccgtgatcgccaacgacgtctggggcctgcaacgcgaccccgacatggcgccggtcgtcgctgcacgcggcgcgccggtgatcgtcatgcacaatcgcgagagtgccgatccttcgatcgacatcatgcgggacatcacggcgttcttcgaacgctcgcttgagatcgcggcgcgcgccggcattgcgtccgaccggatcgtgctcgatcccggcatcggcttcggcaagacgccggagcagagcatgatcgcactggcgcggctctccgagctcgacgcgttccgcctgccggtgctggtcggcgcctcgcgcaagcgtttcatcagcacggtcgtgccctcggagccgcaacagcggatcggcggctcgctcgccgcgcacctgatcgcggcaaggaacggcgcccgcatcatccgcgcgcatgacgtcgccgaaaccgttcaggcgctgcgggtcgccgcggcaatcgagggaaagcaatgaccgacacgatcttcatcaccgggatcgtcatccatgctcgccacggtgtgatggaacacgagaccgaggtcgggcagcgcttcgtcatcgacctcgagctctacaccgatctctcggaatcctcgcgcaccgaccgcctctccgacacggtctcctattccaatgtggtggcgaccgcgacgtcggcattcaagaacaccaattacaagctgctcgagcgcgccgccggtgcggtggccgaggacatcctggcgaccttcccgcgcgtccgggcggtcaaggtcacggtgcacaagccgcacgcgccgatcgccgcgatcttcgacgatgtcggcgtggtgctgacccgctcgcgccacccgctgcctcacggttgacctgatggccgacgtcctgatcgcactcggcggcaatgtcggcgatgtccgcacgacctttcgcaaggcgatcgccaatatctgcggcatgacgcaggccgcactcgtggcgcgctcgtcggattattcgacgccgccctggggcgatcagcagcaggacagcttcatcaatgcctgcatcgagatcgagaccagcctcgatccgcatgcgctgctgttcacgctgcacaagatcgaaaccaaattcggccgcgaccgcaagaccgagcagcgctgggggccgcgcaccctcgacctcgacctgatcgcctatgacgacgtcacactcgacaagccggaactgacgctgccgcacccgcggctgttcgagcgcgccttcgtgctggtgccgctggccgagatcgttcccgaccgcgtcattgccggccgccgcgtcgcggatgcgctggcaaacgtctcgaccgacggtattttccgccttgcggacctcgattaatcgccgatccaccgcaaacaaaagtttggcttggccgcccgcccgtggcaatttccggccaaatcaagtggctccctggcggggccggcgaaggacgatttgggcggatgacgaccacgactgacgatttggctctggcttcggattttccagctgcgacctatgacgactggcgcaagctggtcgacggcgtgctgaagggcgcgccgttcgagaagctggtcggcaagacctatgacggcctgaggatcgatccgatctatcgccgcgccaccaacgccagtccgcttccgggtcgcgccgccgcgaccccctggcagatcctgcaacgggtcgatcatcccgatgccgcgcaagccaatgcgcaggcgctggaagatctcgagaacggcgcgaccggccttgaattcgaattcgccggcggtcccggcacgcgcggcttcggtctggctgatgccagcaagaagacgctggcgcgcgcctgcggcggcgtccatctcgacgccggcatcatgatcgcgctcaatccggtgatcgggcgcgagaacgccggcgagacgtttgccgacatgatcgaggcccgcaagctcgacccggccaagctcgatctgcatttcaactatcaggcgctcagcaccatggccgtgcgcggcgccgcggccatcgcctggcccaattacgagaagtcgttcgggcaggtggtcaacggcctgatcaagcgcggcttcaaggggccgttcgtgctggccgacggccggccggtgcatgatgccggcggctccgaggtgcaggaactcgccttcacgctggcgctggcgctggcctatctgcgcatgctggaggcctcagggctcgatctcgacgcggcacgtgcagcgatctcgttccggctcagcgccgatgccgaccagttcctgaccatggcaaaattccgcgcgctacggctcttgtcggcaagggtcgaacaggcctgcggcctcgcgccgaagccgatcttcgtcaacgcgcagaccgcctggcgaatgctgacccagcgcgaccccaacgtgaacatgctgcgcgcgacgatcgcaacgtttgcggccggacttggcggcgctaacgcgatcaccgtgctgccgcacacgctggcgctgggcttgcccgacgatttcgcccggcgcgtggcgcgcaacacgcagctcgtgctgctcgatgagtccaacctcgccaaggtctcagatcccgcggccggcgccggcggcatcgaaacgttgacttcgcagctctgcgaggcggcgtggacgctgttccaggagatcgagaaggctggtggcatcttcccggcgctcgagcagggcctgctgcagacgaaagtcgcggcgacgcgggcgcagcgcgagaccaacgtggcgaagcgccgcgacgtgctgaccggcgccagtgaattcccgaacttgcacgaggaaatcctcgcggtgcttgacgtcaagccgtcggcaccgagatcgacggccgatgccaagatcaggttcgacgccctcgcaccgatgcggctcgccgagccgttcgaggcgctgcgcgacaagtcggatgccgcgctgaaggcacgcggcgcgcggccgaagattttcctcgccaatctcggcacgccggcggatttcaccgcccgcgcgacctttgcgaagagcttcttcgagaccggcgggatcgaggccatcgacagcgagggctttgccgacgcggcggcgctggccgcggcgttcaaggcctcgggcgccgcgatggcgtgcatttgttcctccgacaaggtctatgccgccagcgccgctgaggccgccaaggcccttcacggcgccggcgcaaggcatatctatctggctggacggcccggcgaccaggaagcggcgctgcgggcggccggcatcggtgagttcgtcttcgccggcggtgatgcgctagcgacattgcgcgacgcctatcggcggatggagcagtcatgacggcagaggcaccagcaaaacccgttctgaccggcggctgccagtgcggcgccgtgcgcttcgcggtgtccgcggcgccgaaccgcgtcagcatctgtcactgccggatgtgccagaaggcgtccggcgcgccgttcgcctcctttgccgacatcaacaaggaggatttcgcctggacccgcggcaagccggcggcgttcaagtcctcctcgatcgccgagcgcgacttctgcgccgcctgcggcacgccgctcagcttccgccggatcgacggcccgcgcatcgagatcatgaccggcgcgttcgaccggcccgaccgggtgatcccgacgcagcaattcggaaccgagtcccgccacggctgggtggtcggcatcgccaatctgccgagccagaccacgatgcaaaattacggaccggagcagatggcgaccatcgtcagccaccagcatccggatcatgattgacaatgtagcgctgccttatcaccggctccaatcatgctaggattggcccatgttgcaaattctcctcgaatttcttcttcagatattcggcgaggcattgatgcaccttcttgtcggcgtctgccaccgcaatgccgccgagaagaatctacagcgactgatcgaacgcaatcgcaagcttgaggaagccaaggaatgacccgcattcccaatttcgccgatgtcgccttccagcccgtcgccgcggcgatgccggctgcgagcgccgagccgtggctcacgcccgagggcattccggtgaagtccgtctacggcgaggccgatcttgcaggcatcgacttcctcgagacctggccggggatcgcgccctatctgcgcgggccctacccgacgatgtatgtcaaccagccctggaccatcaggcaatatgccggattctccacggctgaggattccaacgcgttctatcgccgcaaccttgcggccggacagaagggcctgtcggtcgccttcgacctcgccacccatcgcggctatgactcggatcatccgcgcgtctccggcgacgtcggcatggccggcgtcgcgatcgattccatctacgacatgcgcacgctgttcgccggcatcccgctggaccagatgagcgtgtcgatgaccatgaacggcgcggtgctgccgatcctcgcgctgttcgtcgccgccgccgaggaacagggcgtaccgccggagaaactgtcgggcaccattcagaacgacattctgaaagagttcatggtgcgcaacacctacatctatccgccggcaccatcgatgcggatcatctccgacatcttcgcctatacctcgcagcggatgccgaaatacaattcgatttcgatctccggctaccacatgcaggaggccggcgcgacgcaggacctcgagctcgcctatacgctagccgacggcgtcgaatatctgcgcgcgggcctggccgccggcctcgacgtcgatcgttttgcgccccgcctttccttcttctgggcgatcggcatgaacttcttcatggaagtcgccaagatgcgcgcggcgcggctgctgtgggccaagctgctcaagcaattcaacccgaaggacccacgctcgctcagcctgcgcacgcattgccagacctcgggctggtcgctgaccgcgcaggacgtgttcaacaacgtgatgcgcaccacgatcgaggcgatggcggcaacccaaggccacacccagtcgctgcataccaacgcgctcgacgaggcgctggcgctgccgaccgacttctccgcgcgcatcgcccgcaatacgcagctgtttctgcagcaggagagcggcaccaaccgcatcatcgatccctggggcggctcctattatgtcgagcggctgacccgtgacctcgccgccaaggcctggggccacatacaggaggtcgaggaactcggcggcatggccaaggcgatcgaggcaggcgtgcccaagctgcgcatcgaggaggcgtccgccaagacccaggcgcggatcgatgccggtcgccaggcggtgatcggcgtcaacaagtacaagccgaagaacgagaagccgatcgacgtgctcaaggtggagaactccaccgtgcggcgcttgcagatcgacaagctcggccgcttgaagaaggaacgaaaccagaaggacgtcgacgcggcgctggccgcgctgacccgctcggccgatgaaggcaatggcaatctgctggcgctggcgatcgacgccgcgcgcgccaaggccaccgtcggcgagatttcggacgcgatggaaaaggtgttcggccgccaccgcgccgaaatcaagtccatcaccggtgtctacaagcgagaggcagcgaccatgtccaacaaggtcgaaaaagtgcaggccctgatcgatgcgttcgaggaggccgagggccgccgcccgcgcatcctggtggcaaaaatcggccaggacggccatgaccgcggccagaaggtgatcgcgtcggccttcgccgacgtcggcttcgacgtcgatatcggaccgctgttcgcaaccgcggacgaagccgcgcggcaggcggtcgagaacgatgtccacatcctcggcgtctcctcgctcgccgcggcccatctcaccgcggtgccggaactgaaggccgcactgaagaagcacggccgcgaggacatcatgatcatcatcggcggcgtggtgccgccgcaggattacgacgcgctgtatgccgcgggcgccgaggcgatcttcccccccggcaccgtgatctccgaggccgccgaggagctgatccacaagctcaacacccggctcggccatagcgaggcggcggagtaacgctgccgcgcctgccctctcccacctggagttttccatgcgcgccgctcgcttgatgacgcctgtccgcatcattggtcttgccggcctgctggcttgcctctgccttacggcgcgtgccgccgatccgaagcccgacgccacgatcaagaatccgagcatcgaggccagcgtctatctcgacgacaagatcaaggccgatggcgcgctggcggccgattgcctcgccgagggcaggaagtggatcgacaagaacgccgcggaggcggcgaccgatcgcaagcaggagcccgagctgttcaaggagcgcggcggctattcattcgagcgcaaatattcggtgcgctcggtcgtcgacggccgctatgtcagcgtgctgcgcgacgactacgtgaacacgctgggcgcgcatccgaactccgacgtcaacaccatcctgtgggatacaacggagaagaagcgcatcagcatccgtcccttcttcaccgagaccgcggacaacggcccgaccctgacggcgatgcgcaaggccatcgtcgctgcgctgaacgccgagaaaaagcggcgcggcaccggcgagaccgcaaccgccgaatggtacaaggagctgaagccgaccctgctcaagatcggcgccgtcacgctggcgccgtcgactgaagccggcaagagctccggcctcacctttcactacccaccctatgccgtcggtccctatgccgagggccagtacgtgatcttcgtgccgtgggaggcgctgaagccttatcttacaccggaaggcacaaggatttttacaggcgcccggccgaagggcgatgcggacgaaccgcagtaacgggtttcaacgcgcttcggcctgatggcgcgccagcgccctcaccaatgaattggtccaatccggaatccagtcctggaactgaacctgccagcgatccgcgtcaccaggcgcggtgtcgagcttgaccgaccattcgatgaaggtgcggttgccctcaacgaccggcagcagatgcatcgtgccctcgtagtgggtcggctgcggcgcgtccgaactaacctccgccaaaaatggcagcggctcgatgctggcataggttagcgaatgctgcgtgtccgagtgaccggcaaggcgttgcctgacccagagcccgagataacagaagcgcctgaccgcgccgacctcgtcgccgcgtttgtcgtcctcgatcacgctttcgctgacgccctcgatataggcgggataattgttgaagtcgcggatcaacgaccacacggtatcgagcggatgatcaaggacggcgctgtagtaggcttggctcatggcaggctccggaaggaaaatctggtccgcgatggtggcggaacatgccccggatatcgcgcaacgcgccgggaccgcccacccgatttccgatcgcgcaatcggtacgggatgaccgggacacggccctcgcctgcaaccgccggccgttgtaaaccaaggcccatgatcgcctcgaagcccgcctctcccgacatcgccgccctcgccaaggacctccgcgccggccaccgcgccgcgctggcgcgggcgatcacgctggtggagagccggcgcggcgatcaccaggcctccgcgcgcgagctggtgcaggcgctgctgcccgacaccggcaaggcggtgcgggtcggcatcaccggctcgcccggggttggcaagtccaccaccatcgatgcgctcggcatgttcctgatcgagcgcggccacaaggttgcggtgctggcggtcgatccctcctcggcgcgcaccggcggctcgatcctcggcgacaagacccggatggcgcggcttgccgtctccgatcaggcttttatccggccctcgccgtcctcgggtacgctcggcggcgtcgcggcgaagacccgcgaggcgatgctgctctgcgaggccgccggcttcgacgtcgtgctggtcgagaccgtcggcatcggccagtccgagaccgctgtctgcgacatgaccgacttctttttggcgctgatgctgccgggagccggcgacgagttgcagggcatcaagaagggcctcgtcgagctcgccgacatgatcgcgatcaacaaggccgatggcgacaacctcaagcgcgccaacctcgccgccgccgactatcgcagcgcgctgcatatcctcgcgccgcgctccgagcactggcatccgccggtcgagacctattccgcgctgaccggcgccgggctcgacaggctctggcagaagatcctcgatcaccgcaccgcgatgaacgcctcgggcgagttcgcggcccgccgcagggagcagcaggtgaaatggatgtggtcgatgctggagagccggatgatggcgcggctacgctcggacgccgcgatccgcgccaaggtgaagaagatggaggccgaggtcgccgccggccgcatctcgcccgcggtcgccgccgaacagatcgcggagatgctgcattgagcggcaagccgcgcatcctgctcacgggcttcggcccgttcccgggcgcgccattcaatccgaccatgccgctggtgaagcggctgaccgccctgcgccgccccgccttcgacgacattgcgctgaccagccatatcttcgatgtcacctacgcggccgtcgatcgagaattgccggagctgatcgcaacgcgtcgcccgcaggcgctgttgatgttcggcctcgccggccgcaccgcgcatctacggatcgaaagccgcgcccgcaacgcggtgaccacacgctttcccgatgccggccgccagcatgcacgcacgggatcgatcgctggcggcgccgacgcgatgatgttcgggccgcacagcgaaagactgctgcgcgcggcgctggccacaggcatcgatgcgcggctgtcgcgcgatgccggcagctatctctgcaactatctgagctggcgcgcgatcgaggccgtgaacggcagcaacgacctccgcctcgcgcaattcatccacgttccgccgctggcccatgatggcacggcggcgaccggaaggtcatccatcacgctggagcagctggtcgatgccggcgaggccatgctgctggagctggtgaaactgacccggcaggccacgcgcgtgagcgatgcggatcggactgctcgcgcgtatcaggcagcgctgtagccgccgtcgatcacatgcgatgcgccggtcatgaaagaggccttgtccgagcacatccagacgaccgcttcggcgatttcctcgggcacgcccaggcgacgcacggggaccttggcgatgatctcgtcgtagcgttcgtccatcgtctccctggtcatgggcgttttgatgtatccgggattgacgcagttcacgcgaataccgtcctgggcgtactcgatcgccgcagacttggtcagcccgacgacgccgtgcttggtcgcgacatagtgggccgaggtggcgaggccgaccagcccggcgatcgaggccgtgttgacgatcgcgccgccgtcaccctgcttcagcatctgcgcgatctcgtatttcaggcacaggaacacgcccatcagattcaccgaaaacatcttcgccaccgagggctgcgtgagctcatggatgcgctggccgggcgggccgaccgagcgcccggcaacgccggcattgttgaacgcgcagtcgatgcgcccgaacgccgacaccgtgcgcgccaccatgttcgcgacatcggcctcgtcggtcacgtcgccctggatcgcgatcgactggccgccggcggcgttgatcagcgcgaccgtctcgtcgatgccctccttagagagatcggacaccgccacgcgcgcgccttcgcgcgccatcgcaatcgccgttgcccggccgatgccagacccaccacccgtgaccaacgcggccttgccgtccagcatgcctgtcatcaaaagctcctctagcgctttccctcgattgcgatctcgacgaggtacggccgccgggtcgcgacagccttggcaactgcggcggcgatctcgtcggccttctcgaccctgacggcctcgacgcccatcccggcggcaagatgcacgaagtcgagcgccggaccggtgatatccatgttctgatagggatgctgggtgctggcttcgaaattctgacgccagacgtccacattgtgcttgagaatgcggtactcgcggttcgcgagcaccacgaacacgatcgcaagcttgtggtgcgcggccgtccacagtgcctggatcgcgtacatcgccgagccgtcgccggagatggcgacaaccggacggtccggcatcgcgaccttgacgccgatcgcgccggcgaggccctgcccgatgccgacgccgcggccgccgaaataatcgccgaagccgcgatagtcgaaggcccgcgcgagatcgagactggccgtgatgctttcatcgacgatcacgacatcatccggaagtccgcgacggagttccgcggtgacgcgcggcatcgagctcggctcgcggtcccagcctttctcgacgcgggcgcgataggcgtctttctctttccgctgcaattcggccagcatggcattgcggccttgcgcggcatccctgaacgccgcgccagcctttgcgcgcaacgcgtccgtcaacgcgccgaggctgacggcgatgtcaccgacgatgccggcatcgagccggttgttgagcgcgagccgctcggccgacgcctcgatctgcagcaaggccgcgccgtcgggaatgtggccgcccggcgcaaaccagatgtcctcgaagaacggaccgccgatcagcagcacgagatcggtatcgccgagcgccttccgcacctggcgggcatcgcccgggaccgactgacggtagctcggatggctggtcgggaacggcgcgtgatggcgcagcccttcgaaccagacagtggcgccgatcgcctccgccagcgccaccaacgcctcttcgccgccggatcgcgccacgtcgtccccggcgacgatggccggatttttcgacttcagcagcagcgcgaccagcgcatcgatgcctgccggatcaggacgcgtcgatcgccatagattgtccggcgtcgaggcgtcgaccacggtttcctgttccaggacgtcgatcggcagcgacacgaataccggcccctgcggcgcgtcggtcgcgaccttgaacgcgcgccgcatgatcggtgcgatctcgtcggcgcgctcgatctgcacgctccacttggtcaccggtgccgccattgccacgagatcgtggccgagcagcgggttcttgagccgcatccgcgtgtcctgctggcccgctgtcaccaccacgggcgaacctgccttcaacgcgccgtagagcgagccgatgccgttgccaaggccgggagcgacgtgcaaattggcaacggtgacgcgcctcgccgcctgcgcgtagaaactggcggcgctgacggcgacgccttcatgcagcgccatgatgtattcgagttgcggaaatgccggcaggctgtcgagcagcggtgtttccgtggtgccgggattgccgaagatatgacgcacgccatgcgacacgaacgattccatcagtacacgacgcccgcgcattcgtttcctctcgatcggctctgacttgttttgcggatcatcggccggggagcggcccgtggcaaccgcgcgagacagttcgtgtccgcgcggcacgctgcgtcttctgcatggctttggacgaggcgacgcgacgcttcggacatgtcgcgaggatacggaactgttccccatccccaatcgcgatcgccgtttgacaatttgagccggctgcaccgggagttaaccctaccgccaacaatcgccttgctgcgtcggcgtgttcaccatgccgcgccgcgtttcgcggtacgtatcgggcgcgaacgtcaccgctcgcgaatgttgcgagggccatgcccatggacgtcaaccgccgtcatctgatcggagcatccgccgccggcgtcgccggcgcgcttgcgttgtcgccggacgctgcgcctgccgcgcaatccacaggctcgctcggccgcgacgtcacgcactacggcgttcgccccggcagccccgaggaccagacccgcaacctgcagcgcgcgatcgatgacgccgcgcgcgcgcaggtgccgctcgcgttcccgcccggggtctaccgcaccgggctgttgcgactggcgcccggcagccagttgatcggcgtgcgcggcgccagccggctggtgttcaacggcggtgcctcgctgctggaggccgaaggcgccggcggcatcgtcctgatgggcctgtccttcgacggcggcaacgtcccgctgccgacgcggcgcggcctcgtgcattgcctggccggccgcgacatccgcatcactgattgccagttcatggccagcggcggcagcggcatctggttcgagcagatgtcgggcgacgtcagcaacaatgtcttcaccggcatcgcgtcgactgcactggtgtcgttcgacgcgctcggcctgatggtcgcgcgcaacaccatcaagggcaccaacgacaacggcatcgagatcctgcgcagcgcgatcggcgacgacggctcgatcgtcgccgacaaccgcatcgaggacatcaaggccggccccggcggctccggacagtacggcaatgccatcaacgccttccgcgccggcaatgtgatcgtgcgcggcaaccgcatcagcaattgcgacttctcggcggtgcgcggcaattcggcctccaacatccacatcacggacaacagcgtcagcaatgtgcgcgaggtcgcgctctattcggagttctcgttcgaggccgctgtcatcgccaacaacacggtcgacggcgccgcgatcggcgtctccgtatgcaatttcaacgagggcgggcgcatcgcggtggtccagggcaacatcatccgcaatttgttgccgaagcgccctgtcggcaccgacccgaacgacggcgccggcatcggcatctatgtcgaggcggacagcaccgtcaccggcaatgtgatcgagaacgcgccgactttcggcatcgtcgccggctggggcaagtacctgcgcgacgtcgcgatatcgggcaatgtcgtgcgcaaggctttcgtcgggatcggcgtctcggtggtgccgggcgcaggctccgcgctgatcaacaacaacatgatctcggaaaccccgggcggcgcagtggtcgggctcgaccatgcccgccccgttacctcagacctgtcggctggcggcgcccagcaatatgcgcagctcgtggtcggcgccaacgcggtgcggcgctagagcatgatccggaaaaacgcgaagcggttttcccgcgcgacaaacgcggaacgcgtttgcgcggagatcatgccaaatacctacagcgcgttgcgcagcagcgggtagcgtcgctggatggtgtcgagatcaagcaccggcggcggcatcaccggagggggcatctccagcgacggcgcgtcggcgacaacgggcggctgctcgagcacctcggcggcggtttccagcgcggccgcgactgcggtcatcgcggcctgcgccaaggtcgcggcttccgcgcggcgctgaggcatcggcgagagatcgggcggcggcagcttcgacttgccacggccgagccaggacaggtcgattggcgaattgtcgagcgaggcttcgcgggtcagcaattcccgccagatatcgaccgcggcccgggcttccctgatgttctcgaggaaggcctgctcgctgtgatagcggcgccaacgtccggtctcgaaaagttcggtaaggtgttccagcctttgctcggcgaggttgcaccagcgtgcaacgatctcctggcctctggccacgtcggtccgatgtgtcattgaacttgcccgcagggaaagaaacggacgcagacgcaaccgaaccgaatcaactggacgtgacgctgatattctgtggaaaaggtaaataaagtctaactaaattcttaatcggcgacgggcgatgggagaagtccgctctactacggagtttcttgctcgaaccgtcgtcaagtcatcgacttgcatgacggcgatgcgcatcgctggcggacgcggcgcagccaaatcatccacagcaaacgatcgcagctgtcgcgatcgcgcagtgccgggaccacgctcggccggtcggtcgtgcaaggtaccccacaaatgaaagacccgtccggggggacaaccggacgggtcaaagccatatgggcgcttggggtggatgggcgctcgcgcctgatatagccggggagggataaaccgctcccacacacataagtcgtgagagcaaggcggacgttcaaatcgccggcgatttttttaaccttttcgccgcccggttccatcgcaccgctgcaggcgtccggcgacgaaaatcaccgtgcggcgccgcgatttgcagcggaaaactccgatgcgatcgagggcgcggcttcattcaacgcgcggctcacggaagtgttattgccgtccggcgtcggcgcgggctgcggcagtttgtccgtggccgctgcaaccggagcattggccgcggccatcaccgcggcgagcgcgtcggcctccccggccccgaacagatcgtcgcgtccaggcgccccgagatcgcgggccgtgccggtcaggatccgtcgcacctcggcgggcttcaatgccggaccacgctccagcaccagcgccgcgatgccgctgacgaacgcggccgaaaaggaagtgcccgacatcagctgatatttgccgtccggcaccggcacgaggatgtccgcgcccggcgccgccagcgcgatatggctgccgcggttcgacgccgccatcagtcggtcgccggcatcgataccgctcaccgcgatcacgtcgggataagcggccggatacagcggcggcgatgtcgggccggcattgccggccgcggcgaccagcatgacgtccttcgccgcagcggcggccaccgcgcgcccgacaagtgcgtctttcggcccggcaaagctcatgttcacgatctgcgcgccatgcgccaccgcgtagtcgaggctcctgaggatcacataggaggtgctctcggcgccgccgccaaccacgccaaaggcgcggatcgccaggatccgcacttccggcgcgcttcccgtcagcctgacccgcgcggcaattgcgccggcgatggcggtgccgtgggcatgtgggccatccttgctgccgagcgcatcaaatgtatccgcgacggtgttggccaattccggatgggctgcgtcgatgccggagtcgatgacggcaatagtcacattcatcccgcgcgccagcctgtgcgcctcgggcagatgcagcttcgcctgcgcatattgcgccggatcattgccgcctgatgccgcgcgctggtcctgcagcgcgtaccggtagttcggctgcaccgagcggacgctgccatcgtttgcgaattcgcggctcacggcatcggccgagcgattgccggcgatgcggaacaggccgatggtcgcccccagcagcgggatgttctgcgaggcgatccgtctcaggccgtggcggcgcgccagcgcgtcggcttgggcctcggtcaggatgccgtcgatttccgccacgagttcgttcggcacggttcgcgtgcccgccacgtcctgtgcgcggatgccgccaccgccggccctgcccttcctcgcggcgcccttgccgctgccgttgctggcaaccggccggtcggcgcattggccgcggtcagcattgtcgcagccggaggagaggcggggtgcgtagcgtgcatcgggcggtcgcattcccgatcgtgggccctcgtcggtccaggacgcaggcgggccacggtccgccgagagcggcggcccgccggcggcgctgccaccgggcctgccgatgcccggattgatccgcggcccagccgagaccccgccgccgatcggtgatcgcatgaaactttgggcgtaggccgaaccggcaacacagaccagcagcaacgccgcggccgcgacggtcgctcggttcgttgatcgggtccggccgttggcggtcatgatgacctcaaatcggcgcagatcgtcagccgcctgttttacggcgtctccaccgcgaggctgacgatcttctctctctgcaaacgggcgatcagcgccgcgacgccgtccttgtccatcgcgcggaactgcaatcggaacatgccggccttaccgtcgacgatcgaggcctggtaattgtcgagcagcgacgtgatgtcggagattcgggcatccggcgtgaagcgcaccaacagccgcgtcggcgcggccgatatgctggcaccaaggtcgcgagtgatcggcgcactgggtgccgggctggatggtgcaatggccgcactcggcgcgctgcgttgttcggcgacatcgagcgacgcggtctggaacgaggcgggcgggctgcgcatcagcaccgcgccgatcacgcccgcctgcaacagcaccacgagcgcgccgaggctggacgaccaggcgagcgtccgcggcgacaatttggaaaagaactccgagatcgaggccgacatgcgtgcacctgcggacggcttgcgctccggctcggcatcgatcgcggcaaacagcttctgcatggcgcgcgccgagggcgcaccgaggctctcattgaggccgatggtctcggcatattcgtcgcggatgacggcatattgccgggccagttccggatcggaagcgagtgcatcctcgacgcggcgcgcgtcgcgcgcgttgagcgtgccggccgcataccagggcagcagcatctcgacatcgtcaggttcttgaccctgcactttcttgttgctcgcagccatcatggccaacctcgctcgacaccggctgccttcagcaactcggcaagtttcttgcgtgcatagaacaggcgcgtcttcacggtgttctccggaatcccgacgatctcagcgacgtcttccacggatttctcgtgatagtagacaaggtcgacgatctcccggtgttccgctgatagtcccgtcaggcacttacgcagcgtcgcgccggtgtccttcttctgcactaccgtttccggatcgtcggacgtatcctcgatcgcgttcgcggcctcatcgtccagttcggcgtctttccttcgccgtagcgaagacaacgccttgaaccgggtaatcgccagaagccaggttgaaacggcggatcgtccctcaaacttgcccgcctgacgccacacgtccagaaagacctcgctgatgaggtcctccgccacctgttcgtcccgcacgagccgaagcccgaagcggtacaccctgacatgatgccgtccgtacagcacctgcatggcgagccggtcgccttgagcgatccgagcgatcagaacctcgtctgaagccgcctgtgtcgcgctcaatggccgtctcgcaaagttggtctgaggggggtggtgcgtggttcgacgcgagagccaagattcttcacattacggcaatgtgcggaccgcatgtgtgacctatgacacagtcggcgatcccaaggaggaaaaatcgccggaggctcgacaaacggtatcataatagcgaaaactctcgcggactcgcgccatgctgcgcgaccataccaaggctttgccggcacgccagcgccgttgcgcagccggcgtcggcgcaagcccccgacgcgctcgctcccgcccccgatcggcgagcggatttcccttacgaaacaagggtgatgaccgggttccatcggagcagattcggtttcaaaagataccaaacctaaaggctttcccacgtagattttcgccggatttcaccaatggcgagaccatgggcagcgctgcgtcttcacttcccagccagaccgcgggcgcatcggaaagcggccgtcccaggttgacggtcgagcgcctggcgcgccgagcgaggcagcgccgccagatccaatcaatgatcggcgcctgcttcgtgctcgatgccgtcgtcctgatgatctacgcgcatgccggcaccacgtcgatcctggtggcggcgagctatgccctgaccggcctctccctcgtcgcggtctatgtcctgctctcggagcgcggctttcacgagcgcttccgcgaccactatctggtcgcgccgcaatcggccgtcaacatggtgaacctgctggtgttcacctacatcgcgccggaagtcggcgtgctgttcctctgcaacctgttcgtggtgttcagcttcggtgcgctgcgtacctcggcgcggcaaaccgctgtcgtctggaccatcatggtgctgggcctcgccgcgctgttcctcggaaccgacaaggagatcgggatgccgaccggctcccggatcgaccgtctcgccaccatgctggtattcgcgctgacgatcgggcgctgcatgtatctcggcatcttgtcgagctcgatgcagcagtcactgtaccagggcggaaagaagctgaaggaggcctatcggcgcatcgaggagctcgccgagctcgacgagctgaccggcacctccaatcgccgcagcatcatgcgcaccctcgaggacgagatcgcgcgctgcgcccgcaacggcagttcctgcgccgtggcgttgatcgacctcgaccatttcaagcgcatcaacgacatctacggtcatccgatcggcgacgaggcgctgcgcaccttcgccatcggcatgttcgccaatctccgcagcatcgaccgcttcggccgctatggcggcgaggaattcctgctggtgctgcccgacctgtcgcaggatcaggcgatgcgcgcgctcgagcggctgcgcgcgatcatcgccgatctcgactggagcgcattttcgccgggcatgcgggtgacgatctccgcaggcgtcacgacgctcaagccgcacgaaaactccgacacattgctcgcccgcgccgatggcgcgctttacgcggccaaggcgagaggacgcaaccgcatcgccagcgcctgacaccctttcattttcatattcggcgccggagaatccgtcgccaccgctccaggacagagtcatgagtttgaagcccgagaccgcacccgaaagcctgctcgacgagttgcagacgacgctcgcgcacggcaccgtcgcacgccgtgtcgagacgctgcgccgggtgaccgacctcttcatcaacggctcggtgaactattcgaacgagcagatcgtgctgttcgacgacgtgttccaatgcctgctcgaacacatcgaaaactcggccaaggcgctgctcgccaaccgcctcgccccgatcgacaccgcgcccccgcagaccatccgcaccctggcattcgacgacctgatcgaggtcgcaggccccgtgctgacgctgtcgccgcggctcgacgacgacaccctgatcgagacggcgcgcagcaagagtcaggcgcacctgctcgcgatttcgaaccggaagacgctgagcggcgccgtcaccgacgtgcttgtgttgcgcggcaacgacgaggtgatccagagcgcggtcaacaatcccggcgcggagttcaccgagcgcggtttcacccgtctggtcagccgcgccgagggcgacgacaatctgtcgacctgcgtcggcctgcgcccgaacatcccgcgacatctctatctcaagctggtcgccaaggcctcggacgccgtcaggcagcggctcgaggccgccaatccgcagcaggccaaggagattccgatcgcggtgaaggaagcgacgcggcgcgcgcgctcggcgcccgccggcgtcacgccggacaccacgatcgcacatgcgctggtcaagtcgctctaccaggacggccggctcgacgagttccagcttgcggccttcgccgaggccggcaagttcgacgagaccaatgcctcgcttgccgcgctcgccaatgtctcggtcagcgtcgccgagaacatgatgatcgaaacccgcgccgagggcgtgatgatcctggccaaggtgtcgggcctgtcatggtcgacggtgcgatcgatcatcaatctgcgcgacgacatctcgggcggcgagccgaccgacttgcaggcctgcaaggatacctatgagcggctgcggccatcgaccgcgcagcaggtgctgcgcttccatcgcatgcagcaatccgcgcccgcggcctgatccgggctccaatcggtcaatacctgagcgcccgctttcccatcagcgcgccgacgctcgcgacgatcgcggtcgccaacgtgtaccaggtggcgacgaacagcggcgagtcatccgtgcaatgcgacgcatagacggttgccgcgagccctgccgagagcaagccggccaccgcgccggcgaccgccggccgcgccggcgcaccttgtctgagcccgtacagcgcgccgatcagcaacggcaacgacatcgcggggatcgcggtcatgcacgccatcgaattcttgccgatcaggcgcgtcatcatcggcgtgcgctgcggcatcatcatctcgccgctgatcgcggcaacgaggatgccggcgggaatcagcagccaccagccgaagctgcgcagcgaggcttccggccgcgacagatgcaggctgaccgcgatcgccgaggcggcgagcgccagcgtcaccgcgaacttcaggtcgaagaacggattatgcattgcggtcatcacgtcgggccgcacgccgagttcggcgaagaagatcaagagcgagaccggcgccgccgccagcagcgccagcatcagcgcaagaccgatcgggcgcgcgcgataggcattgtcggcggcaagggttcgaatgagttgatcggtatccatgctcaacgatcccgtaatttctcggtgaggctcgcaagtccacgatgcagcgcgacccgcaccgcaccttcggtcatcgagaatttcgccgcggtgtccttgatcgaggcgctgtcgaccgcgatcgattgcagcacgtcgcgctgacgcgcgggcaaggcctgcaactgggcggtgacctcaccgggcgatgccgtcggctccggcgtttcccccggcagcgtctcggcgaagtcatcgatattgacgaagatgcgcttgccgcgacggcgcagcgcgtcgatcagcttgttgcgcgcgatcgcgaacagccacggcgcgaacggcgcgctggtgtcccaagtctgtcgcttcaaatgcaccgccaacaagatgtcctgcacgatgtcctcggactgatcgaccggttgtcccgcgcgcgccaggccacgtcgcgctgcggcgcggaggaccggcgtgatggccttgagcagccgatgatatgctgcgtcatcgccagaaatggccaaccgcatcaggtcggtccattcatcctcacgttcgcgcacgcaggctcctgaatagcaattcggccgatctttcagttcgttacgcgaccaaccgaggacatcacgaacacgtgatcgcgatctccggctaggccgcgccgggagatcggccccagaatcattccggcgggtttcccagacgccacggctcataacaccgatcggtccgacaagcatcggggagctgccaccgatcacccgccgggacggaaattgcccagcttttgccccttgaggcccgaagattccctttttttgccccggtgtggacacgcagcagggtctcatttcggctttggaacgggcgaaatggggagatcatcagaatgaagatcaaagccagccggcacttggccttgatggttgcgacggggctgaccgggttcgctatctgtcttgccattccattgccggcgcatgcggccggttcggacgcatccgcagcgaaatccgacaacgcaacgaccgacaagtccgcacagcagagttcgcggcatgtccggcgccacgcgcgtcacagctcctccaaatccgctgacaggccggccgacaaatccgagagcaagaaggccgccggcaaggatgccggcagcgtgacgtcggtcggcatgccggccacggtcgccaatgccaatgcggagctgacctccggcgacggcaatgcgagccccccgcccgccagcgtcaatccggtgatggccgcctccgacaagcccgccgacgcgcagcccgacggcagcgtggtcgcatcggaccagctcaacgacctcgaccgggccctgcagcaggagcagccgcaaccggctcagccgcagaccgcccagcaggaggcgcccgcgtcgtcgccgcccgccgccgtcgcagcgcccaagccggccccggtcctcgcgagcagcgacagcgcgagcctggaccagacctcgctgatcgggaagatcttcatcgggttcggcgccctgctcacggtggcttccgccgcgcgcatgttcatggcctagcggctgcggcgcagggtagcgccgcaccgcggcccgaagcctcgtttcagccacttgaagcgcatcccgccagcgggcacattgcccgccaaatcaggcacggggtttgcgtcatggctacgttcgaattcatcatcgtcgaaagcaagggaccggtcggcgtcatcacgctgaaccggccgaaaatgctgaatgcgctctcgttcggcgtgttccgcgagatcgccgcggcggtcgacgatctcgaggccgacgacaagatcggctgcatcctgatcaccggcagcgagaaggccttcgcggccggcgccgacatcaaggagatgcagccgaagggcttcatcgacatgttcaacagcgacttcaccgcgatcggcggcgaccgcgtcgcgcgttgccgcaagccgaccattgcagcggtcgcgggttacgcgctcggcggcggctgtgagctcgcgatgatgtgcgacatcatcctcgccgccgacaatgccaagttcggccagccggaaatcaccctcggcaccattcccggcatcggcggcacgcagcgcctgacccgtgcgatcggcaagtcgaaggcgatggacctctgcctcaccggacggatgatggacgcagcggaagccgagcgctcgggcctggtgtcgcggatcataccggccgacaagctgatggaagaggcgctcgccgcggccgagaagatcgcctcgatgtcgcgtccggccgcagcgatggccaaggaagccgtcaaccgcgccttcgagacgccgctgtcggaaggcatgaatgtcgagcgcaacctgttccactcgaccttcgcgctcgaggatcgctccgagggcatggcggccttcatcgagaagcgcaagccggtcaacaagaatcgctaactccttcggctcctctgcaatgccgcggtgacgagcgcgcgataggcgcgctcggcgacgtgcgtcggcttgtcgaggccgagccgcgccaggcattcgcggtcggcggcatcgggcggatgccgcatcccctgccacagcaggccggcgagttgcagcggcgttcgctgcgcccgctgcaggatctgcagcgccgggatcagccgctgctcgacgtcggtgaaatcgctgccgaacgggaatgacggcagcagcccggcgtcgcgcgcgggcttcagcgcagcgctgatgcgttcgggataattctcgcggtgagcggccgcgatctcgtggctgcgcggcaacttgccggcatccttggcctgccgcatcaactcgccttggaaccgggaatccgacacccgcagcatcgcggcgatcacgtcggcatcggatttccctctgacgtcggcgacgccatattcggtgacgaagatatcgcgcaggtggcgcggaatggtctcgtggccataagaccagcgaatgttggactgcgtttgcctgccggactgacgggttgcctccagcgccagcaccgagcgcgcgccctcgagcgcgaatgcctgcgccacgaaattgtactggccgccgacgccgcttacgacctggccgttgtcgagcccgtcggagatcgcagcgcccagcagcgtcgccatcatcgcgttgttgacgaatcgggcatcgacgcgggcgcggcgcttgcccgcctcgtcgccgaagatctcgttggtgaaggacaccggcatcatctgaatgcgcgccagttgctcgggtgtcatctcgcgcagcgcgcgatagaaggattgcgggcccaggaagaatgcgccgtgcaggatcacaccatcgacgtcgcgcttcaggatgccggagtcgatcaatccgaggaacgcctcgaacagcatctcgctgacgccatagaggcccttctcgaatggcccggtctcggcagctgcgagctgtgcggtaccgggcgcaagacgctgcatgacgctgtggaattgaacgttgtcgcggtggcggatcacgagcccctgcgccagcgcatcaccgacctgcccgatcccgatctgcagcgtgccgccgtcgcggaccagaccggcggcatacaatccgatcgcatatttggtgtcgctgatcggctcggacggcggcgcgaacagcgggaaatcggtgtcgggactgtcgagcacggcggcgaattcatccgccggcagatcgccgggtcccggcatgaacggcagttccgaattgacctggccgaacagcttgaatgacgcccggccctgcgcgcgggcgcgcagcacatcgagcgtcgtatcggtgttgcagctcaaactgtagcgcggcacgccgtcgacgacgcgcttggcgaccagctgtggaacgacattcagcccgcgcgacagcaggtacgatgccgcgtgggtatagttcgcggaaatgtagttctgctgcgcgaagggctgatacagccattgcccggcgaggaagaagaactcgatcaccttgacgttgggcggcagcacaccgcgatgtaaagcatcggcataagcgagctccggataaccgccgaacaggcgatcgatcaccggaccgatgaagcgccgttcgagcaggctgttcggcttcggcttttccagcgtcagcgccgagaacagcgtcaggttgacggaacggtcggcgaccgcccgcgcatacagcgcattgacgatgtggttggccttgccgaggccgagcggcagcccgaccaccagttcggttccgacatcacgaatgatgtgctccgcgatcgcctcggggtcggagaacaagatgggcatcagcaatggacccggtggagacggtggataaccggcgccgctcaatcggcggcgtgcggttcaaacttatacttcatatgacagttgcgttcgcctgtgacgagccggcaacagacaagaatcgaaatgatgtgcagatgtcgtgcggcggtttgcgtgtggcggcactgccccctaaacaggtagatgtgtgggcgccggcgaaggccggctgccggggttttggtttgcgggatcacatggttgagcgtaccgctgatattggcgacgtagcgaggcgcgtattcttgtcgggcatcggccttggcgcattggcatgcgcgctgctggctgataccgctgcccgcgccgagagcctgccggaagcgctggtcaaggcgtatcagaccaatccgcagctcaatgccgagcgggcgcgccagcgtgcgaccgatgagaacgtgccgcaggcactggcaggctatcgcccgcaggttgccgcaagcctttcggcaggcctccaggctgtccgcgaccaattgcccggcaatgtcctgcagaccgcgacgctgaagccctggcagatcggcctgaccgtcacccagaccctgttcaacggcttcaagaccgccaacagcgtccgcgtcgccgagttgcaggtgcagtccggccgcgaggcgctgcgcaatgtcggccagggcgtgctgctcgatgccgtcaccgcttataccaacgtgctcgccaaccagacgctggtcgaggcgcagcgcgccaacgtcgccttcctgaaggagacccacgcgatcacgctgcgtcgcctcaatgccggcgacgtcacgccgaccgataccgcccaggccgaggcgcgcctcaaccgcggccttgccgatctcaacgccgccgaggtcaacttcgcggtcagccaggccacctatgcgcaggtggtcggcaacccgccgtcgcaattgcggcccgccgataccaccgaccggctgctgccgcgcagccgcgaggatgcgatcgggctggcgctgcgcgagcatcccgccgtgaccgccgcaggtttcgacgtcgacgtcgcctcgacctcgatccgcgtcgccgagagcagcctgatgccgaacgtcaccgtgcagggcagcgtcagcaagaaccgcgactccgacacctcgctcagcacgttcgggaccgatcaggcctcggtgatcggccagatcacgcaaccgatctatgacggcggcaccgcagcctcgcagacccggcaggccaaggaagtggcaacgcagagccgcctcgtgctcgatcaggtccgcaatcaggccaagaccgccgtggtcagtgcgtgggtcgccaacgaaggcgccaaggtcgcggtgtcggcctccgagtccgaggtgaaggccgccgaagtcgcgctggccggcgtgcagaaggaagccgccggcggccagcgtaccacggtcgacgtgctcaatgctcagcaggatttgatcacggcgcgagcccggctgatcggcgcgcagcgcgaccgcgtgatcgcctcctacacgctgctcagcgcgatcggccgcctcgacgtcaagacgctcaatctcaagacacccgactacctgcccgaggtgcactaccatcaggtgcgcgatgcctggcacggcctgcggacgccgtcgggacaataggccttgcggcagcggtcgcagcgcggaccggccctttccacccgctctctccgccgataacctccgctcccgcaggcaaccgataatgccggcgcacgtcgtgcgcgcataacagccgagcacgcagggagacgtccaatgctgacgcgacgcgatatgatgctggcttccatcgcagcgtgagtgaccatgaccggcagccaagcatcttccaaggcagcgcaaccatcgaccccggtgaacttcgacgtgcctgccggtgcgtgcgactgccacacccacatccacggcgatcccgagaaattcccgttcttcgccggccgcgtctataccccggaaccggcctcgccggaggagatgagcgcgctgcacaaggcgctgcatgtcgagcgcgtggtgatcgtaaccccgagcgtctacggcccggacaactcctcgaccctgttcggcatgacggcgcgcggcccgacggcgcgcggcgtcgccgtgatcgacgacaagaccagcgagagcgatctcgataccatgcagaaggccggcttccgcggcatccgcctcaacctcgccaccggcggcgtcaacgatcccaatctcgggcggcagcgcttctcggccgcgatcgaacggatgaaggcgcgcggctggcatgtccagctgttcaccagcctcgcgatgatcaccgcgatcaaggacctggtcgcggctgcgccggtgcccgtggtgttcgaccatttcggcggcgccgaggccgcgctcggcaccggtcagccgggatttgacgacctcctggcgctggtaaaatcgggcaaggcctacgtcaagatttccggtgcctaccgcgcctccaggctcgcgcccgactatgccgacgccgcgccgctggcccaggcgctgatcgcggccaacgcggaacgcatcatctggggcaccgactggccgcacccggattcggtgacgccggcgggcaggaaggtcaccgacgtgacgccgctgtatcagatcgatgacggccgcctcctcaaccagcttccggtctgggcgcctgatgccaaggtgcgcaagaccattttggttgacaatccggcgcgactctacggcttcacctgacgttgtccttcggccggcgcgagaagtaggagatcagcaccggcagcgtgatcaggatcaccagcggcgccaccatcatgccggtgacgacgacgatggcgagcggcttctgcacctgcgagccgatgccctccgacaccgccgccggcagcaggccgacgcccgcgaccacgcaggtcatcaggacggggcgaagctgcaactcgccggttcggatcaccgcgcgcatccgatcatagccctcgtcgatcagctggttgaactgcgacaggatgatgatgccgtccatcacggcgatgccgaacagcgcgatgaagccgatcgccgccgagacgctgaacgggatgcccgagatcagcagcccgagcacgccgccgaagatcgccatcggaatcacgctcatcgcgagcatggtgtcgaccatcgagccgaaattgaagaacagcagcacggcgatcagcgcgaggctgatcggcaccacgatcgacagccgcttgatcgcatcctgcagattgccgaactcaccgacccactcgacgcgggaccccggcggcaactggacctgctgctcgaccttctgctgcgcctcgcggatcgcactgccgagatcgcgctcgcgtaccgagaacttgatcggcagataacgctcctgctgctcgcggtagatataggccgcgccggagatcaggttgatcgaggccacttcgctgagcgggatctgcgtgatgccgccattggcgttcgccaccccgatccgcaaattctggatcgcctccgcgctcttgcgatattccggcgcgagccggacgatgatcgggaagtgccggtcgctgccggactcatagaggtcaccggcggcatcgccgccgaccgcgaccttgatggtggcgttgatgtcacccggcgcgaggccatagcgcgcggcacgcacgcgatcgacgtcgatctggatcgtcggctggccgagcgaggtgaataccgcaaggtcggtgacgccctgcacggtcgccagcacggacttgatcttgttggcggtgtcggtcagcgcctgcagatcgttgccgtagagcttgatcgagttctcgcccttcacgccggacaccgcctccgagacgttgtcctgcagatattgcgagaaattgaactcgacgcccggaaatttctcctgcagctgcgccagcaattgcgcggtcagcacatccttgtcatgggtgtcgggccagtcgccggcaggcttcagcggcgcgaagaattcagcgttgaacaggccggccgcgtcggtgccgtcgtcgggacggccatgctgcgacaccaccgacaccacctcgggacggctgcggatcagtttccgcatctcgttgacgtaggcgttgccttcctgcagcgagatcgtcggcggcagcgtggcgcggatccacagattgccctcttccagcttgggcaggaattcgagacccaggaagcgggcgaagacgatggtcgtgaccacgagggcggccgcaccggtcatcacgatcttgcggttggcaatcgcccagttcagcaccggcaggtagatcgcatcgagcttcttgacgatccaggtctcggtctcgtggatatgcgccggcaggatgatggcgctcagcgccggggttacggtgaacgttgccagcagaccgccggccagcgcgtaggcataggtacgcgccatcgggccgaagatgttgccttcgacgccgctcagcgtgaacagcggcagaaacgcggcgatgatgatcgcggcggcaaagaagatcgaccgtgacacgtcggcggaagccgacaggatcgcgtggctcttcatccccatgaccgtatcgtcggagatgtgcgcctgctcggcgtcggacagcgccgtggtctgcgacagccggcggaagatcgcttccaccatgatcacggtggcatcgacgatcaagccgaaatcgatcgcgccgaccgacagcagattggcggattcgccgcgcagcaccaggatgatcacggcgaagaacagcgcaaacggtatggtcgcgccgacgatcagcgcgctgcggaggtcgccgaggaatatccactgcaacagcacgatcaggagaatgccgaccaccatgttgtgcagcacggtgtgggtggtgagctcgatcaggtccttgcggtcgtagatgcgctcgatcttcacgccaggcggcaggatcgaggaattgttgatctggttgaccagctgctcgacgcgcgcaatggtcggcgagctctgctcgccgcggcgcatcagcacgatgccctgtacgatgtcgtcgtcactgtcgatgccggcgataccgagccgcggcttctcgccgatcgtgacatgagcgatgtcgcgaaccagcaccgggttgccgccggactgcgagatcatggtgttggcaaggtcgtcgatcgagcggatcaggccgacgccgcgcaccacggcagactgcgtgccgatgttcacggtgttgccgccgacattgatgttggcgttggagaccgcctgcagcacctgcggcagcgtcaggccgttggcgaccagtttgttgaagtcgacctggatctcataggtcttggtcttgccgccccagccggtgacgtcgatcacaccgggcaccgcgcggaagcggcgctgcaggacccagtcctgcaatgtcttgaggtcgagcacgctgtagttcggcggccccttcagccggtagcggaagatttcaccgatcgggctgagcggcgagatgccgggctgcacgttgccgggcagcggcgcgagctgcgacaggcgattgagcacctgctgctgcgcctcgtcataggtgtagtcgaaggagaactgcagcttgacgtcggacaggccgtacagcgagatggtgcggatggtcttgaggttcttgatgccggcgacctgggtctcgatcgggatcgtgatgtagcgctcgatctcctcggcggagaggcccgggctctgggtcacgatgtcgaccatcggcggggtcggatcgggataggcctcgatattgagatgctggaacgcgaacaggccgccgatgaagacggcgatgaacatggccaccatcaagtagcggcgattgacggcaagggcgacgaggcgatccattcagatcgtcactttcaactggaagggatttcttgattgcaagaacaggacgacttttgcttcgaaacgtcgtcctgctctcaccgtttgagcatggtcttttcggaaaaccgctaagcacttttccggatcatgcctaggtgccggacgcggcgcggtcgatgaagaggcttcccttcgtcacgatctgctcgcccggcttgagattgccggccacctcgacgaggtcgccattgatgagaccgggcttgatctggcgcagttcgatggtcttgtcctcggcgcgcgcgacccagacccgaacctgatcgccttcgtagatcagcgcctgtttcggcacgccgaccgccggatggtcgcccttcgaatacagcgtcacattggcgaacatctcaggcttcagccgcttgtcggtattgtcgatggtggcgcgggccaggagccggcgcgaggtcgcgtcgatcgcggcggcgacatagttgacgcgggcgttcagcaccttgcccggcagcgccatcacgctgaagctgaggtcctgcccgaccgcgacgttgtcggcgtcggattcgcggacgaaggcgatcagccagaccgtcgagaggtcgccgatcacgtagaccgggtcgctggcaccggtcgagacatactggccggggccggccttgcgctgaaccacggtgccgccgatcggcgcgaacaccgtcgtttccggattgaggcgccccttctgttgcagcgtcgtgatgtcgtcatcgccgaagccgaggatgtgcagcttgttctgcgcggcttccagcaacgtctgcgccgagcgcgcatcgttctgcgcctgcaccagcgccgcctgcgcctgctgataatccttcagcgggatcgccttgccctcggacaaatccttggcgcgcttctcctggatctgggccaggtcgagcgccgactgcgccttgttgaggcccgtcatcgcagcgacatagtcgttctgcgcctgcacggtgtcggccgcttcgatcacgtacagcggctgccccttcaccacggcatcgcccggccgcaccaaaaggcgggtgacgcgtccggtatagggcgagtagaccggggtggagcgatcctcatcgatcccgatcttgccctcggtcaccagttcggaacggaacgtgtgctcggtgacggtctggaaggtcaggctggcccactcggccgccgacggcgtatagcgcgtgccgcccttgcgggactggctggagacctcagaaggcctctgcttttccgttccgaaacgcgtgtagccataggcgcccgcgcaggccgccatcagcaccgcagcggccacgagcaggcgtgggcggctgaggctctgcacttttttgggaatgtctctcagcatgcggtccgcgaggtcgatcgttgcaaggtccggcggggcagccccagcggtgcgctaatagtgccgaattggcgctctaaacaacctataaatcgcacttcgatgacgcctgtggttaaagttcgggtagcgtgaacagcgactgaatgtctcacccgggaaactccggagcagaagactcttgagccggaaactccggcggatgactgccgagcggcatggccggacggtaccaatgggccgtcgtccgcgacagcaccgccgcgtggcggaccgaactcagcatgccaaagccggacggcagctgctcgatgaagggcagcactgcatcggccttgaggtcctcggtcgcaaggcccccttcaaggcgaccgaggttccacagccaacgcccggtttgtgccagcgaaacccggacgtgccagctgccgccttcgcgcgcctggcgggccttggccatcatggcgccgaacgccatgaaatatccggtggcatggtcgagcatctgggccggcaattccttcgggccgtcgacaccagcggcctgcccctcggcatgattgaacccggtcgtggtctgcaccagcgaatcgaaaccgcgccgctccgcccacggaccggcatggccataggccgagagcgtcacgtagacgatcccgggattgatgcgcgccgcttcctccgccgagaagccgagccgcgcgatcgcctggggacgatagccctgcgagagaatatcggcctgcgccacgagaccgcgcatcacgtcccgcccctgctcgctgcgcaactcgaggaagctcgtcagcttgccgcggccggtgtcgatggtcagccacggaatcgccggcagatcgggacccgagatcagcagcacgtcggcgccatgcgccgcgagcgtacggccggcgaccggacccgcgatcacgcgcgacagatcgagcacgcggatgccggccagcggccgctttcccgcaggccacggctttggcgcggcctcgccgatcttctcgatcgagatcagcggcagctttgcaagcgcctgggcatgcggcgtcgcggaccattcgtcatgcgagcgcatcaaggcaacgacgccgccggcggcgtaggccgcggtctcgaacgcctcgccatcccattgcagcagcgcggcctggaccacgtcacgctcggcgtcgcagcccagcaccctgcagacggcgtcgcggtgatgcggaaaattggtgtgaaggcggacgaagcggccgtcgcgaacgcggtagacgccggcgatcttgtcccaggccggaggcggcggcttgtcgtcgacccgcaggtagcgctcgctgcggcattcgacgacggcatggcggatatcgaccgcgacgtcctggctctcgccgctgcgggctttccagatctcggccgcggcaagaccgcttgctgcgatcgacgcctgcgctgcggcagcgacacgaaacgacgacggcaattgcggctcgctgccggtcaggctgaccgtatcgagcgcggacgctgcgccaccggcgccggtccagatatcggcaaggatttcacggatgtcctgcatgcgcattcctctttgcgattaacccatgcccgtgcatgatgacaaacagacggtgcccggtctcaatcgtcatacctgatttgagtatgccccccgcgcaaacgcgttccgcgtttgcgcgggggagaacagcttacatttttccggatcacgcctggtttaagcatgatcttttcggaaagccgtttcacaggtttccggatcatgccttccgaccgccccgaacaggagttgcaatggctgccattgaccccatcactgccggcgcagttttcatcgcgaccgcggccaccgacgcggtctatgtcatgtttacgtcggcggtggtggcgcgcaagcgcgtgccggcggcgacctggagcagcatctggtatctgctctcctcctatgcggtgatcagttacaccgaaaactgggtgtatgtcgccttcgccgcagcgggctcgtgggtcggcgcctatgcatcgatcaccttcctgcaccgcccgcccggcggaccgccggtgggtgctgcggtggagtagccgccctgcagcctcgcactcaaccgtcgtcccggcgcaggccgggacccataaccacagggttgtgttgttgaagagggttgcggccccagcgtcgcacgacaatcagcattgtggttatgggtcgct

SEQ ID NO: 44 - DNA, 56302 bp, Bradyrhizobium enterica
gacaccaccaactcgatcaagcaggccgccgagttcggcatcgtcaggggcggccagaagctcgccggcctcctgatgacgctcgccgaggtgaacggtctcgggctcgaggccgcgcagggcctggtgctgaccgaggggttctactgggatcatgacgacaagagccgcgccttctccgagcgcttcttcaagcgcaccggacggatgccgagcatgatccacgccggcacctattcggcgacgctgagctatctgaaggcggtgaaggccgccggcaccaaggactcggatgcggtcgccaagaagctgaaggagctgccggtcgacgacgcctttgcccagggcaaggtgcaggagaacggccgcatggtccacgacctgtatctgttcgaggtcaagaagccgtcggaatcgaagaagccgtgggactattacaagcagctcgccgtggtgcccggcgaccaggctttcccgaaggccaaggactcgggttgcccgctgacgaagtgatgcgtcgctggggcaacaagtatcggtgtcgtcccggcgaaagccgggacccataaccaccgatgttagctaccctgctgcgctgtggccccagccttcgcaaaactggttgctgtggttatgggtcctggctttcgccaggacgacagcggtggttgtggcgcgatcgcgccttcaatgcgccagacgccacgccgcgccgccgatcgcgccgacccacaacacgatggaggcgaccgcctggatggcgaagccggggctgcgtttcgccaccgcctcgcgatagccgatgaagcagacgatgcggccgatcacccagatcgcgccgatcgcggccgcggcagcgtcgccgacatagatcgcgaacagccacagcgacggcaggaagatcggcatccattccagcgtgttcatctggatgcggaagatgcgctcgaaatccggattgccagaaatcgccggcagcttgacgccgtaggcggcacgggcgcgcgaaacctgtgtcgaggtgaagaagtagaacgcaacggcaaggcaggtgacgatggccgtgtaatggtacatggcaggcgtatcctcttctgttggctccgatgtcatgacgcggcggcgccgcgcagtgtgacaagcagggcttcttttgcggcgccgatcttccgtcgacgtcctaatatcccgtcatctcaagatagccgattccggcatagctgcctgaaaagcggatcgggccttcccaataggggaagctggtgcccatccagctccggggattgagcggcgtggtctcgatggcgaggccgcgcgccggcagagcgacgcgccatgatgtcggcagcttgcggccggcgatctcggtggtcgcgattggggtgaggctattgccggcggctgcgatctcggtcgagcggccgtccggcgtgatccagttgccgaacaggttctcgcggccgtcctgctggcgcagccggtacagcatcagcttctcgtcgccgggcagatgcagtgagaaccagtcccagccggtctggtcggccgccaatggctggctgctccattcgcgatccatccacgccgtgccggttacgtcgaccggtttgtcgtcgatcacgatgcggccggacgccgtgtagaacggctggctgtagtagtatgaggcctgcccgcgatccgatttgcggctgtagccgtggtcgccttgtaaaaccagcgcacggtcggcgtcgagccggagcgtggtcgagaagtcggcggcggaggccttgagctcgagcggcgcgacccgctgcgcgtcgaatccatcgagcccgcgcatctcccaggcatcgatccaggcgtggaaaggcacggccgcgacaccggcctgctcgacaccgccgcgcgcaaacgtctcgctgaagcgatgcgtggtggcgctggtcacggcggcatgccccatccagagttgctggttggcccagccctcgttggggccgcccggcttcatcgcctggcggaacagcgtccactgcgcgccataggccgcgccgctggcgtcggaaagattcgccgtgacgtaccaccactcgatccggaactcgggatgtgggccgtgatcgacagggaaagcgaacggcttgcccggcgtgacggcggaaaaaccttcggcattctcgccgagcccggcaaagccctgcgcaaagcccttgccgccgagtgccagcgccagcgcgccgccggcaaacgcgcgccgcgtgatcgtgccgctagcgctcattgacgaaagtccggatcagggtggccggctgcatgcgggccagtctggcgaccggcagcgcggcggcacagagcgctgcggccatcgccaccgcgagcagctcgatcagttgcagcgggaagacgtggaacggcagccgccagccaaatgccttgacgttgacgatcgcaagcaggcaccaggcgaccaaaaggccgagcggcagcgcgaacagcgcggtgatcagcgcgaccgccatggtcttcagcagttcgagcgccgcaagtcgccgccgcgtcaggccgatcgcccatagcggcgccagctgcggcagccgcgaattggccagcgtgagcaggctggtcaagagcgcgatgccagcgacaccgagcgtgaaggcgttgagcgccgcggtcaccgagaaggtgcgattgaagatccgcttggattcccgcttcatcgtcgcctggtcggcgacgctgcggtcatcgagaccgaacttctcctgcatcgccgtgatcagcggcgcgatgcgatccggcgcgacgcggaggccgagccgggtctgcggcgtctgcgggaatcggcgcgtcagcgcagcgaagttgaccgcgatctgacccttcggattaccgtaatcggcgtagatgccgacgatctcgagcgaccagttaccgccgggcgtgggcacctcgatgtggtcgccgaggccgagattcatccgtcgtgccagctgctcgctgacgagacaggcgtcgcccgggcgcagcctgatccaggcattcgccgtgctctccagcaacggccagttgtcgcgataggtgctgtgatcgggcaggccgagcacctcgatcggcgagccgccaaattgcgtgtcggcgcggccgccgggcaggatcgcctcgacctccggctggtcgtgcagccaggccttgatctccttggcctgcgcatcgctggcggcactgacatagacgtccgcggcgaggcggccgtcgagccagaccaggaaggtgcggctgaagctgtccaccatggtgccgacaccgacattgaccgcgagcgcgagcagcagcgccatcagcgccagtgacagtcccgaaagctgctgtcggctgtcggcccagaaccagatgccgaccggcgcccgcgcgctgcgctggccgatcgcgagcgcgatctgcagcaccatcggcaggatcaatgcggcgcccagcatcagcgcggcgagcacggcaaagcccgcgatcagggaatcgccgaaccggatgagggcggcagcgacagcaaacaccgcgagcgctgctgtgctctggaacatgagccagcgccgttgcgcctgctgccaggcctgcggctgcgcggttgccagcaccggcatccggatcgccttgatcagactcgcggccgcggcggccagcgcgcccaggatgctgatggcaacgccggcgagccaccagaccggcttgagcgaaagctgtcccggaatctgcgcgccgtagagcccgcgcagtgacgccgcgacgtccggcagcaacgctgccgcgatgaaatatccgcagacgagtccgatcaggcccgcgaccagggccagcgacaccagctcgatcaccagcacactgttgagcatccgtgccgagacgccgcaggcgcgcaacgtgcgcagcatcggcagccgttgctcgaaggcgagcccgatcgcggagttgacgatgaacaggccgacgaagaatgacagcaagccgaacgcggtgaggttgagatggaaactgtcggtcagccgttcgaggtcgctctcggcgctcggctcgatcaaacgaagcttgtcgcccgccacgctttcgagcgtggcgtgcggtgcctcggatttgcctttggaccttccgaccagcaggcgcgatacctggccgggtagcttcaagatatcctgcgcgatgccgatatcgaccaccagcgcgccgggtgcgagctcggcctgcacgcgcagcggcggcagagtcatgccactggcgcgcggccgctcgccttccttgaggccgagatcgcgcagtgtctccggcgccaccagcatttcgccgggtggcgtgacgaaggcttgcaggctgccgcgccccaccgccggcgcggtgccgacctcggagggcagcgtcaccggctcgaccccgagcaggcggaagctgcggccgtcgatctggatccggccctccagcatcggcgataccggccagccggcgcggcgcagatcgacgaacagtcgttgcgggaaggttgcgctgtcgcggctcaccagcatcgcggtgcgcgagccgccgaaggtcgcagccgcgcggtcataggcgatgcgcgcctgctggttcagcgcctgcacgccgctccacagcgcagtcgccgagatcagcccgatcaagagcgtcgcaagctgcatcggatgccgtcgccagtggctgagcagcacggcgaggatccagagcgggcgcctcacgcaataactccagcatgcagggtgacctggcggtcgagcgtcgcggcgagccgcgcgctgtgggtgaccatcaggaagccgcagccggtgcgagcaacgagatcacgcgccagatgcagcacctcgtcggcggtgtcctcgtcgagattgccggtcggctcatccgcgagcagcaacagcggcttcggcgccagcgcgcggccgatcgcgacgcgctgctgctggccgccggacaattgctcgggatagcgtttcaatagctctttcagccccaggcgctcgaccagctcgtcatgccaggccgcatcgtggcggccggcgatgcgcgactggaacacgagattgtccgcgaccgtcaggcttgggatcaggttgaactgctggaacacgaggccgagccggtcgcgccgcaattcggcgcgtccggcatcattgaggccggagacgatgatctcggcgagcgtgatctcgccgccgtcggcggcgtctaaccccgcgatcagatgcagtagcgtgctcttgccgctgccggactcgccggtcagcgcgacgctctcgccggtcgccacattgaggtcgacgccgcgcagcaccgcgacgtcttcgccggcggagcggtaactcttggtcaggccggtgacgcgaagcagcgcggcggtctggtcaggcgaagcgatggcgatgcctcattgcggcttctggtatttcaggacgaactcgtcgatcggcactgcggccttgaagacgggaatgtccttcgggtcctccgcatgatgcaggaaatcgccctcggcgaccagcttgaaaccggcggcctcgatctcctgtttcagggtgctctcctcgatccggtgcagcgtcttggcgacgttggtgccgtcgcccggcttggccgagtgatccgcgatcacgagatagccgcccggcttgagtgctgcgaacatcttcctgttcatggcgtcgcgatcgaccggcagatagctgatgtcgtgatagaaaaagaagaaggtgatcatgtcgaagtccttcacctcgggcggaatcggatcgtcatagtctcgcaccacatggaccacgttcttcatcgcgggcgccttcgcgcgagtgtcgaatttgtccttcacgaatcgctccagcacactggccgaatcctgggcgtagaccttgcctgacggggcgacggtgcgcgccaacaattcggtgctgtagcccgcgctcgccgccatatcgaggatagtcatgccgggcttgacgccggcgaaggcgagcatcctggccggctgccggcgctggtcggtctggcgatcggcgtcgctgcgatcgggtgcggcgacgattgccgcatagtcggggctcgccgcgtcctgcgcgcggacagcgggcgccgcggcggacaacaatgccatgcaggcggctgcgcgtaggattgatctgctcatggaataaccccgggctttcttcgttgcgcagaacatagcagcgccgccatgacagatcaccgtgtcgcggccgcgccgacgcgatcgtgatcggctgttacggctgcgaccataggaaaatgcgctgttgcgttgcgcggcgaggcgtggctagcatcgccgattggggccgaacttacgaagccaaaaaaacaaacgacggggagccagacatgacgacacaaccgatgcccagggggatggtgaagagcacgcccaaaggcgcctggcaaatcaccttccttctgttcctgttcatggtggtgaactttgcggacaagattgtggtcggtctggcgggcgtcccgatcaggaaggatctgggcctcactcccgagcagttcggcaccctcggatcgtcgttcttctatctgttctcgatctcggcgatcgtgatcggcttcgtcgccaaccgggcgtcgacgcgctggattctgctgatcctggcgctgatctgggcggtgacgcagtttccgatggtcgggacggtcgatttcacgacgctgatgatctgccgcatcatcctcggcgccggcgaaggaccggcggcggcggttgccattcatgcgatttacaaatggttccccgacgagaagcgcacgttgccgaccgcgatcctgtcgcagggttcggcgttcggcgtgatcctgacgatgcccgcgctgggctgggtcatcaacagctacagttggcatctggcgttcggtgtgctcggtgtcgtcagcctgctctgggccgtcgcctggtttgtgttcggcaaggaagggccgttggtgtcgacggcggctgtcgtcaccgaagagcaacggattccctactggcggcttctgacgtcgcgcaccttcatcggctgcgtggcggcgacctttggcgcctattgggcgctgtcgctcgggctcacctggttcacctccttcatcatcgagggactgggctacacccagcagcaggccaatttcatctcgatcctgccatgggtgttcggcgctgtcgtcgtgatcctcaccggctggatctcgcagctgatgctggcgcgcggcttcaccacccgcggcgcgcgcggcgtgctcggttcggtgccgctgatcgtcggtggctgcattctggccacgctgccccatgtcgcgcccggcccgctgatgatcgcactgctggtggtcggctccgggctgtgcggctcgatctatgtggtgtgtccggcgatgctcggcgagttcaccccggtatcgcagcgtggcgcgatgatcgcgatctacggcgcattgtacacgctctcgggcattctggcgccgcaggtgatgggcagtgtgatccagcatgccggagccgtgatggccggctacatgacgggcttcaccatcaacgcagcgatcatggtggggtcgggcgtgttcgggttgctgctgctgtggccgaacaccgagcgcgcacggctgacgggcacgtcgcagccggcgggcgcgatcaggggcgcggtgtcgtcgacgtaaggcaggcacacgcttcaccctcccctgctctccaggggagggtgcattgccgcacctatctcagttcaatccctgtgcgccgcgcaccagcctgcccggccgtgcgccggtggccttgccctcgcgctgggtgacgatgccggagacgatggtggcgtcgtagccgtcgacctgctgcaagaggcggcggccgccgaccgggagatcgtaatgcaccttcggcggatgcagatgcagccgatcgtaatcgatcacgttgacgtccgccttgaagccgggcgcgatcacgccgcgatcggtgaggccgaccgacagcgcggtcttgcgcgactgcgctgcgatcacgaacgggatcgagagcttgtcgccgcggctgcggtcgcgggtccagtgcgtcaagagataggtggggaagctggcgtcgcagatgatgccgcaatgtgcgccaccgtcggacaggccgggcactgcgctcggctcgcgcagcatctcgtgcacggcgtcgaggttgccgtcggcgtagttcaggaacggcacatagagcatgccgcggccctcgtcggtcagcatcgcatcataggcgagctcttccggctgccggccctggcggcgcgcttgcgggccgagcgcgttctccggcggctgttcatagtccggcggattgccgagcaggtacatcttgtcgtagttcggccggaagaacagcggatcgtcggtcgccgtcgcgctctcgctcaggatcgcggcgcgtatctcgggccggcgcagatgcgtcagccgctccgccagcgggagcttcgcgatctcgcgatagctcggatgggtctggaacgggttgcgcgacaattccagcccgagcaacagcccgaccggccgcgccgcgatctgcgtcgtgatcgacaggccgcgcgcggcggcttcattgatggtgtccatggtctgccgccagcgccgcggagccttgtcggcctgcgcgaccgagaacgagatcgggcatttggtgttctcggcgacccgcagcatcatcggcaggtcttcgtggacggtgctctggtcgagcacgaattgcagcacgctgcggccgacgccgtgcatcgcgccggcgatcgcggtcagttcgtcctcgcccgccttcagcgtcggcgtgtagtcgccggtcgaggtgcggtgattgagcgtgcgcgaggtcgagaaccccagcgcgcccgatcgcaccgcgtcgccggcgagcgcagccatctgcttgttgtcctcgggcgttgccggatcgcggcgtgcgccgcgttcgcccatcacatagacccgcagcgccgcatgcggcagttgcgcaccgatgtccatgtcgaagctgcgcttcgacagccagtccatgtagtcggggaagctttcccacgcccagggaatgccggcggaaagcaccggctccggaatgtcctcgacgccctccatcagctggatcagccggttgtgatcgctcggccggcacggcgcgaagccgacgccgcaattgcccatgatcgccgtggtgacgccgttctgcgatgacggcgtgatgtcctggctccaggtcacctggccgtcgtaatgggtgtggacgtcgacgaagccgggcgccaccagcctgccgcgcgcgtcgatctcttccttgcccttggcggagaccttgccgacttcggcgatcttgccgccggtgattgcgacatcggcttcatagagctcgccgccgttgccatcggcgatggtgccgccgcggatcacgaggtctggggtcgaggtcatggcgtttcatcccggggctgctttttgattgtccggcatcatcggcgaccccatcgtgctgtcaaccagcgccgatgaagctctggaatgcgctggcggcgattggatcgcgcgccaccatgccgcggaaatttgttccgccgagcgggcgcgcccgcgcaccaggtccttccggccgatactgccgacgacgcgctggtcctcctgcgcgagacagaagcgagacgccgacctcaagcagattttgtcgcggcgatcggaatgaacaacgccgcgcgcccgtgtagcacgccccttcgcccttggctggcaacccggacaaatgcgacttaaagcggtatttttgatacattttacggctattacacgctgggataacggcaatatgccttgtcattgtcatgaaacgttcatagaccatgaggggaacgatatcattgaatggacggcggccggtcgtgaccgatgcagggactgctattgccgtcaggcatggcgatcaggcggagttcgagctcaagctgcttgcgccgcaaggaagcctcgaaaagctgcgcgaggcgccctgtatcgtgcagcatgcgcgcaaccgcggcgcatatcaccggctggaaaccgtgtattacgacacggcggagcgcctgctgtttcagcggggcatgtcgctacgcgtgcgacacagcggcaagaacttcatccagacgctgaagcttccacccgatgacgggcagcccctgaagcgacgccagtgggagatgccggttgccggcatcacccccgacctcgcgctgttccccgccgacgaggtcggcgatgtcgtggcggcgctgagcaacgacgcgctggtgccggtgttcgcgaccaaggtgcgccggcacgcgcgacaactcgatctgcccgacgcgtcggttgaagtcgcgttcgacgaggggacgatcgaggccgatgcacgccaggaggtgctgtcggaaatcgagatcgaactgaagagcggcaatgccggcgtcctgttcgatctcggaacgcagttgctcgacgccgcgccgttgcagattggtacgcgcagcaaggcggaacgcggctatgcgctcgcgttcgatgtcgcgccatccgcggcgaaggccgagttgtcgggcatcaccgcggagcttgcggtcgacgacgtcatcgcgctgctggtagggtcctgctggcatcatctgttgaagaatcatgcggtggccgagcagggctcggatcccgaaggcgtgcaccagatgcgcgtggctttgcggcgcttgcggacgatctgcgcgctgttccgacgcgacattccatcgccggcatttctggcggtcaacggcgaagccaaatggctgatgcggaaactcggccagacccgggattgggacgtcttcgccgaaacgacgatcacccgcctggtcaaagcggtaccggatatcgatctcggcggtctccgccaagcggtcgaacagcgccagaagtcgagctacggcgccttgcaggacgttctagccgatccccgttgcagccgcttcctgctctcgctggggcagttggtggagcgccgcagctggcgcaacgagatcgacagcgaagcgctggcgatcctgtcgcaaccgatgccggtgcttgccgatcgcattctggaacgcttgcaccgcaagacattgaagcgtggtgcgcggttccggcggctcgatatccatgcgcagcacaatctgcggatcaacctgaagaagttgcgctatgcggcggagttcttcctgccgctctatgcagcccacgcaccggcgaagcgctacgtgaagcggctcgccgggctgcagagcagtctgggccgggtgtgcgacatcggaagcacgcgcgtgctgctccaaaccatccggcaggacgaccagcctgaacttcatctcggcatcggcgcgatggccggctggctggcccgcgatcagatcgcgatggcgaaaacgctgcgcaagagctggcggcggttcaagacggcgcccgcgttctggggccggtgacgccggcgtccacaggcgatccgtgcggttgccctaacggggctgcgcctggatcgtaaacccggaggcctgcggcttgcgctcggtgaccaacgcaagcagcacggtcagcaccatgaagaccaccgacgcgccgaacacccaatgcggcatgtgctggtccatgatccagccgaacagcagcgggctgacgatgccgccgaagttgaagccggtcgagacgatgccgaaggcgcggccggcggcaccgggaggcgcggcgttgcgcaccatcatgtcgcgcgacggtgcgatcacgccgccgaggaatccggcgagcccgagcgtaagcgtcagcgccaccggcggcaggctcaccagcgtaaccagcagcaccagcacggcattgaccgcgaagcaggccgcggcgagctggctgtggcgatgggtccagtcggcgagatagccgccggcgagcacgcccgcggcgctggcgccgaggagtgcggtcagcgcgatgttggcggtcgagaacgaggcgccgtagccgcccatcagcgcgaccacgccgaaattgttgatgcccgaggtcgacaggctcagcagcgtgaagaacgcggtcagcaccatcagcgccggcgtgatcacgctggccttggctgcggtatcgtcctttgccttggtcttgttggcgccggcatcgggaatgccgagcacgatcaggaacagcgccaccaaaggtcccaccgcgccggccacgatcaacgcgccgtggccgccgatcgaggcgacgagagctgcgatgatcgccggtgccaccgcgccgccgaggaagccggcaaaggtatggatcgagaaggcgcggcccatccgcgcctcatccatatgggccgacaggatcgcgtagtcggccggatgatagacgctgttggcgaggccgagcagcacggcacagacgatcagcgaggtgtagctgagatgcaggccgagtccgatcagcgcacagccgccgacggtcaacccgaccagcaggatcttgcgcgcgccgatatggtcggcaaggtaaccgatcggcgcctgggtcaggcccgacaccaccgcgaacaccgtcagcgcgaaaccgagctcgacatagccgacgccgagctgctgcttcaggaatgggaacagcatcggcagcacgaagatatggaaatggctgacccaatgggcgaccgaaatcccggtcagggtgcgcagcgcgctgtcggttctcgcttgctgcggtgcggccagaatgtcgaccattgctgagacaaccccatcttccagcgcgttttcaagcgaagtggataccggttcgcgtgaagaaaacgcgtcaaatgaaagtaatgcccggcagggccgccagaaaatagaggctggccgctaattgtccatgaacgcaggtgcatggctgcccccggcgcgggcgtgccggatcgacacatgcggcattaaaggcggcgacaaagtgcggggctgcggtgatgatcggccatgatcgacgccaagaagccgctccgggtgcttgtgtcagagggctccagcacctccggccgggaggcgatcacgatcctggggttggccggccatcacgtcgaggtctgcgatccctcacgctggtgcctggcccgctattcccgctttgtccgcaagtaccaccattgtccgccgctgcggtcggatccggccggctacctgcgcttcgtcgagcagctgttggcgtcgcagcattttgacgtgctgctgccgacccatgagcaaggcttcctgttcgcccgcgccgcggcgcggctgacctcgcgcactggtctggcgctgccggatttcgcctcctatcgcgccgtgcacagcaaggccggcttcagccggctgctcgaccaactcggccagccgcagccgccgacccggatcgtgacctcggccgaggagctgcgcgacggcctgcagtttccgtccgtggtcaagacgtcggtcggcaccgcgagccgcggcatctggttcgtgcgcgacgccggcgatctcaatcgcgcgctctacgatctcgaatcgtcaggcgattttgccggcgaggtgctggcgcaggatctcatcaccggtacggtcgcgaaggcgcagtcggtgttctgccgcggcacgctggtcggcttccatgcctaccggcagatcgcagccggggtcggcggcggcgaggcgatcaaggagagcgtaagccggccggcgatccgcgccaatctcgagaccatcggtgcgcatcttcgctggcacggcgcgctctcggtcgacgtcatcatgccgctcgacagcgcaaccccgctgttgatcgactgcaatccgcggctggtcgagccgatgaacgcctaccagtccggcactgatctggtcgatctcttgctgcgggtctcgcgcggcgagaccccggcgccgctgggggagagccgcgccggtgtgcggacgcaccttgcgatgcaggcgctgctcggcagcgcctcgcgcgacggcacgcggcgcgacctgatccgggaatgcggccggatcgctgcgggtgaaggcctctatcggggcagcgccgaggaattgacgccggtccggctcgattggctcagcgccgtgccgctcgggatgacggccgcgctgctgctggcctcgccgccgatcgccgcatcgctggcgcgcggggggttcggcgcgcacctgctcgatcgcgggagcatcaggacaatcgagggggaggatttcttgcacgatccctcaacacgtcgtcccggcgaaagccgggacccataaccacgaacggtccttggtgagtgacggtggaacaacgagtcccattcccaacatccgccgcggagtatgggtcccggctttcgccgggacgccgtggggatggatcgttcatcgctcacaacggctcgtcatcattgccgtagcggtcgagcttcggcgtggcgatgtcgccatcctcgtaatcgtcgtcctgagacgccgctggcggcggcggcttctttggcttgtcgtcgggcttgtcgcgagccgtggcgccgcccttgcttgtctttcctgccttggccatgcgtttcctctgcacgggtcaaatcatctgccggaattctactcagttccctggcgcttgtaacgtgaggagatggcgcggccggtcacactccgccgcgccagtcaggctctagaaggtcgcgccggccttgaccatgtaggtgcggccgggcagcggataggccgagaagcggccggccgtgaacgagctcgcgatggcgtagtcgtagtacagcgcgttgaacaggttgttgacgctgagcgaccagaagaagcggtcgacttgtccgctcagcttcagatcggcggtggcgttgccggggatccggctctgggtgttggcctgatcgttgtccatgatgcgcgagctccaggcccgcaccgtggcgtcgaacaccagatagttctgccagatattccaggtcaggccgatgttgccggtgtagcgggagaccagcggcacgtcgttgccggcccacatgccgtcgcggaacacggcacgggtgatcgccatgccgccgcgcagcgtgacgctgtcgctgaccttgagcgatgcgctggtctcggagccatagcgccgcgtggggtcgaggttgacgttgtagaacagcaccgggttgaaatggatctcgttctcgaggtccatcagatagacgctggtctgcacctgaaacaggttggtcttgacccggaagccgccctcgacgtcctctgacgtctgggtcttgagctggaagttctgcggcaacgggttgaagaacgcgtcgaagcccgggcctgacaaaacgcgctcatcgacatcgggcgtgcggaaggcacgcgcggcgcggccgaacaccgagaaggtgtcggtgaagcgatgctcgatgccgacatgtgcagcgtactgcgtctcgttgctgccgagcggggaggcctgcgtgtcgaacgcgaacggcgcgttcgggtcgtagcggtcgcgcgccgagacgttggtattctgcacgcgcgcgccgtaggagaaatcggtcgtcggcaacagacccagcgtatgctgccagtaaccggcgacggtctgctgctcgatgttgtagatgtggaaggggtcgacgccctgataggcgccgcgcgcctcgcggaacgtcgaatcgtaatagtcgatgccggtcaggatcgtcgacggcattccgaacgcgacgttcttgatgctgagccgcggtgtcagcgaccaggtctgcagcgccgcatcgttgtaggtcgaggcgaagctgatggtcggcactgtgccgaagaagccgctttgcgtctcacgctgccgccagccgccgtcgacgatgaggtcgacgccgttggtcaatgttttggtaaagccggccgtgacgcttgccgtctgctggttggcgtagtcgaacggcgtcgccgcgccgcggcgatcggtgagcagctggttgacgccgatcgacggatcgaccagccgtccgccgggcaggccgagcttctggtcgctgccggtgacggtcaggaaggcgattagatccgacgtggtgtagttgacgctgccgaccgcgttgcgctggtcgagcgcattgttgacgcggtagccgtcggacttgatgccattgccgtagaacgaggtcgaccagggtccggaattgagcgccgcggacacggccgccatccggctattgaaggaaccgaacccgccctcggccctgatcgtggcgggtggaccgccagcgccggtcttggtgatgatgttgaccacgccgcccaccgcgttgtcgccatagagcaccgcgccgctgttgcctctgacgatctcgatccgcgcgatcgaatcgagcgggatcgtggtgaggtcgaagccggccttgtcgacgtcgttgaggcggcggccgttgagcaggaacagggtgttgtcggaggcgaacgcgccgaagccgcgcaggtcgaccgaggtcttggcgccgttcggtcctccatagggcgtttgcaactgcacgcccggcacctgcgcgagaatctcgggcagcgactgcaccggcgaatgcgcgatgtcgtcggccgtgatcacggtcgaggaggagccgacaataccggcgaactggcggccgccaccggcgtcgcccgttccggtgactacaccggtcccggtcgcgcccgatccgcttccgctgcccgcgttgttgctctgcgtggtgcccggcgccgggcggcgcggtgccggtgtttggtcggccgccggcttggcgcgcgtgacattctggtcgcccggcttggtgacttcgatcgcgggcagctgatcgggagcgggcgcctgctgcgcccgcgcggctgagatgatgattgacggcacgatcatcgtcgacgcgagcagaagcgcgcggcgccgacgggcagggtagcagaacataggcgagacctcggtaacgtcagtggcacgtcaccgcgaaccagtctcaccatgtgcttgccgcatcaggtgaagctcatgcctgtactccccgaccggcatcctcgcgtgtgaccacggctgacggcaggtctcctggctcgcgggtcgttacccttcgtcgccttcccaggaccgagactcccagtggcatctgacgaaggattcaccgcatacagttgcgggggcagccgcggccttggggaggtttccccgcaccgcattcccttttcatctcatcaaagaaccgtcatgttcatctagggttcggccgcgcagcaaagtcaatccggcggcggtcgggcgatcgccgcacggccacggtttttgtcgagtgtcgcttgtctgccacggcgatcgctgtaagagcatggatccaatgagcgtgcaggagtttgccttggcggccgaggtcgcggcgcggcgccggtggggtgccaccgcggcgctgctcgcgctcgtggcgctgctgctggtgatctcgctcggcatcgggccggtgcggttgtcgccgcttgcggtgatcgaggcgctgttcggcggcggcagcgacgtggcgcaggtgatcgtgcgcgagatccgcctgccgcgcaccatccttgcattcgcgatcggcggcattctcgggctgtcaggcgcggcgctgcagggcctgctgcgcaatccgctggcctcgccatcgctgttcggcgcgccgcaatccgcggcattcggcgcggtgttggtgatcgcgctggggcttgccgatgtacgctcgtatgcactgccggtggtggcgatcatcgccgccttcggctcggtgttcgcgctgctcgcgatcgccggccgcaatgccgggctgctgatcctgatcctcgcggggctcgcgatctcgagctttgcgggagccgcgaccgccctggtgatgaacctctccagcaatccgttcgtggtgctggagatcgcgttctggctgctcggctcgctggaggaccgcagcttccagcacgtggcgctggcgctgcccttcatcgtcgcgggtgccgccatcctgctgagccaggcgaacgccttccgcacgctgacgctcggcgaggaggccgcacagagcctcggcgtcgatgtcgcccggctgcggctccttgtgatcacaggcgttgcgctcggcgtcggcggcgcggttgccgtgaccggcacgatcggtttcattgggctcgtcgccccgcatctgatgcgaccgctgatcggccacgatccggcgcggcttctggtgccgagcgcgcttaccggctcggccctgctgctcgccgccgatatcgcggtgcgcatcatcccgtcgacctcggacatcaaggtcggcgtgctgacctcgatcatcggcgtgccgttcttcctctatttgatcatgcgcgaacgccgcgcgctcggtgggggcgtggcatgacattgcttaccaccagtggtctctatgcgtcgctcggccgtcgcgaggtgctgcatgatatttcgttgtcgctggccccgggtcatctggtcgcgctggtcgggccgaacggcgccggcaagaccacgctgctgcgcgcgctggccgggctgatcccgtcgaacggtgagatccggatcggcgacgatgcgctggcgttgctgcctctgcgcgagcgcgccaagcgcttcgcctatctgccgcaagggcacatggtgcattggccgctgccggcgcgggacatcgtcgcgctcggccgctatccgcatggcgccaccgacccgggacggctgtcgccgagggatgtggaagccgtgctgcgagcgatgcaggcggtcgacgtcgtcgaattcagtgatcgccgcgtcaccgagctgtccggcggcgagcgcagccgcgtagcgctggctagggtgctcgcggtcgaggcgccggtgatcctcgccgacgagccgaccgcatcgctcgatccgcgccaccagatcgacgtgatgcagaagctgcgcaatgtcgccgacaccggcgtgctggtcatcgtggtgacgcatgatctcgggctcgccgcgcgcttcgccgatcatgtgttggtgctgtcggagggacggctggcggcgcagggcacgcctgatgaggcattgtcggagagcgtcctcgccagcgtgttccgggtcagcgcctatcgcgccgaatttcggcgcgagacagtgatcgtgccgtgggcggacgtgtgatgatccggcattgccacgaactcggtgcacctctcccgcttgcgggggaggtcgcatcgcatcagggatgcgatgcgggtgcgggctctctccacaatgcgattcgcggagagaacccccaccccagccctcccccgcaagcgggagagggggcgcagtttcggcgcggccggcatctcgcttcgtttcaccttgcgctggtgttcgcgtttctgacatggatcatgtcgtgtaatgccgcgtccgccgccggaccacgcatcgtctcgatgaacgtctgcagcgaccagctggtgctgtcgctggccgatccggatcagatcctcggtctcagccgcttctcgcgcgacgcctggcaatcctggaccgccggaaaggcgcgcaactatccgcgcctgtccggcggggccgaggacgttctgctgctcaagcccgatctcgtcgtcgtcagcctgttcgacaagcgcgcgactcgcgacttgctcaaggcccacgggttgtctttggtcgaattcaccgtgccgcgcacgctggacgaggtgaaggaccagatccgggcgatgggcgacgtgctgcagcatccgcagcgcgcgcaagccgatatcgcgcggctcgacgcggccgtcgcgcaggtgcgggcggtcgcgagcgcgcatcactatcgcgtgctgccgctggagcggcgcggcttcgtcgcgggcgacagtagcctgatcagctcgttgctggcggcaaccggcctgaccaatgccgcaggcgagctcgggcttggtgccggcggcttcgcttcgctggaggcgatcgtgcaactacggccggatttcatcctggtgtcggaggccgggaatcacgccgaggacgagggccgcgccttcctgttgcatccggcgctggagcgcttctatccggagggcaagcgcatcgtgttgcccgagcggctcacggtatgcggcggcgtgatgctggccgatgcgctggatcggctgacggaagagctcaagcgggtgacgcggtagagcggtcccgtcatccccgcgcaaaggcttcgcctttgtcgctggaggtgcgagctcttgcgagcctcgaaggatgcgcggcccggacatttccacatgtgcagagagcgggaccgtcgcccttcgaggctcgccgaagaggcgaatacctcagtgacggtgatattcatgtgtgcgcgcggttaggcgcctatcccatcaccaccgggccgccggccttcttccaggcgtcgatgccgccctcgatatgggcggtgttggtcagtccggctttcttggcggcggcgaccgccattgcggagcgctcgccgaaggcgcagaagaacacgacgcggcggccggtcgcggcggcgacttcgcgcagcatgcctcccggctgcaaggtggcgcaaatcccgggatacggcgcatgcagcgcgcccgccagcgtgccgtgcttggcgcgctcggcgctctcgcgcagatcgaccagcagcacgtcgggccggccgaggcttgcgatggcgtcgcgcgtgttcagcgagaggccttccttggcaagttcgtcctggtgcaggccgacatgcatgttagcgggcaccacgacatccatcagcttcgggctcggcagattgaggttgttcatcagctcgacatagtcgtcgatcgatttcacctgcagccgcggattgtagcgcttctcctcgccgatggtggagacggtgtcgcccttgtagtcatgcgcgggaaacaccatcgtctcctcgggcagcttgagcaggcggttgaagatcgaatcgtattgcgcccgcgcgctgccgttctggaaatcggtgcgaccggtgccgcggatcaacagcgtgtcgccggtgaagacgcggtcgcccatcagatagctataggaatcgtcggtgtggccgggcgtgtacatcgcctcgaggcagaggccctcgatcgtcaccctgtcgccgtcggagacgcgcatcgagaccacgtcggccttgctctgctcgcccatgatggtgatgcactgggtgcgatcgcgcagttcgccgaggccggtgacgtgatcggcatgcagatgggtgtcgacggctttcaccagccggaggtcgagttcttgcagcagcttgcagtagcggtcggccttttccagcaccggatcgaggatcagcgcctcgccgccggcgcggctcgcgagcagatagctgtaggtgccggacacgctgtcgaacagctgacgaaagatcatggcggcttacctattcttcgattcaagtcattagaagcatattattccataaatatggttgattcaaagcaaatacatccccgcggcgcccggcccgcacccctagatccagcgtcatcctgggcagcgcgtcgcgcgtcttgaaggggcgacaacccggctctttccgatgacgggtattcgctttgggggattcctacggccgcaccagcgtgtagccgttctcggtcaacagcaggatctgtgcgacaccaacctgcaccggcgtggcggcggcgatgtagtccggccgcttgccggtgtcgcgctcgatggtgtcgacggtgttgaggcagatgtcgatccgcgcgccctgcgcgaccaggctctcgaccagcttgcgattggcgttatcgggcctcagcagctcgatgcccgggccgaaggcgacgatctcgaccgcgaccttgtcggggtcgtagtgcttcatcagattgctggcgacgctgaggacgaggccctgctttctcggatcgttgtcggacagctgcagcacgaccttgtgctcggcgaacggcttgtcctgcaacggcgcgagctgggcgcgggcgagcggcatcgccagcacgatcagagcacagccgaacgccgcgatcagcgcgcgccgcgtcatccgtgcctcgcaatgcccaaattgccctcgacgcctttcaacgtcacgccgggttcttcgcggttcggcggccggccggcgcgtagatgcctggcgacgacatcccagatcggcgcgccgttctgctggttgacggaagcccagcccgcgaccttgtaatgcttgccggcttcgagatgcttgccgttgccgagcttcagctcggagatgcgcttgccgacgctctcggtgggcgtgcaggtgtaggcgaggccgccgacgcgcaccatgtcgccgccctgctgataatagggatcggcgttgaacagattgtcgcagacgtcttccagcacatccttgatctggctgccggtcatcgtcgcgaggtaggtctcgggataggtgatcgcggtctccgacagcacgtcctccatggtgatcggctggccggcgagcgtggtgaggccccagcggaagcccggcgacagcgcgatctcggcgttgagctcgttcagcagcgcgtcgcagatcaattggtcgacggtgccggagaaattaccgcggcggtaaagcaggcggtcggcggtgccgagcttgtcgctccattcgtcggcatgcggatcgcgcatcttgtcgatcagtgcctgcattgcgggatcgggcttcaacagctcggcgaacaccggcagcaggcggtagcggagattggcgaccttgcccttggcgaggtcgagatcgagcacgccgatgaacttgccgttggagccggcattggtgaccagcgtgacgccgccggcattggtcaccgtgatcgggatcgggatcgcgtcatgggtgtggccgccgaggatgacgtcgatgccggtgacgcggctggcgagcttgaggtcgacatccatgccgttatgcgacagcaggatcaccgcctcgaccttgtcgttgttgcgatggccgtcgaccagcttctgcaattcgtcgtcgcggatgccgaatgtccagtccggcgtgaagcgcttgggatgcgcgatcggcacataggggaaggcctggccgatgatcgcgacgcgatggccgccgatctccttgataacagacggcttgaacacccgccccgaggcgggatcgaacgccttggcgtcgttgaacgcggcttcctcggtcaggaatacgttctgcgccaggaactcgcccttgaagcgggagagattgtcgcgcagcacctgctcgccataggtgaattcccaatgcccggtcatcgcctcgatgccgagcaggttggcggcctccaccatgtcggcgccgttcatggcgttggcaagcccggtgccctgccagaggtcgccgccgtcgagcaggatcgagcgcttctcgccgacatcggcgcgcaacttgtcgatcagcgtcttcagatgggcaaagccgccgagccggccgaagcgtccggcggccttctcgaactcgacacaggtgaaggcataggcgtcggcgctatcgggccggatgccgaagcggtcgaggaatgccttgccgaccagatgcggcggctggccggccatcgcgccgacgccgagattgacgctggattcacggaagaacaccggcttcagctgcgcatgggtgtcggtcaaatgcaggatgcgggcgttgccgaagcgttcgaggtcgtagacgctcgcggtatcggcgccgcgggcaaggcggggcaggccggccacaagcgtcgcggcggccgaagtctttaggaaatcccggcggcggatgatcatcgctctctccgcgcggcccgtggcctgcgcgcctttaacgaacttccatgtccttccagcgttccttttcgctggtcgcctggaaaatcgatgcctttgccagcgcctcggcctccttggcctgggcgactgcggtgtcgaaatcaccagcctcgccggccttttttgcggcggcgagcgtcgaagctgtcgtggtccactggttgcgcagagagccggcttccttgttggcggcttcagccgcggcataggccgccttgtaatcggcctcggaggcggcaagggcgctgctcccggctgtggtcagcagggccgatgcggcgaagatggctcgcatgaccgtcctcatggccgtgctcccggccccgaaatcggcagcccgttgctgacataggacaaataatattcgaggttgcggtattcgtcgtcctgcggatcgagcggcacgccgcggatctggctgttgcaggtggtgaagcggcggctggtggtgcccatgcccgaccattccgagcggtagatcggcatcgcgttcaagatgccgagcgccggcgccagcacctcggcgcggatccgttcgcccgggctctggatgtggcaggtggcgcaggagaaattgagctggccgcggcgggtatagaaatattccttgcccttctggtaggcctgaagcgcgcgcggatcgttcgggatcttgatgtccatcggcttgccgcgcgaggtgaaggccatgtaggcggtgagcgccgccatgtcgtccttcacataggagaacggcgcctcgccattggcctcgcggcagcggttgagcgcgagctcgagcgtgacgaccttgccttccttctcgtcgaaatagggataggtctggcggatgccgatgcccttgttcgggaagcagtcggcgtaggtcttgccgttcttgaagggcgtcgagaacatctccttgccggcttcgagcgagaactcgtagggcggaaactgctccttctcttcccattgcttgtgcaggtcctcgttcatcgaatagggaccgttgacgaaatcctcgagcttcagcttggggaatttggtggtaaagaatttctggaacgcggccttgtcggcggtgggatcgacgctgtcggccgcgcgtgccggcgcgagcgccagcacgccgagcgtgagcgcggcgaacgcggcgcggattacgaggcgccgcgtcattgaatcttcgccgtggtggcgtcggtcgcacccttgttgtcgacccagctgaccttgagttcgccgtccttcttgccgcccttgaaggcgaacttgacataggggtccttggacacgccgccgccccagtcggcgacgaacaccggcttgccgtcatattcgaaagtcagcacctggatgaaatgcggcgggatgatctcgcccttggcgtccttgacgaagccggaatccatcggatgctggatcagcgcctgcacctcggtggtgtcgccgttcgaggtggcgcgcacgcgaatgctcgatgccatcggtttgcttccttgttgtttagcgtgcgatcagccgccgcagccgccgacggtgaccttgatttccttggtcgcgctgtagagcttgccgtcggcctcgaccagcaccacgacgttgctggtcttggccatcttgatgcggttgccgacgctcggcagcgtgccgtccggaatcttgtaggatgcgaccagcgagatcgggttctcgctcaccaggaacgagatcgaggtgacgcctgatagcgtcgtggtggccgagatcggtaccactgcgccgttctcggcgatctccggcgcgtccatcttgaccttgtccgaaggctcggcggtcttgccgtagagcgccttgatcgcgtccgccacggtcttctgcttgaacgcatcttccggatatttgtcgttggcggcggcgagcgcccgcggcacgtcgaacgggatcaccccgaggccgaccagtgcggcgacgcccgcgcccttcagcagcaggcggcgcgcttcggaatattcgttggtcgcaatgttcatcgaaatctcctcaagcggtcgcggcgtcacagggtctgcaggaagtccaccaccgcgtcgatttccttctcgctcaaaattcggttgcggccgaacggcggcatcacggtctgcgggttgcgcttggtctcatcggtgacgatcgcgatcagctcgtcgcggctgtatttcgccttgaggccagtcagctcggggccgatcgtgccgggcagctcgccgcccttgatgacatgacaggtcaggcaattgcccttgccgcggtcgaaggcgagcttttggccttcggcggcggattgggcttgcgcggacgcagccatagcagtgccggccagcagcgccagaacgaaggctggcttggagaaagtggcgatcaaggacgtttcccgggcttcaatctcgatgatcccatcgcaatataaagagtggaaagcacaaaggccatcggctggcaatctggagaataggcgcgttgcgacggggttaatgacagcgtggtggtccggaactggagtggtcccctgagccttccacctgccatgttggtgcggttgagtgcggttgaggcgtaaggagagcgcggtggcggagttcgtggtggagttcggcaaagacgggcggccggtcgaagcggatgggcggctcgatgcggcggccttccaccgcaaccatcagccgatctgggcggtgctgaaggatttcctcgccggccaatccggtgacgtgctggaggccggcagcggcaccggccagcatgtcgtctatttcgccggccggacgcccgacatcacctggtggccgagcgacctccatgccgcgcatctgcgcagcatcgcggcctggcgcgtccacgccgggctcgccaacatccggccgccgcagccgatcgatttgtccgatccggcctggtcgccggcgccgtcagacggcaaaggtccggacaagctgctcgcgatcttctgcgccaacgtgatccacatcgcgccgtggcgcgtcgccgaaggcctgttcgccggcgccgcgcggcacctgcgcgccgacggccggctgttcctctatggcccgttcaagcgcggcggcaagcacacagcgctcagcaatgccgtgttcgacacctcgctgcgcgagcgcgacgccgagtggggtgtgcgcgacatcgccgacgtcgaggcgcttgcggagcaagtcgggctgaagcttggcggcagcttcgagatgccggccaacaatttgatcctgatgttcgtgcggaaggatgccgctcaagcgtaggatgggtagagcgaagcgaaacccatcatgcttgattgaggcgccgattgatgggtttcgctacgctctacccatcctacaggtcgggcgatttccggctcaatcgtaagccaagcaccatccatctccacgcagccagcaaccgtcgtcggggacgtcggcattgcggtacagtcgcgtcaccttctgccagccgccgcgggtgaaggcttcggccaaggctttttccgatcgttcgtcacgaccgccatcgcagggaatgatcgcgaccggcgatatccaggcggcctgatagcctgcgccttcgcgtcggacccggaacacggcgccggatcgcgccacctgttccggcgcgccacccttgaagccctcatccgatgtcagcggcaggatcaggcggcctccctcggcgaggccgtcgagccagcgcgcggcgggccgggtgcagccggcattgacgtagatcacgtcggccggcccgaactccacctgcgtgccgtcgcccgcgatgatcgcgacattctcgtaaggagcgagattggcgctggcgcgcgctgcaagctccgggtcatattcaatgccggtgacgcggccggatggtccgaccagatgcgcgagcagagctgtgtagtatccggtgcccgtgccgacatgcaccacatgctcgccggccgctggcgcggcctggtgcatgagataggcatgcagcgacggctggccgttgttgaggcgacgctcgggcagcaacgcgaccagatcgttggtatagagatagaccgggtcggcatcgggcgtcggcatgtagttgccgttccaccaccgcagcatcagccaaggtcccgggccgacgaagtcctcgcgcgggatggcggcaaaggccgcggtcagccgcgcatcggcgacgttggcggcggccaggatctgcttggcataggctccgcggacgatgcggagttcggcttgcgggtccatcacggcgctccctttgccttcatgtgtcatttgacacaccaaggtgtgtgaaatagcatacttaaacgacggaggccagaatgaagaggcggctttatccggctgtgctggagcgcggtccgcgcggcgcgttcggggcatggtttcccgattttcccggctgcgtcgccggcggcaagtcgcaggaggaggcgatcgagcgcgccgagcatgcgctggcgcagacggtggacggctgggccgagcagggccgcgcgctgccggagccgacgccgatcgagcggatcgtgccgcccaagggctccgatgtcgccgccttcttcatggtcggcgtcgatccgcccgatccgtccgagcgggtgaatgtctatctgccgaaaagcctgatcacgcggatcgacaagcacgcggcctcgattggcatgagccgctcaagtttcttcggcttcgctgcctcgctggcgctggaatgggcgcccggcatcgcgaaagcaaccttcgtcgagccacgctccaaggtgcacaagaccggcgcgctgcgcgccgagaagcggccgggcaagaagcctgtgcgataggcaacgcgcgttggaatacacttgacgtcgtcctggctttcgccaggacgacgtcggagagtattcgaccaggccatcgcgcgtgcgcctcccgcatggcctgcgcccgtttgcgccggttgatcggcccgtacccgctctccatagtgccggcgattggaggctcccgccggggcttcgatgcgggaatgccgatgatcgacgtgacagcagcggatgagaccagcgatgacgcgcgggcgcgcggcaatgtctggcggcttgcggcggcgcaggcgctgaccggcgccaactcggcggtgatcttcgccaccggctcgatcgtcggcgcgacgctggcgccgagcgtctcgctcgccaccgtgccgctctcgatgtatgtgctcggcctggccgccggcacgctgccgaccggcgcgatctcgcgcgcctatggacggcgcacagccttcatcgtcggcaccttctgcggcacgctcaccggcgcgctcggcgccttcgcgatcctgcactcctcgttctggctgttctgcggcgcgaccttcctcggcgggctctacggcgccgtcgctcagtcctatcgcttcgcggcggccgacggcgccagcgtcgcgttccggcccaaggcggtgtcgtgggtgatggccggcggcgtgttcgccggcgtgctcgggccgcagctcgtgcaatggaccatggacatctggccgccctatctgttcgcgttctccttcgtgatgcaggcactggtcgcgctggtggcgatggcggtgctgtcgggggtcgacgcgccgaagcccgcggccgcggatctgcatggcggccgtccgctgctcgagatcgccaaacagccgcgtttcatcgccgccgcgctgtgcggcgtgatcgcctatccgatgatgaacctggtgatgacctcggcgccgctcgccatgaagatgtgcgggctcacggtcagcgattccaatttcggcatccagtggcacatcgtggcgatgtacggcccgagcttcttcaccggctcgctgatcgcgcggttcggcgcgcctcgcatcgtcgcgctcgggctggcgctggaggcggtggccgcgatgatcgggttgtcgggtatcacggcgccgcacttctgggcgacgctgttcgtgctcggcgtcggctggaattttgctttcgtcggcgcctccgcgctggtgctggaaacgcatcgcccgcaggagcgcaacaaggtgcaggcgttcaacgatttcctcgtcttcggcatgatggcgatcggctcgttctcatccggccagctgctggcgcattacggctggaacgcagtcaactgggtggtgtttccgcctgttctgctcggccttgccgtgctgtcgctcgcctcgttcgccaggcggcgggcgaaattgcgcgcgttggaagaaatcccggatccaagcatctgaagctttccaagcatgatccttcaaaaggccgcttcgcgctttttcggatcatgctcctgccagctgctgacacttcgatccgtttcgaagtgaccggcttgcgcggctccttacatcgtgagaacggataatccggtcctgacgatgtcggaagcaagagcaagaaatggacgcatcctcacccacgcgaactgacgaatcctcgctcggttacgaaggctggcgcatcgtcgccgtctgcttcctgctggcgaccttcggctggggtctcggcttctacggccagagcgtctatgtcgccgagctgcacaagcagcacggctggccggcctcgctggtctcgtccggcacgaccttcttctatctgttcggtgccgcgctggtcgccttcgtcagcgaggcgatcaaggcgttcggcgcgcgcagctgcctgatcgccggcaccttcgcgatggcggtcgcggcggtcgcgatcggccaggtgcgcgagccgtggcagctctatctcgccgacgcgctgctggcggtcggctgggccggcaccagcctcggcatcatcaccaacacgctcggcctgtggttcgacaagaagcgcggcatggcgatcagcctggcgctgaacggcgcgagcttcggcggcatcgtcggcgtgccgctgctggtcgccgggatcggcgcattcggcttctccggcgcgatgatcgcggcagctgggctgctggtcgtgatcatggtgccggtcatcctgatcttcgtcgggcggccaccggcgcatctgcacgcggtgacttcagcggctgccgatgcgccgtcggcgacgcaggtgcgcgcccgggcactgcgcgacatccgcttcctttcggtctcgattgctttcgcgctggtgctgttcgcccaggtcggcttcatcgtgcatctgatcgcctatctcgaccaggtgatcggccgcgagcgcgccacggtggcaatggcgctgctgaccgcgatggccgtggtcggccgggtctccttctccttcgtgatcgaccagctcaaccagcggctggcgtcggcgttgtcctttgtcagccaggcgatcgcgctggctctcatcatcaacgtgcacaatgacgtcgtgcagatcgcggcctgcgcgctgttcggcttctcggtcggcaatctgatcacgctgccggcgctgatcgtgcagcgcgaattcgatccgcgcgcgttcggcgtgctggtcagcctgatcaccgccatcaaccagatcacctatgcgttcggccccggcgtgatcgggctgctgcacgatctctccggcagctacacgctgccgttctacggctgcatcggcctcgaactgatcgcggcggtgacgatcatgacccgcggccgaagccagcaacgccggttatgattttcgacgtgacttcttcgtcttcttcggtgcctccatcttcccggccgccgcgacccgcaggaggcggcggaaggtcggacattccatgtggctcggcgccgggcagacggcggcgtggcgcaggccgtcgcgcatcgcgttgaggcggcggatggtgcggtcgagctcgtcggccttggccgccagcatcttccggtcgatccgcggcctgccgtcaggcgcgaacatccgtccgatctcgtcgagcgagaagccggaggcgcggccgagcgcgatcagcgccagccggtccagcacgcccggatcgaacaggcggcgcagcccgcgccgtccatgcgaggcgatcagccccttctcctcgtagaagcgcaacgtcgaggcacgcacgcccgactgttccgcaacctccgcgatgtcgatgtccctcacgcctcttgacctcaagttcacttgaactggcagtgtgcagcctatcgcctgcccgccgcaggcagcaagcaggatcaagaagcatggatgccgcatcgcaggtcgacgacgagcagctcaaatgccggaacggcgctgctcatggctgacgccgtggaatacctggcgagcgcggcgttgattgggaccggcgcgaccattgtgatggacatctgggggatggtccgcgcgcatctgcttggcgtcccgtcgctggactatgccctggtcggccgctggctcggccatctcgcatccggacgcctgcgtcacgatcgcatcgccgcctcgccgcaggtcaccggcgaacgggtgatcggatggatcgcgcattatctgatagggatcggcttcgccgggctgctgcttgcgatcttcggcctcgattgggcgcggcagccgaccatcggtccggcgttgctcgttgggatcggcagcgtggccgcgccattcctggtgatgcagcccgcaatgggcgccggcattgccgcgagccgcacgccccatccatgggccgcgcggctgcaaagtctcgtgacacatgcggtgttcggtggcgggctctacgcggccggctggatcgggcggctgtcgtcatcctggtagcccgatggagctgagcgcaatccgggatatgcccccgcgaaacgagatcccggatttcgcttcgcttcatccgagctacggaattatcgggtcgcggaattatgccgcccgctgcttcagcaaatcctcgaggtccagccgtcgcgtgaacatcgagagcttgccgtccgcgctgcgcggccattcggcttcggggcggtcccaatagagctcgacgccgttctcgtcgggatcgcgcaggtagagcgcctggctgacaccgtggtcgctggcaccgtcgagctggatgccggccgacagcacccgatgcagcgcgtcagcgagcgccggccgggtcggatagaggatggcggtgtggaacaggccggtggtgccgggcggcggcgggcggccgcccttgctctcccaggtgttgaggccgatgtggtggtgatagccgccggccgagatgaaggccgcatcggtcccgaggcgctgctgcaattcgaaaccgagcacgccgcaatagaagccgagcgcgcgctcgagatcggcgaccttgaggtggacatgcccgatccgcgtgcccgcgacgatggggggattttcaggcatgagctggctccggtggcatcaacgccctgccgtcagcggcaaggcttcgccgcctgatatagtgcggatttgccggggccggagcaatccatccggaaacgcagcgtttccggatggcgccacttccggccggatctagcagagctccgacagttcgccgccgggcagctggaactcgaacgtgttcagcgtcatcgagaccatcgtgtagtagccgcagaggccgatcacctcgaccaggccgcgctggctcagcacttcgatcgcctcgtcatacagtgccttcggcaggccgtgaccttcgtgcagtgccttggcgacgtcgtagatcatcctggccttggggtcgtcgaaggtcggcgtccggcgcacccggatgtcctcgatgatcttcggatcgagcccgcccttcagcgcgaggcgcttgtgggcataccattcgtaatgcgcggtccagtgccgcgcggtgacgaggatcgcgatctccgacaattttggcggaaagatcgtgtcgaagcgcaagacctcgccgagccgcgtggcgtgccgcgccatctccggactgttcagccaggccatcatcggcgccggtggcgcgccgcgcttgccggcgatcgactcgtcgtaggtttctttctgggcggcgttcatttcgctaggcgaaagcagtttcagccgcatgtccgtttcctcttgtttttcaaccgttaccccgtctcggcgatacacccgatcgcgcaaggtgagtagcgacgccagagcatggcgcggccgcgaggcatattgaattcggcggctgcgtaggtctaaggtcgaatccaattcgtcgaatttgactggaaacgcaccatggctgacctcgagaaattccgcgcagagacccgcgcctggctggagcagaactgcccggccgagatgcgcaaaccgatgacctcggatggcgacaccttctgggggggccgcaatgcgaaattctcgtcggacgcgcagcgggtctggttcgagcggatgcgcgacaaggggtggaccgtgccgcattggccgaaggagtatggcggcggcggcctcgacggcgaggaagccaagatcgtgcgccaggagatggcggcgatcggcgcgcgggcgccgctgacctcgttcggcatctcgatgctcgggccggcgctgttgaaatacggcaccgaggagcagaagaaggagcatctgccgaagatcaccgcgggcctgatccgctggtgccagggctattccgagccgaacgccggctcggacctcgcctcgctgcagacccgcgcggtcggcgacggtgacgactacatcatcaacggccagaagatctggacctcctacgccaactatgccgactggatcttctgcctggtgcgcaccgatcctgcggccaagaagcacgacggcatcagcttcatcctgttcgacatgacctcgaagggcgtgtcgaccaaaccgatcctgctgatctccggctattcgccgttctgcgaaaccttcttcgacaatgtccgcgtgccgaagtcgcatgtcgtcggcaccgtcaatcgcggctgggatgtcgcgaagtacctgctgcagcacgagcgcgcgatgatctcgggcatgggcgagcgcggcgtcggccgtccgctcggccagatcgccgccgactcggtcggcgcggatgcgcaaggcaggctcgacgacgcgcagctgcgcagccagatcgcgaatttcgaagtcgacgaagcggcgctcgccgcggccgcggagcgcgcggtcgatctcgccaaggccgggcagtcgcatccggcattctcctcggcgatgaaatattacggcaccgagctcaacaagcgccgctacgagatcctgatgtccgccggcggcatcgacgcgctggaatgggagagcgatcgctcgaaaggcggcgcccgcccgcgcgcctggctgcgcaccaaggccaactcgatcgagggcggcacctcggaggtgatgctcggcatcgtcgccaagcgcatcctcgatctgccgggggcgtgacgcggtctttccacccgtcattccggggcgcgacgcagtcgcgagcccggaatccataaccccagatcgtggttatggattccgggcctgtcccttcgggccatcccggaatgacgaacttagacatatcagcttcgaacgttagatcggattctccatggccctcgtcctcaccgaagaacaatccatgctgcgcgacagtgcgcgcggtctcatcagcgacaaggcgccggtggcgcatctgcggtccttgcgcgacaacaaggacgcgaccggcttctcgcgcgagctctggacaacctttgccgagatgggcttctccggcctgttggtgccggaccagttcggcggcagcgggctcggctgcgtcgaggccggcatcgtcatggaagagatcggccgcaccttgatgccgtcgccgttccttgcgacctcggtgctcgcggcctccgcactgtcgcgcggcggcagcgaggcgcagaaggcgcagcatctgcccaaaatcgccaacggctcgctgctcgcggcgctcgcgatcgatgaaggcgccaagcatcgtccgctgcagaccaaattgcaggctgtgcgcgccggcaacggcttcaagctgtcgggtgacaaggccttcgtggtcgatggccacactgccgatctgttgatcgttgccgcgcgcagcgcaggcagcgccggcgacaggaacgggttgacgctgttcctggtcgatccgaaggcgaaggggctcgcggtcgagcgcaccgcgatggtcgattcgcacaacgcggcgcggatcgtgttcgacaatgtcgaggtcaatgccgacagcgtgctcggcgaggtcgatcagggctttgggctgctcgagggcgtgctcaatatcggccgcggtgcggtcgcctccgaaatggtcggtctctccgacgaggtgttcggccgcaccgtgacctatctcaaggagcgcaagcagttcggcaaggcgatcggcgaattccaggcgttgcagcaccgcgccgcccagctctacatcgatatcgagatcacccgcgccgcggtgttgaaggcgttgcaggcgctcgataccgatctcgacaaggccgcgcatgcggtcgcggtggcaaaagcgcgcgcgggcaccacggcaacgctggctgtgcaggagggcgtgcagatgcatggcggcatgggcatgaccgaccagttcgacatcggcttcttcatgaagcgcgcccgggtctgccaggagctgttcggcgacagcaatttccacaccgaccagctggcgagcggcaaagggtactgattgtcattccggggcgcgcgaagcgcgagcccggaatccatggcgccaccagctttgcggcttgatggattccgggcctgcgcctatcggcgcatcccggaatgacggaatagcgtcaccggatcggcggtgcgtattgcacgccgccggcgttccagagctggttcatgccgcgcgggatcttcagcctggaatcggcgccgacgttgcggtcgtagacttcgccgtaattgccgacgtggcggatgatgcgcaccgcccagtccttggtcaggccgagatcctcgccataggaaccttcggtgccgaccagccgcatcacttcgggcttcttcgacttcagcgcctcgtcgatgttcttcgaggtgatgccgagctcctcggcgttgatcatggcgtagagcgtccacttcacgatcatcatccagtcgtcgtcgcgcaaccggaccaccggcgccagcggctccttggagatgatgtcggccaggatggtgtggtcgttcggcttggagaggttgagccgcagcgcatagagctgcgaggcgtccgaggtcagcgtgtcgcactggcccgaatcataggccttcacgacatcgtctagcttgtcgaacttcatctccgtgtacttcatgttgttggcacggaaatagtcggcgaggttgagctgcgtcgtggtgttggcctgcacacagaccttgctgtcgttgaggtcgagcgcggaatcgatgttgcgcgcgcggggaatcatgaagccctggccgtcataataggcgaccgccgggaaatagagatcgtaattggtctcgcgcgacatgctccaggtggagttgcgcgagaggatgtcgaccttgcggttctgcagctccttgaagcgttcgctggcatcgagcggcacgaacttcgccttcgacggatcgtcgaagatcgccgcggcgaccgcgcggcagaagtcgacgtcgaagccggtccagttgcccttgtcgtcggggatcgagaagcccggcaggcccttgttgacgccgcacagcacgtcgccgcggcggacggtgcgcttcagcgtgcgggtgtcgtaacgctcataggtgatggcggcggccgcaacgagcgcggcgaccgcgagcccgatcgtcaggccgcctcgaaatgtacgcatgggttctctctcgcgaatgatcgggggaaaagcgggtcggatatcgaaggcggggtcgggatcagagttcgggcttctggcggatgatcaccttggtgccgacgggaacgcggttgtagagatcggcgacgtcggcgttgaccaggcggaagcagccggacgagatcgcggtgccgatggtgtcgggccggttggtgccgtggatgcggtacaccgtggtgccgagatacatcgcgcgggcgccgagcggattgcccgggccgccggccatgaagcgcggcagatagggctggcgggcgatcatttccggcggcggcacccaatccggccactcggccttgcgggtgatggtcacgaggccctgccactgaaagccgtcgcggccgacgccgatgccatagcgcagcgcgcggccattgccttgcacgagatagagatggcgttcggcggtggagacgatgatggtgcccggcgcctcgttggtccggtagtacacgacctgcttctgccattccggatcgagctggtagctgtcgtcggcgatcaggcccggctcgtcggcatcggggcggctctgggcgaagccctgcgacgtcgacagcacgagcgcacctgtggcaatcaacatccagaccaggtgacgaagtttcgtcatgcaaagctctccttgttggcaagcagccaatggttgctccacccaaatcaggttcggaagcatcaaatctcagcggcagcttgatggcaagtttagggcgggcgtcacactatatcactgtaatgcttccgttttttgtcgtcggggacggcggcgcgcggcgcgggccgcctcatttcggcgcgatccagagccgcaacgcgaacgagaccagcgccaccgtgccgacgccgccgagccagagcacgacgaaccacagcaggcgctgactgagcggccgctgaccgggatcgggcggcatcaatgatatccgtggccgggccgcaccttgccgcggaacacccaataggcccaggcggtgtagccgaggatcagcggcaccaggatcgagactccgaacagcatgaagatctggctgttggccggcgccgccgcctgccagatcgtgatgctctgcggcacgatgtacggatacatgctaatgccgagcccggcataggacagcgcgaacagggcgagcgtcaggaagaacggctggtggtcgttcctgttgctgagcgcgcgcagcaacagcgccgtgactgcggcgaccgcgatcggcaccggcgcggtgaggacgatgttgggccaggcgaaccagcgctgggtgtactgtacggccaggaacggcgttgcgatgctgacggcaccgatcgcgcacagcatcgcgaccagcaggatccagctcagctggtaggcgcggtcgcgcagcgagccttcggtcttcatcaccagccaggtcgcgccgagcaacgcatagccgatcacgagcgcaatgccggtcaggacgctgaacggcgtcagccagtcccaccagccgccggcatagtgtcgtccctcgacatggatgccctgcaggatggcgccgagcgcgatgccctgcgccagcgttgccaccagcgagccgccggcgaaagcgagatcccatttgttgcgcgccttctgggtgcgccagcggaattcgaaggcgacgccgcggaatacgaggccgagcagcatcgcgatcatcggggtgtagagcgccggcatcagcaccgcataggccagcggaaacgccgccatcatgccgccgccgccgagcaccagccaggtctcgttgccgtcccacaccggcgccacggtattcatgatcacgtcgcgatcggtcttttgcgggaacagcggaaacaggatgccgaggccgaggtcgaagccgtccatcacgacatagacgaacacggcgaaggcgatgatgaaggcccagatcgtggtcaggtcgatcatcgcgcgccctccacggcggcgcctgccgccggcgtgatgccggccgcgcgggcgggaaggtccttggtcgggccctgttcgccgggatgcggcggctgcgccatcagccgcaggatgtagatcacgcccgcgatgaacacgacgaaatagacgatgatgaaggcgatcagcgaggaacccacggccggcgccgccagcggcgaggcggaatccgtcgtgcgcagcagcccgtagaccgtgaacggttgccgcccggtctcggtggtgatccagccggcgagcaccgcgatgaagccggccgggcccatcagcaccgcgaagcgatgcagcagctgtgactggtacatcatgccgcgccagcgcatcagcaggctgaacaggccgagccccatgatcaggaagccgagcccgaccatgatgcggaacgcccagaacgtgatcggcaccggcggccagttctcgcgcggcaccgtgtcgaggccggcgagcggtgcgtcgagcgaatgcttcaggatcagcgacgacagcttcggcacctcgatcgcgtatttcaccttggcatcgcgttcgtcgggccagccgaacaggatcagcggcgcgccgtccttgtggctctggaagtgaccttccatcgccatcaccttggcgggctggtgctccagcgtgttgaggccgtgttggtcgccggccaggatctggatcggcgccaccagcgtcgccatccacatcgccatcgagaacatcacgcgcgcccccgccagatgctggtcgcgcagcaggtgccaggcgccgaccgcgccgaccaccagcgaggtggtgaggtaggccgccagcaccatgtgcaccaggcgataggggaaggacgggttgaagatcaccttgagccagtcggcggcgacgaactggccgtcggcattgaccgcgtgaccggccggggtctgcatccaggaattggccgacaggatccagaacgcggagatcagcgtgccgatcgcgaccatcagggtcgccacgaaatgcagccgcgggccgacccgcgacaggccgaacagcatcacgccgaggaagccggcctcgaggaagaatgcggtcaagacctcataggccatcatcgggccgatcaccggcccggtcttgtcggcgaaggacgcccagttggtgccgaactggtaggacatcacgatgccggagaccacgcccatgccgaacgcgaccgcgaagatcttcagccagtaattgaacaggttgatgtagacctcgcgcttggtgatcagccaaagcgcctccagcaccgcgagatagctcgcaagtccgatcgagaatgcaggaaacacgatgtggaacgacatcgtgaaagcgaattgcgcgcgggcgagtacgaccgcatcccagccttcgaacatgatccaccacctgccgtcgacctgacgtggaccctaccacgtcaggtgtgacgacaacactgggcggattgtctaatcagctattggcgttgagcagccgggcgacggtgcggtcgatctcctcgtaccgcccctcgccggcatgctggaagacgatcttgccgttctggtcgatgatgtattgcgccggccaatactcgttgtggtaggcgttccaggtcagcgaattgttgtcctgcgccaccggatagaggatgccgtgccgcttcagcgccgcctgcaaattggaggccgaatgctcgaacgggaattcaggcgtatggaccccgatcacgacgaggccgcgatcccggtactttgaataaagttcggtgacgtgcggcagtgtgttgacgcagttgacgcagccataggtccagaaatccaccaccacgaccttgccgcgcaggtcggcgagcttcagcggctgcgagttgaaccagttgctgatcccggcgaactcgggcgcggtctggctctgttcggtggtcatggcgaccgcgcgcggcaccggttgcgccggcgcgtcggattcggtgcagaggccggggatcacggcgccgccgaggccaaggccggcgaccagagcggatacagcaatcaagcgcagggacatcgatctctccttgtgagctcacaggccgatctggccgttgggatagaactgggtcagccacgccacgatcagcgtgtcgtattgcaggtaggacagcgcggcgaagccgatgatcacgacgccgaagccttgctgcaggcgcggcgcgatccgcgccatgctgcgcacgcgggtggtgacggcctgcccgccataggcaatggcaagcatcgggatcgcggcgccgatcgcgtaagtgacgagctgcaggctcgcccacgccgtatccccagaggtcgcgacgatggtcaggatcgagccgagcaccgggccggcgcacggcgtccacaccaggccaagcgtggtgccgagcacgaagccgccgaacaggctctgcgacggcgcggcctgactgaggctgcccgcggcaccgctgagccggatcgacagccattcgaatggcgccggccagatcatcagcaggccgaagccggcgagcaggacggccgcgccggtgcgcagcaggttgggatcgaaatcgaaggcgcgcgtgatcgcgctcagcagcaatgccaccgcagagaatgacattacgaagccgagcgcgatcatcgcaggccgcgccttgccggtctggcctatcgataccccaagcagaatcggcagcatcggcagggtgcaaggggcggcgacggtggcgacaccggcaagcagggccagggtaagggcaggggcaaggctgagcatcgtcatccgtccatcagaagtcccggcgcgccagagggccgtgccgggtacgcatgatggtcttcgaaaggacggtccggccgttacggcggagcgccgtcacgtccgtgtgagacgtgccgtgatcggcctcacgaccacgcgccgaaaacagagcgacccggctggggggcatcccggccgggtcgttggaggtttacttgggaggttagaactagggaagtctcgaaactgagtcagtcacttgggttggggttgcgtcgttggatatgggtatagggatcgtgtttttccgggtgatgtcgtcgattgtttcaattgtttcgtcgccgaacttttttggcttcgtggacaattgcccgggttcctcgatctcccttaactatctgtatctgcttcgctttatgccgcgacgctgtccacgccggcaccccgcaggagatcggcgagctgcttgcgggcatagaacatgcgggtcttcaccgtgctctgcgggatcccgatgatctggccggcctcctcgaccgacttctcatggtagtagaccaggttgatgatctcgcgatgcgccggcgacagcttggcgacgcaagcgcgcaggatctcgctggtggtggcgcgatcgagcgaggtttccggcgtatcggcgccgtcggcgatctccagcacgtcgtcctggtcgatgtcctcgtgcttgcgctggcgcagcgcggtcagcgccttgaagcgggcgatcgagagcagccaggtcgagacctgcgagcggccttcgaactgggccgcggtgcgccagacgtccaggaacacctggctgaccaggtcctcggccatggtggtgtcgcgcaccatgcgcagcacgaagcggtaaacccggacgttgtgacgggcatagagcgtgtgcatcgaggtgcggttgttcttggcgatacgcgcgagcagcatttcatccgaggtcgcgcgagcagcgtcgatatgcttctcggctgcagagttaatggcgatgacgttcggcatgacaggctcccagttcgccgttgggcggcggttcgttgagagaaagctagttagcgccggtttccggatgtctgcgccaaaagcggaaaatggtttcatgaccgggagaattgtttcgtcgccggccgaacgacgaaacattcgcgggcaaaaagcctgtcatttcaatgcacggaaaatagcagcggccgaatccggccgctgtgggaacgaatccggcttatgactttcggcactacctgggcctattcggccgcctgcaaagcgggcgatgcctttttcggggcaatccagaacgcgtcgggccgttcgaacaggaaattggcccgtaccgccagcgccagccgccagatcagcagcgaaccggcgacgccggccgcggtaacgatcagcgagatcaggccgatgtcggggatgacgtcgaaccgcagcagaaccgtgcgggtcgcggccatcggcaggaagaaggccagatagatcacgatcgagtgctcgccgcagaagcgcaggaagccgagccattgcgcccgcgccagcagcgtgccggtcacgatgatcgcgcaggcgccggcaaagccgagcgccagcgagacgaccggccattcgctgaccccgagcgcaaccaggccgccattgacgagggcccacagcccaagcccgggcagggcgagcgcaggccgtgcccgcgcgcggtccgacagcgcgaacacgtaaccggccagggcatagccggtaaagaaatagacgaagcgggcgcagaactcgtcgatcacggtccagccggtcgtgacatgcgcgctctccagcgctgccgcgatcagccagatgacgagcgggtggacattgcgggtgagcttagcgacgacgaagaagatcggcagcagatagatgaaccacagcgtgccgaacggctcgatgaaggcctcgagatattgcagcccgacctgggcccaaccggtctcggccgccagcgacggcgccttgaagccgaactggatcgtcacccacagcacatagaaataggcgaagtgcatcaccttgcggtcgagataagtgcgccagtcgcggtcgatcaccacagacaggaacagccccgagatcaggaagaagtccggcatccggaacggctttgcgaacatcacgacatagtgcatgaagccggtttgctcggcggccttctcgacccccagcaccgagtgcatcatcacgaccatgatgatgcagatgcccttggcataatcgacccaatcgacacgcgcgctcacgctcccggtggaacgatctgtcgcagcgactgtgccgtttgtagccatccttgtcccgtttcggcgtgatcggcgccatcatcggcccgatcggttgctttctcctttatcaatacaaaggatgtgccagcgaacgtcggccctgtccccggttccctggaccgggcgaatggtctaagaggcttggaaatcccaagagaatccgacgttcgttaaccacaggacgcaagcccggccgagcgccgccgcgatgagactccttgccgcaccaattcgatagcccgctgccgatcgacgccgtgctcgacgagctcgaccgcacgctcgatcgccacaacgccgccgtgctggtcgcgccgcccggcgccggcaagaccacgcgcgtgccgctggcgctgctcgacgcgccttgggccaaaggcaaaaagatcatcgtgctggagccgcgccgcatcgctgcacgcgccagtgccgagcggatggccaagacgcttcgtgagcggcccggagagaccgtcggctatcgggtgcgcttcggctccaaggtgtcgcgggcgacgcggatcgaggtcgtcaccgagggcatcttctcgcggcaaatcctcgacgatcccgagctcgacggcattgccgccgtgctgttcgacgaattccacgagcgttcgctcgatgccgatcttggccttgcgctggcgcgcgacgcgcagaccggcctgcgcgaggacctgcgcatcctcgtgatgtcggcaacgctcgacggcgcgcgggtcgcaaagctgctcggcgatgcgcccgtggtcgagagcgagggccgcgcctttccggtcgagacccgctatgtcggccgcaaggtcgacgcgccggtggagcggcagatggccgagacgatcgcgaccgcactgcgtaccgatgccggctcggtgctcgctttcctgccgggcgcagccgagatccgccgcacccaaaccttcctcgctgagcgcgtgcacgacgcttcagtggagatcgtgccgctgttcggcgcgctcgatgccgccgtgcaggaccgcgccatcgcgccagccccgaagggcattcgcaaggtggtgttggcgacttcgatcgccgagacctcgctgaccatcgagggcgtgcgcatcgtggtcgattccggcctcgcgcgggtgccgcgctacgagcctgacacggcgctgacccggctcgagaccgtgcgggcctcgcgcgccgcggtcgatcagcgccgcggccgcgccggccgtatcgagcccggggtgtgctaccggctctgggacgagccgcagaccgcgtcgctcccggcctacaccgcgcccgagatcctctccgccgatctgtcatcgctggtgctcgacctcgcgcaatggggcgtcagcgatcccgcaggccttgccttcctcgatccgccgccgggaccggcgctgaaggaagcgagatcgctcttgtccgaactcggcgccctcgacgcagacggccgcatcaccgaggaaggcaagagcctgcgcgcgctggcgctgccgccgcggctggcacgcatgatcgtggattccgcccgcttcggcatgagcgaggaggcggccgagatcgccgccgtgctgaccgagcgcgggctcggcggtgacagcgtcgatctcgacgtcaggctcgaccagttccgccgcgaccgctcgccgcgtgcctcgagcgcgcgcagcatggccgcgcgctgggcctcgcaggtgaaggcaaacgaggacgcacttacttctccctccccccttgcgggggagggtcggggagagggggccacacgggcagtttctcccggggccacccccttccccaacccctccccgcaagggggaggggagccctaccgctctcgcgtccctaacgcagacctttcgaccggcgtcatgctggctttcgcgtttccggaccgggtcgcgaagaaccgcggcaatggcagcttcgtgctcgctaacggccgcggcgcggcggtcgagcagaccgcggcgctggcgcggctaccctatatcgcggtcgccgagctgaccggcacggccgcgagcggccgcatcctgctggcggcgccgatcacccaggacgagatcgagcagcgcttcgctgaccagatcgagaatgtggaggaggtgacgttcgaccgcggcgcgatggcactgcgcgcgcgccgccgccgttcgctgcatgcgatcacgttctcggaatcgccgatgccgctcaagccatctgccgagaccgcgcgggagttcgccgacggcctgatcgctgtgggtctcgaccgcctgccgtggtcgaagcaagcgaaacaatggcgcgaccgcgtcatgttcctgcgcaaggccgaggacgacagttggcctgatctgtccgacgccgcgctcgctgcacgcgccgacgcctggttggtacccgcgctctacgacaagaccgcgctgaaggatctgtcggccggtgacctgtcggacgcgctgatggcgctgctgccgtgggatttgcgcgcccggctcgatcgcgaggcgccgacgcatttcgaggcgccgaccggaacgcagcttgcgatcgattacgaggccgagcagggcccgaccattgccgtccggctgcaggaactgttcgggctcaacacccatccttcgatcgccaggggcgcggtgccgctggtgctggaactgctgtcgccggcgcagcggccggtgcaggtgacgcgcgatctgcccggcttctggcgcggcagctatgccgccgtccgttccgacctgcgcggccgctatccgcgccatccttggccggaagatcccgccagcgcgctgccgaccaggcgcgtgaagccgcgcggcacctgagttgccggcggacgtggctcacctctctcaaggggagaggtgaagcgagcgcggccatggatgacgagctgaatgaattcttccgctggcgagcgccagcaaacggtgattagatttgcgggctgggatgggatcacgggctcgcaattggggaggccgtcgtggagatcaagaacgcatcgccgtcgctgtacaacgaagacctggcgccggccagggaacgcaactggggcgccttcagcatcttcaacgtctggacttccgacgtccacagtctgtggggctattatctcgccgccagcctgttcctgctctgcggcagtttcgtcaatttcatcctggcgatcggcatcggctcgctggtgatcttcgtgctgatgagcctggtcggcaatgccggggtgcggaccggcgtgccttatccggtgctggcgcgggcttcgttcggcgtgtggggcgccaacatcccggcgctggtgcgcgccatcgtcgcctgtttctggtacggcgcgcagaccgcggcggcatcaggggcgatcgtcgcgctgctgacgcgcatcgacagcttcaaggcgttccaccagtccagccacatgctcggccattccacgctcgaggtgatctgcttcgtcgtgatctgggcgctgcaactcctgatcatccagcgcggcatggagacggtgcgccgcttccaggactgggccggacctgcggtgtggctgatgatgctgatcctcgcgatctatctctgcatcgcggccggcggcatctcgctcaccgcgccgatcccgcaggacgtgctgctggagaagaccaaggaggccggcgtgcccggcgtgcccggctcattcccggcgctgtgcgccgtcgccgcgacctggatcacctatttcgccgcgctctatctcaacttctgcgacttctcgcgctacgcgcctgacgtcaacgcgctgcgcaagggcaatatctggggcctgccggtcaatctgatcctgttctcgctggtcgccggcgtcaccacgatcgcggcgttcaacgtctaccacgaggtgctgctgcatcccgaccagatctcggcgaagttcgacagctggttcctggcgctgctcgccgcggtcacctttgcggtcgcgacgctcggcatcaacgtggtcgccaatttcgtctcgccggcgttcgatttctccaacgtgttcccgcggcatatcgacttcaagaagggcggctacatcgcggcgctgatcgcgctggcgctgtatccgtttgcgccctgggagggcagcgccgcctcgttcgtcgggctgatcggcgccaccatggggccgatctacgggatcatgatggtcgactattatctgatcgcgaagggccgcgtgaacgtgccggcgctgtaccaggagcacggcgagtatcgcttccagaacggctggaacgtcagcgcactgatcgcagccgcggtcggcgccctgttctcgtcggtgctgccgaacttcacctcgatcctgccggcctggtgggcggtctatggctggttcttcggtgtcgcgatcgccggcgcggtctattacgcgctgcgcgtggcgatgccgagcccggtcgccaggacggcctagaaggctgcttgaagccggcaaatcgggcggccgatgtcattcggccgcctctccgggctcgcattaacccttcgctcatccttttcgtcaaaatggcagcctcgtgctgccgccctcgctcgcggcggggcgggcggcgtggtgaaattgcgtgttcggttttccgagtatggtgtcatgcgtaacctgatgattttcgcggccatcctgatcgggctgggcaccttcatggcccagatggccagcaagatgtcgcccgccgccgcgacgaccgcaaagcagaccatcgctccggccgtcacggtggcgcaggccagcgcccggacgctcagcattacgcccgatccgcgcggtcacttcgcgaccgacggccggatcgacggccagcgcatcaacttcatggtcgacaccggcgcctccgtggtcgccctgaacgagacctcggccgcgcgcttcgggctgcgcccggtgccgggcgactacacctcgcgcgtcaccaccgccaacggcaccatcaaggccgcacgcgcccgcatcgcgatggtcgagatcggcggcatcaccgtgcgcgacgtcgacgccctggtgctgccggatgaggcgctgtcggaaaacctgctcggcctgtccttcctgtcgaagctgaagcgcttcgaatatgccaacggcaaattgttgctggagcagtaaggccgattggcatcaaggccctatccaagtctattgcggagttacctccacgcactgaccagggtctgaaatacagaactcggttttcccggtagtcggatcgattttccaagagcctaacaccggcaatccgccaaaaatgtctgaaatccctccctgtacgttaatgccggtcgttttctccggaaagccgggcctctcggtgcattgaccggttaattgcttagtctcggcgtcgaggactgcggtgcagtgatgaagcctcccgttcttgtggtcgaggcgttcgacggcataatggtttaccccagtctccacagtcgcaaactcagcgaaaatttcgtaatccgcagccagcccaacggtcgccgtcacggttagcgaaagcgcgagtatcccggtcctaagaagcctcataagacctctccatgtcttcccctgcgatgcggatcatgtccccatttcggcagaaactcggatcactgaagcgcttgcgcagagtgtcgagtcggtctccgggcgcacctactgtaagtccctattgtactccctaatttcgtgatcctgatcgtcgacattcggatagcgctctatctgatagcaggaaatcccatcgtccaatttgaatatcgagcgttttacacgcttgtcgtcgtccgtcgattttccaataagaagtatgcccagaccggcatcgtcacccgatagcgccagcccctccaccgcaaaagaaaaaccggacagacacgctttcggcacgtcagtccattgcccattgtgttcgatgcgcatcgagcgttccaggtttgcgccaaacccttcctttcccgggttacgatcgcaaaccgctttgagggaacgaagctcgatctttgcaagatcttgacctttgtaatttttgaaattcaagatcgcaacatccgctgcgcaccagggactggagttcgcgatacataacgttgaactggcaagtagaagcgataaagctccagcgagcgcgactgttttcatcgacaggcctcaatatttgtatcggttccaatccggcatcccgcgccccgttggcttgccgttatgccaatactttttgtacccataccaagatccaacccatgcattgtaatctggaacttgctgagtgtaagcgcgcgcgttggctctatctccatcactttcatcctgactatcccaatgcatgtgccctcttgcgaccgcaccgctatcgccaaaccccacgccaccgcccagcgctccctcttggtacccgcgcgctatctgatcgtagtagtatagtccgttgcgtttgaaggtttcgacgcccagctccgggataaagcccctcctcttggtctcttccgggtaatattgggcaccaaggtctttcatttccttgagggcagcatcccatgcgctctccgcgctttcgaagccgatccccgcattgcggctcggatagtcaccaccttcgtcgccgccgaaacgcttgatgccggcgatgccacccgatccgctggagctgttgccagtcgccggcccgttgacgccgggctgaccggctcctgtcgcaggctgttgcgactgggtttgcggctgtggctgcgttggtcgagtaggtgtcggcggctgttgaatctgcgcctgttgagtcacgccatctgcagcgaacggatcatggtcaacgggaacgagcgagtagtcaacgaaatccggccgatggtccaccggcaccagagagtaattgggcattgatcgtcacctacagatattgcggacagcttcgggcgagcccgtgcgtgaccgcacctcgcggagagggctgggttggctttggatgtttgaaggcaagtgcttgagggcaaagtgcttgaaggatggcttgcgcgatggcgcggaagcgtcacttccggttcggcttgcccatcgtcttcgccgggcgcctgtcggtcggtggggcggccctggctatcagccagatcggctcggtgcggtggcgaatttcggcgcgctcggcagtgtattggccgacagcggcccatccgattcaaaaagcccgcagcggattttccgatgcgggcttaattgccgtgcagcggcgaaaccagttcacgccgtcgccattgcccagattttttcgaactcggcctttgatatcacttccggcacgaactggggatcggcggcgatctcttcaacggacggcaatggcatctgaccaaggcccgtgtccccgacctcaacttcagcatcggcataccagatccttccgtcggaaaagatttcgaccttacgaagctcccaacgttcgtgatccaactcgctgtagatcaggaccggttgatcggggtacgcgtgaatccacttcactttgagataggtcattggtcggacacctttccgctgcggataatcctgttgttcaaatccaacggtccttcgtttgggataacataaacgccggaccggccctcaacgacattcagaccggccgggttgatttcgaggtagtgagtgaattttttcacttggtggggattttgtacgagggccaccgaaagcttttccggctccattgtgccgggctcaatatcggtaagatactgaccgttgccatacttcacatcgcgtggtcttcgggctttcagagaaggatttagctttccttcattcaggatgccgttcagaccagcctcgtcggtgtagtgatataggttacgaagcccagcgcctggaacgtcttcaactgcacccgtcggcggcctcaccctgctcgcaggtgctatcttggcggcaccaaggccaccgaccaggccgccgagaatccggagaggcagctccagcgagcttccctcaccaagttgaccgccagcttcgctccccaagccccccagcgcagccgctccgactttgaacggcaatcctccgggcacgacataggaagcgggattgccgacaaattccccgacagatgcaccgagtttgcccgcccggccttccggcctgtgcatgggtccggttacattcttctcaagaatgtccatcccctgtgctggagtcggcgcgtccacgtcttgccccatttcggcctgcgtggcgcgagccaatgcgctccccgcactattcaggccagaagcgattccgcgagggatggacctgaagaagtcagcggcccccgccgcaatcgagtgtggcggcgcggaccccggcgtttgcggaacggacggcggccgatcgaaacccgcatccgtttgcgcatggcttgccggttgcgtccttgtccgttgaatgatgtcgtccgcggcgaacggatcgtggtcaacgggaacgagcgagtagtcatcgaagtccggctgatggtccaccggcaccagagagtaatcgggcattgatcatgacctacagatattgcggacagcttcgggtgagcccgtgcgcgaccgcacctcgcggagagggctgggttggctttaagtgcctgaaggcaaagtgctcgaaggatggcttgcgcgatggcacggaagtgtcgcttccggttcggcttgcccatcgccttcgccgggcgccggtctgtcggtgggggtggccctggctatttgcgagttcagttcgctgcggtggccaattccggcgcgctcggcagcgtattggccgacagcggcctgtccgattgaaaaagcccgcagcggattttccggtgcgggctcaattgttgcgacgatgaaaatgtatcggtgagttgcccgacgtgtcaattattcgttgcgcagattgcagagcgccgggagcggctgaaatgacaaccgcacggcaatacctgcctgtccatccctagcgccccctagaaacaatgccgggtcggagcgatagcgctcaagcaattcgtggggcgcaacagcgtagcgcaggggcgctttgactccatctcttccatttggccttgctggcaagagattctgtcgcagtcgggattggcccggtgtccaccgaaccgggagcagctcattgccgcaccgagcagcattccaaatcaaataatcgacgttcctcaagcgcctcacccgaaagaatgctccgtatccgggacttgggagaaggaccaatatcatcccgcgcttccagctcgttcagaagcgactgaatgccctcgtcttggtagtttgccaaaaccagcatcgtcgataaacgaggcaccatggcgctcgtgagctcctcgggagatatcaaatcctggtcacgtaatttcatcagtttcctgacgaagaccacatgttgatcaatcgaaagcccatacatcgacagaattgctacgtgtctctggcgttctgagtactttttctccgagagaaatcggatgcagaaatcggggttcctggcgctcgcatcgacaagttgctggaagctatttatgccgagccactcgtagactgaaaccccaacacgctcatggttctggtccgtggcaacaaccttgtccgcgtatccctcataattactcgctgcaccgctgccggatgattcagggggagcgggtcgaggacaggaactgactgcacaccagtcctgtgggtcggaggtcatgagccgatccagcaaagccctatcactcctagcgtcatacgagccgtcggccttacgactagatggttcggcggcagcgatttctggacagcaaccgaagaggcatccgaagcatagcaagagccatattcgagcgcgccgcatgctaaggctcgtaacgacgaataaaccagcagaccaccaggctgatttttacccatcatctttgcagcaacgctctcgatcttttcgctctctccaacaccgaggaagttggcattcggccccacaactgttcaagcgtaagcggctgcgccatcaagacgccttctgatcaccgcgtcgccaaagagaccgcatagaccctcaatatctccgccgccagcgaaacgcatgctgagatcgatcgtatctccgaccagcgcgagcactcccgatcaaaatcccgccatctcttcttcgcaaacccctcaccagaacggatatatctaatttcccacttgatatggtccggaaagtcttgtgccgccaattccttgaaaagtgcctgaattttcggatgatcgtaatgatcacgggcaacaagagaatagcgataatatatcgctcctgctaatgagagttcgggtaacaggccactgcggtacagtttcaccaattttcttataagcacgacatagtcatcgacatcgagttgatacatcgcatagagggcgatgcgcccgccctcccttccttccgttagatagcgaatgcaaaaatcgatgttctctggcgcggcggccacaagctcttcgaacgcgtcgccggacgggggatattggggcggtatgcggtcaacagcatcatctcttgtcgcctgggcgactttctcgacataggcttgatacttgtcttcatcgtgcggcgcgcttgcttcgctcccgttggaggccgcgctggcggcattcagacagagcgcgaacgcgcagccgagcgacagtacacaagacaggatgaaacgtcgcacgttattgcccgacatagcgtcgatacagtatcggacccttggcaggggcgcgtactatcatgtcctttttgggccgctttcaatcttttcgggagccccatcgtagggaggagacccgacgccgatgaacgtgttgttcggccccacgatcacgacatgccccgtcgcgtcgctataatctctcggttgcgccgccacatcgcccggctggggcgactcgtcgggacccaggacgcgccatccgggaattgcatacgatggatctgcccattgtccggcggcgggcggaaaatgcttccaataccaatgcccattcgggagaccgggactcgtcccagcatcggtcagcatctcatgcacgaacaaattgcacttgttctttctttcagcgaaatttccccttgccaccccggtggtccatgcggttgaaccaatttgagcgttagctcgatcgacgattttctgacgtatgaggttgagctgatcatccgtcagggactgcgttggtgccggatttccgccgaaggggctggactcgatcgaccagccttgagcccaagtcgggttgtttggatcgcttcctgcatcgccgacgccggcgacgccacccgatccgctggggttgctgccagtcgccggcccattgacgccgggttgatcggctcctgtcgcagactgttgcaattgggtttgcggctgtggctgcgccggttgagtcggtgtcggcggctgttgaaactgcgccagttgagttacgccatccgcggcgaacggatcgtggtcaacgggaacgagcgagtagtcatcgaagtccggctgatggtccaccggcaccagagagtaattgggcattgatcatcacctacagatattgcggacagctt

SEQ ID NO: 45 - DNA, 56167 bp, Bradyrhizobium enterica
tctggcggatcggcgtcacgttgtcggactcggtctgcaccttgatgcccggcagcagcatcggcaattcgagcggcttcagattggtcgcctgtttgatgatgttgtcgcggctgtagtcgccgttgcagttcttcagcaccgccgtcatgacctgcgcgaccgtgtagccctgcacattgaacagatcgcccgggctcgcattgggctgatacttcttcatccaggccgagaactcctgctgcccggcgtcgtcggcccagcgcggatcggtcgggtccttcaggtagagcccggtcacgacaccgatgacgttctcgagcccggccggctcgagcaccgcggagaccgagttggagactgtcggcaggatggtcagcggcttccagcccatgctcgccgccttgcgcagcgcttgcgcggcgaatttcggcgtcgcctcggcgaagaacacatccgcgccggactcgcgcatcgtcaccatctgggaatcgatggtcggatcggtggtgaggtatgtggtctcggcgacgatctggccgacgtgctcgccgagcccgtccttgaagcccctgagatagtctttaccggcgtcttcgttcggcgtgatgacggcgatcttggcgtccggcttggtcttcaggatgtactttgcatagagccggccttcgagctcgtaggtcggattgaagccgaccgtccacgggaactgcttcggatcgttccagcgcgtcgcgcccgacgacacgaacagctgggggaccttcttgatgttgagatacttctgcaccgagatgttcggcgcggtgccgaccgcgctgaagatcgcgagcacctcgtcctgctcgaccagcttgcgggtctgctcgaccgtcttcgacggcgaatagccgtcgtcgaggctctcgaactcgatcttgcggccgttgatgccgccctgatcgttgagcatctggaagtaggcggcctcggcgcgcgcgatggtgccgtaggccgacgcagggccgctatagggcgcggtatttccaatcttgatcgcggaatcggccgcaatggatgacgagatcgacgcagccatgagcgcggtgacggcgagaagacccgccaggcgggagcgagttgacaagagcgtatccttttcttggttttcttgacgcggcgcaccttatcaatcgcgcccgcgcaggcaatcaccaagacggcagcgaaatttccgcaagccggcaatcacgctcgcgcgcggaacgtgatgcgcttcaaatccgaaaatgttgccgggatgttcatgatgtgggccttcgatagaaatgaaggtccaccgagcgagacgtgcattccacgccgcggtcagctcgcttgtcgctgcatgagcgccatgctcaagccgcgaccgccgctgcgcgcgggctgacgacgtattccttcagcaccttgtcggcaccgtcgacttcggtcagcgcgacgtcgtaggaccacagatcagcgagatgctgcagcacgcggcgcgtgtcggtctcgttgagctgcgcgcccttcacggtggtgtgacgcagcatcaggcgacgatcgccgtcgaggtcgacatcgacgacctcgatattggcgtcgacgaagccgacgtcgtattgccgcgccagttcgcgccgcacccggcggtagccacgctcgtcatgaatcgcatcgaccttgatcccctggctttcggcggggtcgtcgtgcagatggaacatgcggaagcgccggatcagcgccgggctgaggaactggttgatgaaactctcgtcgcggtagttgctccagatctcgcgcagcacgccttcgacgtcgcccttgccggcaatgtcggggaaccagtcgcgatcctcgtcctccggattcttcacgatccgctcgatgtcctgcatcatggcgaaaccgagcgcgtaagggttgaagccggaatagcggcggtcgtcgaactcgggctggaacactacgttggtgtgcgactgcaggaattcgaggaaatttccgtcggtgatccggccctgctgatgcagccggctcatgatgcggtaatggacgtaggtcgcggtgccctcgttcatcaccttggtctggccctgcgggtagaaatactgcgcgatatgacgcacgatgcgaatgagctcgcgctgccagggcgcaagccgcggcgcggtcttctccaggaaatagaggatgttctcctgcggcagaccgagcagcgcgcggcggcgctcggcagtcagcgcagccttgctcttggccttggtgttcggcaccgtccgccacagatcgttgaacacggcctcttcgtgctggcggcgctcgccggcacgcttctcctcggcgcgcaggtcgagcgtcttcttgccgggatagcggtcgacgccatgcgacatcagcgcatgcgcggcatccagcgtccgctccaccgtctcgcggccgtggcggtcctcgcaggcggcgatgtagcccttggcgaattcgagatagtcgaggatgccgtcggcgtcggtccactgcttgaacagatagttgttcttgaagaagtgattgtgcccgaacgccgcatgcgcgatcaccagcgtctgcatcgtcgcggtgttctcctccatcagataggagatgcacggcgaggaattgatcacgatctcataggcgaggcccatcaggcccttgcgataggacgcttcctggaatgcgaactgcttgccgaacgaccagtgcttgtagaacagcggcatgccgaccgaggaataggcgtcgagcatctgctcggcggtgatcacctcgatctggttgggatagacgtcgagcccgagctccttgcgcgcgacctcctcgcaggcgtcgtgaatccgctgcagcgtctggaaatcccagtcggcgccctcgaacagccgttcgccggaagatcccatcaactataccctttcctggctggtggtacggcgcttgaacaggtcctggaacaccgggaagatctcgccgcgttcgctcaccttgcgcatcgacaacggcgcgccgtcgttgcgaagacgctcatagagcgtccagagcgaggagtccggcatgtcgaaggtgtagttggcggcctcgccgacctcgagataggcgaagaactggcacaccggcaggatcttgtcggtcaagagatgcccggtcagcccgctgtcggaggtcatgttgtcgccgtccgaagcctgggccgcgtagatgttccagtcggcggggcggaagcgggtgcgcacgatgtcgttcatcgcaaccagcgcgctcgacaccagcgtgccgccggacgccggtccatggaagaacgtatcctcgtccacctcctcggcgcggtcggtgtgccggacgaacacgatctcgacgtgcttgtagcgccgcttcaggaagacgtagagcagcatgtagaaccgcttcgcgagatccttcatgtgctcggacatcgagcccgagacgtccatcaggcagaacatcacggcctgcgccaccggcttcggcaccgtctcgaagcgccggtagcgaatgtcgatcggatcgatgaacgggatccgcttggccttggccttcagcgcttcgagcagcgcaagcagctcgcggcggcgcgtatcgtcttcgcacgcggcaagctcggcctcgagcgcctcgatctcgtccttgcgcggccggcgcagcgccacgcggcgcgccagcgcccggctcaccgtgcgactgatcgagatgttggcgggcgagcccgaggtcgcatagccggcgcgctggatgccctcgctctcggtttccgcgagcttgcgcttggcgagatcgggcagctcgagatcgtcgaggaagaggtcgacgaactcctcgcggctcagcacgaagcggaaggcgtcttcgctgtcgccctcgccggcgccggagcccttggcgccgctctggttcgggcgctgcagccagtcgccctcgacgaacttcttgttgccgggcagcaccatgtcacgcgtgccgccctcgcgccggaaccgcggctcgtccatgccgtccagcgggatggtcacctcgccgccctccaggacatccttgatgtcccggtcctgtgacgacttcttgacggctccctgcaccagcgccttggcgcgccgcaggaaccgctgacggttctccaggctcttgctacccggattcaaccgccgatcgacgatgtgcatgaccactttgcatctgcctcgcgccggatgcgatcatcacagtcgcatcgcattcttattggacggaaccggacgagacggaaagccgctgccggctttccggatcgtacactggattcttgctcgagcatgatctcttcggatcatgctctagccggcctgcttcacccgcatgtaccactcgacgagccggcggacctggcgctcggtataaccgcgctccaccatccgctcgacgaactcgccgtgcttcttctcggtctcgccgtccttcttggagccgaacgagatcaccggaagcagatcctcgacctgcgagaatatccgcttctcgatcacgtcgcgaaccttttcgtaggaggtccagctcgggttcttgccgccattgtgcgcccgcgaacgcagcgagaacttgacgacctcgttgcggaagtccttcgggttggcgatgccggccggcttctcgatcttggtcagctcctgattcagaagctcgcggttcatcagctggccggtgtcgggatccttgaagtcctgatcctcgatccaggcgtcggcgtagtcgacgtagcggtcgaacaggttctggccgtagtcggcataggattccagataggccttctggatctcgttgccgatgaactcggcatagcgcggcgcaaggtcggccttgatgaattcgagatagcgcttctcggtctcgtcaggcagctgctcgcggcggatcgccatctccagcacatacatcaggtgcaccgcgtcggcgccgacctccgtggtgtcgtggttgaaggtcgaggccagcaccttgaaggcgaagcgggtggagacgccgtccatgccctcgtcgacgccggcggcgtccttgtactcctgcacgctgcgcgccttcggatcggactccttcaggctctcgccgtcatacacccgcatcttgccgaacagcgtcgagttctcgtgcttgcgcagccgcgacatcaccgagaagcgggccagcgtttccagcgtcgccggcgcgcagggcgctgcggcgagctcggagccctggatcagcttctcgtagatcttctgctcctcggtgacccgcaggcagtacgggaccttgatgacgcagatgcggtcgatgaaggcctcgttgttcttgttggtcttgaagctctgccactcggcttcgttggagtgcgcgaggatgatgccggtgaacgggatcgcaccgatgttttcggtgccgatgtagttgccctcctgcgtcgcggtcagcagcgggtgcagcatcttgatcggcgccttgaacatttcgacgaactcgagcacgccctggttggcgcggttaaggccgccggaatagctgtaggcgtccggatcgttctgggcgtaggtctcgagcttgcggatgtcgaccttgccgaccagcgaggagatgtcctggttgttctcgtcgccgggctcggtcttggcgaccgcgatctggcgcagccgcgagggctggatgcgcgcgacgcggaactgcgagatgtcgccgccgaaggcctcgagccgcttgtaggcccagggtgacatcagcccgctcagccggcggcgcggaatgccgtacttctcctcgatcatcggaccgagctgctcggggtcgaacagcccgagcgggctctcgaacaccggcgacaattcgtcacccgccttcagcacgtagatcggatggatttccatcagcgccttgatgcgctcggcgagcgaggacttgccgccgccgaccggtccgagcagatagaggatctgcttgcgctcttcgaggccctgcgcggcgtggcggaagaagccgacgaggcgctcgatcgtgtcctccatgccgtagaagccggcgaaggccggatacgaccggatcgtacggttcaaaaagatacggccaaggcgtgggtccttggccgtgtcgatcatctggggctcaccgattgccgctaataaccgctcggccgcattggcgtatcgcatcggatcacttcgacacgactccagatactcggccatcgacatgtcggtctggcttcgcgcttcaaacgaccttgcgaaggcgttgaacaaagaatcgttgtacatgatccctatctccacgatatgtatcgccgcacgactgacacgagtcgtaaccagagcgtcctaggatcgaatcagcgtcggcacgctgggtccattggacactcgaccgactcacttcggcaatgcacggcgcatgcagcctctgccttatcaacaggcaggaagcttaatggttcatcaatatcccctgttggtggcctgtttttggcggttgtagccccttcgccacatccgtggtttaccggggctagagcctccaacagcgcctccgaagcggacatccgagcggggcaacttccccgtccgaagatgaacgttgggcttccctgaagaggtgtgattgtccagccttggcgtcaagatgggcacttcacggggccgcataaacaaaggtttatgtgccgttgaacgtgcctccttgtcgccgcgactaaggcaacgagcccgcgcagttccgcgcggcaccattgccgcgctgtaaagatgacaccttggaggcgcgggctattcccgaggcggccatgaagcagacgctcctcgttgtcgcacttgccgtcgcagccggtgccggcgccacgtcggccgtccaggcgcaggaagaggtcgacaaggccaccgcagccgccttcgacaacagaatgtttgcaggcccgctaggggcgaaagcctatgcctgctttgtgcgtcgctacgatgcaaatcatctggcgcagcatccgaagcagaaggtcagcgccatgaagctgctggtctcggcggaagacgcaccggaggacaagaccaccaactactcgttccgcctcggcgtcgcctaccgccaccgctcgggcaatttcgactccagcggctattgccaccacgcgctcgcgaccgaatccggacacgaaatccgcttcgaatgcagcgtcgattgtgaaggcggcggcatcagcgtggcgctgtcgaaggacgataaatccgcgatcgcgcgcctcgccagcatcaggatgtggaatcgcaacaagcccgacgatgacgcgagcgaagagctgctcgccggcgccgacgacaggatctttcggatcgatcgcgcggacttgcgcgaatgcgccgaacttgtgactgaccgcaaggaactcgctgcgctccgccacaagtgataggattgctcgtcaacaacaattgcgcgagggacgccatgcaccgacgcagcatcctgtggggcacgctctcggcaatcggcgccgctttcgccgcgtcacgcgccaacgccacggccgaagcgccgcagcagaagctgaaggtggcctatcacctcgacgacctcgacaaggtcggtttcgtgatcggcaacatccagaaccatctcgacggcgtcggcggccccggcaatgtcacgatcgcgctggtggtgcacggccaggcgctgaaggcgtttcattcggcagcggccaatcccgacctgtcaaagcatgtcgggcagttcaccagggacgggatcgagcttgccgcctgcggcaacaccatgaaatcgcagaacatcggcctgaaggacctgctgcccggcttcgtcgccgccgagcgcggcggcgtcgttcggctcgccgagctgcaatcccagggttacctctacctgcggccctgacctgaggcgtgcgccgcaacgcgtcataaaaatgtgccgagatcagggtctgctcgggaccgcgtccgaggggatcgaactgttgtgaatggcgttatcccttgggaatgctgatattccgcccgggccccacctgatgttgacaatcctccgctgtccccgaaagctgcccgggaacccaaaaaccgaccctcgatcgaacgagaacaggcacccatgaaccccgtcaaagaactcgaaaatcaccgccaggccgtctggctggacttcctcgcccgcggcttcgtcgccaagggggatctgaagcggctgatcgagaccgacggcgtcaagggggtgacctccaacccctcgatcttcgagaaggcgatcggctcttcggacgagtatgacggggcgatcggccaggcgctcaagaagggcgaccgctcggtcgccgacctgttcgagcaccttgctgtcgtggatatccagcatgccgccgatgtgctgcgcccggtctacgaccacagccacggcggcgacggcttcgtcagcctcgaagtgtcgccctatctggcgatggacaccaagggcacgatcgtggaggccgagcggctctggaaggacgtccatcgcaagaacctgatggtcaaggtgccggcgacgccggaaggcctgccggcgatcgagtatctgatcggcgaaggcatcagcatcaacatcacgctgctgttctcccaggaggtctaccgccaggttgccgaggcctatctcaagggcctggagaagtacgtcgccaagggcggcgacccctcccatgtcgcgagcgtcgccagcttcttcgtcagccgcatcgactctgccgtcgacaagcagctcgacgagaagatcgcgcgcgccaacgatcccttagaaaaggagcggcttgccgcgctgaagggcaaggtcgcgatcgcgaacgcaaagctcgcctaccaggactacaagcgcctgttctcgggcgcgcgctgggataagctcgcgaagaagggcgccaagccgcagcggctgctgtgggcgtccaccggcaccaagaacaaggactacagcgacgtgctctatgtcgaggagctgatcggccccgacaccgtcaacaccgtgccgccggccacgctcgacgccttccgcgatcacggcaaggtccgcgacagcctggaggagaatgtcgaggcggcccgccgcgtgctggaggagctggagcggtccggcatctcgctcgatgcgatcaccgaggagctggtcaaggacggcgtcaagctgttcgccgacgcggctgacaagctgtacggcgcggttgcccacaagcgcgccacctcgctcggcggcggcatcgaccaccagaagctggcgctcggcgccggcatcgcgaaggcggtcgagaagagcgccgaggaatggcgcgcctcggccaagattcgcaggctctggcacaaggacaagtcggtctggaccggcgatgacgaggacaaatggctgggctggctgaccagcgccgcaaccgccgatgtcaccgactacgaggatttcgccaagcgcgtgaaaggccagagcttcaccgacgccgtcgtgctcggcatgggcggatcgagcctcgggccggaggtgctggcgcagaccttcccgcacaaatccggcttcccgcggctgcacgtgctcgattcgactgatccggcgcaggtgcgcgcgatggaggagtatgtcgacatcgccaagacgctgttcatcgtgtcctccaaatccggcggcaccaccgagccgaacgtgatgaaggactatttcttcgaccgggtcgccaaggcgatcggcaaggacaaggccggccaccgcttcatcgcggtgaccgatccgggctcctcgctgcagaaggtcgcgatcaagcagggctttgcccggatcttctacggggacccggcgatcggcggccgctattccgtgctgtcgccgttcggcctggtgccggcggccgcagcgggcatcgacgtccgcagcctgctcggccacaccctcgccatggtgcgctcctgcggcgccgacgtgccgccgcaggaaaatccgggcgtccagcttggattggcgatgggcatcgccggcctcgaaggccgcgacaaggtgacgctgttcgcctcacccgacgtcgccgatttcggcgcctgggccgagcagctgatcgcggaatccaccggcaaggacggcaagggcctggtcccgatcgagggcgaaaccatcggcgacgccgcggtctacggcaacgaccgcttcttcatcgacctccgcaccgaacgcgagcacgatgccgcgcatgaggcaaaactagcggcgctcgaggccgccggccatccggtggtccggatcgtgatgaaatcgatcgaccatatcggccaggagttcttccgcttcgagatcgcaactgcggtggccggctcgatcctcggcatcaacccgttcaaccagcccgacgtcgaggccgccaagatcaagacgcgcgagctgaccgcggcgttcgagaagaccggcgcgctgccggccgagcagccggtggtgtcggccgatggggtcgagctctacaccgacgcgcagaacgccgaggagctgcgcaaggcgggcgccaacggcgatctcaattcgtggatcaaggcccacctgtcgcgctccggccgcggcgactatgtcgccctgctcgcctatatcgagcgcgacggcgacaccatcgacgcgatgcaggcgatgcggctgaagctgcgtgatgcaaagcaccttgcgacctgcgccgagttcggcccgcgcttcctgcattcgaccgggcaggcctacaagggcggccccgacagcggcgtgttcctgcaggtcacgaccgacgatagccaggacctggcggtgcccggccagaaggcgagcttcggcgtcatcaaggcggcgcaggcgcgcggcgatttcgacgtgctcaccgagcgcggccggcgggcgctgcgcgtgcatctcaagggcgacctcaactccgggcttgcggcactcgacgccgcgatctcggccgcactgaactgacggaggcgcgcgatgcaactcggcatgatcggcctcgggcggatgggcggcaacatcgtccgccgcctgatgagcaacggccacaccaccgtggtctacgacaaggaccccaaggcagtcgccgcgctggtcgcggacaatgccaccggcgcctcttcgcttgaggatttcgtcctcaagctggaagcgccgcgcaccgcctgggtgatgctgccggccggcaagattaccgaagccaccatcgaggcgctgtcgaagctgatgcagcccggcgacgtcatcatcgacggcggcaacaccttctggcaggacgacgtccgccgcggcaaggcgctcagggagcgcggactgcattacgtcgatgtcggcaccagcggcggcatctggggcatcgagcgcggctactgcatgatgatcggcggcgacaagcccgtggtcgaccggctcgacccgatcttcaagacgctggcgcccggcatcggcgacatcccgcgcacccagggacgcgagggccgcgacccgcgcatcgagcagggctatatccacgccggtcccgtcggcgccgggcatttcgtcaagatgatccacaacggcatcgaatacggcctgatgcaggcctatgccgaaggcttcgacatcctgaagaacgccaacatcgaggcattgccggcggagcatcgcttcgatctcgacatcgccgacatcgccgaagtctggcggcgcggcagcgtgatcccgtcctggctgctcgacctcaccgcctcggcgctggcgcagaaccacacgctcgacaactactccggctttgtcgaggattccggcgaaggccgctggaccgtcaatgccgcggtcgacgaggcggtgccggccgaggtgctgacggccgcgctctacacccgcttccgctcgcgcaaggatcataccttcgcggagaagatcctctcggcgatgcgcgcaggttttggcggccacaaggagccgccgaagaaggcttaaaggcgttttcgagcggggcctgtcccgcacttgatgcgggatggacaccggttcgcgtgaagaaagcgcgtcaaaacgaaatctggagtccacgtttcgatgcaatcggaacgggggctcgagacgattaccacggaaggtcacgtgcagaagaaacccgatccttgctccttcatcatcttcggcgccaccggtgatctgacccatcgcctggtcgtcccggcgctctacaatctcgccgccggcaacctgctgccggacaaattctgcgtcgtcggcatcgtccgcaagggcatgtcgagcgagcagctcagcgacagcctgatgcaggggctgcgcaagttcgccacccgcccggtagacgaggcgatcgcgaagcggctgtttgaatgcgtcacctcggtcgaggccgatccacgcgatcccgcgtcgttcgacgcgatgaacgaacggctcgacaagctggaaaaggcgcgcggcaccggcggcaaccggctgttctatcttgcgaccccgccgagcgccttcctgccgatcagcgagcaactcggtcgcaccggcatgctggaggaaaacggcgcctggcggcggttgatcatcgaaaagccgttcgggaccgacctggcatcggcccgggcgttgaatgccgcgctgctgaagctgatggacgagcaccagatctaccggatcgaccattacctcggcaaggaaaccgtccagaacatcctggtgctgcgtttcgccaacggcatgttcgagccgatctggaatcgcaaccacatcgaccacatccagatcacggtggacgagaagctcggcgtcggccatcgcggcagcttctatgacgcaaccggcgcgttgcgcgacatggtgccgaaccatctgttccagctgctgtcgctggtggcgatggagccgccggcgcgcttcgacgcccacgcggtgcgctcggaaaaggctgaggtgctgagcgcgatccagatccagagcgagcaggaagcgctgtccaactcggtgcgcggccagtatcgcaccggccgggtcggcgacaccgagatcgaggactatctcaagacaccggatgtcaagccgaacagctcgaccgaaacctatgccgcgctgaagctgaccatcgacaattggcgctgggccggcgtgccgttctatctgcgtaccggcaaggcgctgaccgccaagcgcaccgagatcgcgatcaagttcaagcaggcgccgttcgcgatgttccgcgacaccgcggtcgaccgcctgtcgcagaattacctggtcatctcgaccgagccgaccgaaggcatcgagctgcagttcaacaccaaggtgcctggcccggccatcaacatcgacggcgtcgagatgaagttccgctacaaggactacttcaaggccgagccgtcgaccggttacgagacgctgatctatgactgcatgatcggcgacaatttgctgttccagcgcgccgacagtgtcgaggccggatggcaggcggtgcagcccttcatcgacgcctggagaacggccggcgggcgcggcctgcaaccctacaaggccggcagcgagggcccggaggccgccaacgcgctgctgacgcgcgacggccgcagctggcggaagctgggctgagcatgaccacgagcggcgagcgcaagatcatcacggtcgccgatccggcggcgctggcgaagacggccgccgaacgggtgatcgcgcggatcgccgggaatcccggctggatcgcggtctgcctcaccggcggctccagtccgaaggcgctctaccagctgctggcgacgccggactatcgcgagctgatcccgtgggaccgtatccactggttcatcggcgacgagcgcctggtgccgcgcaaggacaagctgcacaacatgagcatggcgcgccaggccttcctcgaccgctgcgccccggctgcgaatgtccacccgatcgcaaccgacaccgccgacctcagggatcccgacgtcagcgcggcgctgtacgagaacgagctgatggcgttctacggcgccgagcagctcgacccgcagcggccgctgttcgacctggtgctgatgggcatcgggcctgacggtcacaccgcctcgctgtttcccggctatcccgcggtcgaagaaacccgacgctgggtggtcggagtgcccaaggccaatgtcgagccgttcgtgccgcgcgtctccttgacgctgcctgccctcgcctcctgccgcgagatgctgttcgaggtggccggtgaaaacaagcgtgcgatcttgacgcgcctgttcgcaggcgagaacctgccggcaaaccgcgcacgatcgctgggcgaaaccgtctggctgatcgatcaggcggcgctgccggagaattttcctggatgactttgctgggtgaccaccttgggtgacaggcaaaatccctgcgcgctggtcgtcatgggtgtctccggctcaggcaagagcaccatcgccgaccgcctcgcgatccggatcggctggcgctatgaggacggcgacggcttccatccgccgagcaatgtcgcaaagatgcattccggccagccgctcaccgacgaggatcgctggccctggctgcgcgcgatcgccgccgagatcgatcgcacctgtagcgtccgcgaacgcgccgtgatcgcctgctcggcgctgaagcgcagctatcgcgacatcctggtgcatggccgcgacgacgtccgcatcatcttcctcgacggcacccaggagctgatcgcgacgcggctggccgcgcgcaaggatcatttcatgccgcccggacttcttgcgagccagttcaagacactggagccgccgacgccggacgaacgcccgatcattgttgcgatcgaccgttcggtcgacaccatcatcgaagacatcgtcaatcaattgaagctggaccgcccatgaatcgtatcgcccttgtcgtatccgatgtcgacggcacattgctcaccaaggacaagaccctgaccgacggcgccctgacggcggtgcgcaagctccacgaggccggcatcggcttcaccatcgtctccagccggccgacgatcgggatgggcttcctggtcgcgccgctcgcgatcacgctgccgatcggcgccttcaacggttcatcgatcgtcgatccgcaattgaagccactcgaacagcatctgatccccgccgcgacagccaagcgctgcatcgacctgctccgcgagcgtggcatcgacatctggctgttcaccaacgaccgctggctgacccgcaatcccaacggcgaatacaacgcgcatgaaaagcgcgcgatcaagcacgatccgaccatcgtcgatgacttcgcgccttatctcgaccaggcctgcaagatcgtcggtgccagctcggatgcgccgctgctgcaacgctgcgaagccgacatgcagcagatggtcggccatgatgcgaccgcggtgcgctcgcagacctactatctcgacgtcaccccgcccggccatgacaagggcaccttcgtcgaaggcatcgccaagcgcctcggcgtgccgctggagaatgtcgccacgatcggcgacatgcagaacgacctgccgatgttcgcaagaagcggcgtctcctttgcgatgggcaatgccagcgacgacgtcaaggcacacgccacgcatgtcaccgagaccaacgagcacgacggcttcgcgcgcgcgatggatgtcgtgctgacgaccggccgttaaggcgcgagagggagaatcaggtcgaccgctgcaccgcgggcttcccggcaccggcgctggcggcgctgagattgtgcgcggtgttgatcagcgcgatatgggtcagcgcctgcgggaagttgccggtctgccggccggctcgagagtcgaactcctccgccaggaggccgagatcgttggcaaccgccaccacgcgatcgaacatggcctgcgccttgtcgacatctccggcgagcacatgggagtcggcgagccacaggctgcaggccaggaacgcaccctcgatcggctggatctcatcggacacctcgcgcggatcgtgccgcagcacaaagccgtcgcgcatcatgtgccgctcgaccgccgcgatggtgccgcggatgcgcggatcgtccggcggcaggaagccgaccgacggcagcagcagcaggctggcgtcgagcagctttgagccatagctttcgacgaagctgttgagatcgggatcgaagccgcgtcggcaaacgtcgcgatggatcgcctcgcgcagcacccgccatttcaccagcggcgccttgaagccgaaccgctcggcactcttgatggcgcggtcgaaggcaacccagcacatcaccttggagaacacgtagtgccggggcgcgccgcgacgctcccagatgccgtggtcgggctggtcccagacctcggcgaggtgagcgacgacggtgcattccagcgaccagctctcctcgtcgagcttgagcttggccatgcgggattgatggaaggcgtcgatcagttcgccgtagacgtcgagctgaagctgcgcatgcgcggcgttaccgacacggaccggctgcgccccttcatagccgggcagccatccggcctcccattccagcaggcggcgctgaccgaggatgccgtacatgatctgcatgttggccggcgcgccggcggcggcccgcagcagccaattgtgccaggccgccgcttcctcggtgtagcccgaattcatcagcgccagcagcgtgaaggtggcgtcgcgcagccagcagaaccggtagtcccagttgcgcgcgccgccgagcttctccggtaatgacgtggtcggcgcggcgacgatgccgccggtcggcctgaaggtcagcgccttcagcgtgatcagcgagcgcatcacgaggccgcgcagatctccgccgtcataggtcgagcggctgcaccattctcgccaatagtcttcggtgtccttcagcgcagcctcgggatcgatcggttccggcaccggctgaaaggacgctccgtaggtcaggacgaacggcacggtgtcgccctcgccgacttcgaaatcggcgatcgtggtcaggtccttgccgcgggtctcgaccggcgtgcgcagcacggtcatgtcctgcccgctgatcgccagcagcccgccgccgtccgggttcttcttcacccagggaacatcgaccccgaagccgaagcggatcacgagctccatgtgcatcttgacgcggccgctgatgccgcgaactaggcggaccacgtcggaggcatggccgcgcggcggcatgaagtcgatcagttcaaccacgccgccgttggtctcgaaccgcgtctccaggatcagcgtatcgtctcgatagcggcgcgaggtccgcttgatcgtctcggctggcgccagcagccagcggccattgcgcgaggtgccgagcagcgccgcgaagcaggcatcggaatcgaacgccggccagcacagccagtcaatcgagccgtcgcggccgaccagcgccgcggtctcgcaatcaccgatcagtccgtagtcttcgatccgggaagccacgcgccgtgctccgcgttgtcaggcatgcgaccgctcgcgggttgcgcgcttgagcgcgtcgatatcgatcgccgacgcgagatgctcgatcgagaccggcagccgctgcttccagttcggatgctcgtagacggtgccggggatgttcggttgctcgacgatgccgagcaggtcctccatcgagaccgccaatatccgcgatcgcgtccgcgccatgaagcccaccaccgagtagaaatcgttgtggtggatgtcgagccggcgcagcacgtcgtcgagacggccgagcgcgtcccagcgcccctggtcggtctcgccgggatcgatcccgagcgcgcgcttggttttgagatcgctgaacgagcgccagccggcataggtcgagaggtcgtgggtgttgaaggtgaccagcgcgtccggcagataatagtcggcgttgcggaacacgccctggtcgtcggtctcgaacatcatcaccaaataggaccagatgccccagccgttcatctgttcgcggaatcccggcggcacggtgccgagatcctcaccgatcacgacacaacggctggctgcgctctcctgcgcggtcgccgccaagagcgcctcgaacggcatcagcacataggcgccgttggccgggccgaagccgcgcggcacgagataaagccgcttcagcccgaaggcgtggtcgagccggattgcgccggcgtggtgcatggaggcgcgcagcatctgccggaacggttcgaacgaccgctgttcgagacccgcggcattgaagccggcgagtccccagtcctggccggcggtgttgagcgggtccggcggcgcgccgacgccaagatggcgcgagatcgcggtctgctcattccaggcatcgaacccatccgactgcacgccgaccgcgacgtcgagatagagcccgacccgcatcccgagcttgtgcgcgagtccctggcaggcgccgagctggcggtcggcggtccattgcacgaattcgacgaactcgacctcggcggcggtgtcgcgcgcccagcgcaatttcgtgcacgccgcatcgtcgggctgccgccagtcgtccggccactcccaccacggcgtgttgaacttgtgccgcaccacctcgaaacaagcgaagcgcgacagcagcgtgccctgctccttgcggtaggcctcgaaatcctgccagcgcccgaggccgggattggccttgaaggccgcgaaggccgcgcgcagcgccggccatttcagcgccgcgacgccgacatagtcgaccatgtcgcggctgcgcagctgcgccagcgcggcctgcgtcgccgcatcgacgcgatattcgggaatcttctcgacgtcgatatagagcgcgttgaggaacagccggctgttcggcgaatacgggctgcaatcgcccggccggtcgtcgaacaacgcatgcaacggattgagcccgatgccatcggcaccgagccgatgcgcgaatgcgagcaggccctccagatctgtgaagtcgccgatgccccagttgcgcgcggaccgcacgccgtagagctggaccgcgatcacccagcagcgatcgaacgcgccgccgaacgcacggtccggcgccaccagcaacggcagctcctcactgccggatgcatccttgagctgcaagcgatgcacgccctcgggcaggccggccggccacgtcacgctccgctcacgtgcctcgccttgcgcgagcaccgcgctgccgctggagagcttccattgcaccggcagccgggccgcctcggagagctgcgtctgaccgccatggccgcctcggacgaccacggggtcgatgacgatccgccgcggcgtgtggggcggcagcgcggcaaggatcgctgtcagcgcctccggggttgtcacacggcggtgaccgctcccatcgatatactcggtctggattcccaggctctgggctttggcgtaaaggtccattcggcacgctgcttgctcgcaacggtatcgggatcgttgctaaattgtactgatacgggaaaggaatagttgatgttcaacgctctaccctatcaagcgttcccgccgggaaccattgtccggcgagcggctttctatctgggtctggcgcgcctccttcccggcgtcgagacgtcatttgcattctcaatggcggcatcaccgtgaacaaaaccctccggcctgtcgagagtgcccatggcacttttcatgtcaccgatgtctatccgtcggtcgatggcggccgcttcccggtcaagcgtatcgccggcgagccggtcgaggtgtgggccgacatctaccgggacggacatgatgtaatatcggcggcattggtgtggcgacgcgaaggcgacgacgcatggcagtccgctccgatgacgccgcacagcgacgaccgctggggcggcgccttcgtgcccgagcggccgggacgctacacattcgcgatcgaggcttggaccgaccaattcgccagctggcggcaccgctttgtgcagaagcagcgcgacggcagcgaccacacgctggacgcgctcgagggcgccggcatgctgacccaggcgcaggcaggcggacctgccgcggctgccgtgatcatcaaacaatgtgaaatctttctgcagaccggcgagccgggcgccctgcttgcgcccgaattgcaggcggcgatggccggcagccagtttcgccgcgacctgatgcgatcgcagccctatcccctcaccgccgaccgtccgcgggcacgcagcggcgcgtggtaccagatgtttccgcgtagccaaggccggacgtcaggcgtgcacgcgactttcaacgattgcatcgcgcggctgcccgatatcgccgcgatgggctttgacgtcgtgctgctggcaccgatccacccgatcggacagacgcatcgcaggggccgcaacaacgctgcaatcgcgcaggctggcgatcccggcagtccttatgccatcggttcgaccgaaggcggccacgacgcggtgcaccccgagctcggcacgctcgacgacttccgcgcgttcgttgtggcatgcaaggcgcacggcctcgaggtcgcgctcgatttcgccgtgcaatgctcgcccgatcatccctggctgaccgagcatccggaatggttcaagcggcgtccggacggatcgatgcgcgcggccgaacaccccccgcagcgctgggacgacgtggtcactccggatttcgggtccgaggatgccggcgcgttgtggcatgcgctgcgcgatgtcgtgctgttctgggtcgagcagggcgtgaaaatcttccgggtcgacaatccgcacaccaagccgctggcattctgggaatggctgatccgcgaggtgcaggatcgcgatgccgacgtgctgttcctgtcggaagccttcgcacggccgaaactgatgaaaggcctcgccaagctcggcttctcgcagtcctatacttacttcacctggcgcacgcagcgcgccgagctcgagcagtatctcggcgagttgacctcgtatcccgagcgtgacttctttcggccgaatttcttcgccaacacaccggacatcctgcccttccacctgcaaagcggcgaatcctggatgttcaagtcgcgtctcgcgctggccgcgacgctctcaagcagctacggcatgtacagcggcttcgagttgctcgagcacgcgccggtgcccggccgcgaggagtatctcaactccgagaagtacgagatcaaggtgcgcgactgggacaagccggggaacatcaagctctacattgcaaccctcaaccagatcaggcgcaacaatccggccctgcaacaattcgccaatctgcgctttatcaatgtcggtgacggcggcgtgatcggcttcgtcaaggaggcggccgatcagggcaatgtgatcgcggccgcgattgcactgtcgtcagaaccgcgcgaggtctggcttccgctcggcgacgtcatgctcggccgcggcgatgaccgccgccccgccacggacgtggaagaccttgtcaccggcgagcgtcatgcgctcgaatggggaggcatccgcctgcgtctcgatcctgcgcgcgatcccgcgttgctgttgcgctgtgtcgcctgaaggagccgtcatgaacgtattctcctccgtcaacgccgaggcgaaggtcgcgaccgagaccgcggaccagctgtggtacaaggacgcgatcatctaccagctgcacgtcaaggcgttcgccgacagcaacaatgacggcatcggcgacttcaccgggctgacggagaagctcggctatttgcaggagctcggtgtcaccgcgctgtggctgctgccgttctatccctcgcccggccgcgacgacggctacgacatcggcgattacggcgacatcaatcccgatttcgggaccatgaaggacttcaagcgcttcatccaggaagccaagaagcgcggcctgcgcgtcatcaccgagctcgtcatcaaccacacctcggaccagcatgcctggttcaagcgcgcgcgccgcagcccgccgaattcgagcgcgcgcagctggtacgtctggagcgataccgaccagaagtacctcgatacacgtatcatcttcaccgataccgagaagtcgaattggacctgggatccggaggccggccagttctactggcaccgcttcttctcgcaccagccggacctcaatttcgacaatccgcgcgtggtgcgggccatcgtgcaggtgatgaagcgctggctcgacaccggcgtcgacggcttccggctcgacgccattccctatctgtgcgagcgcgacggcaccaacaacgagaacctgccggagacgcatgccatcatcaagcggctgcgccaggaactcgatgcctatgccaagggcaagatcctgctggccgaggccaatcaatggccggaggacgtgcaggaatatttcggccatggcgacgaatgccacatggcctatcactttccgctgatgccgcgcatctacatggcgatcgcgcaggaagaccgctttccgatcaccgacatcttgaggcagacgcccgacatcccggcggcgtgccaatgggcgctgttcctgcgcaatcacgacgagctgaccctggaaatggtcaccgacgtcgagcgcgactatctatggtcgacctacgccaacgatccacgcgcccgcatcaatgtcggcatccgccgccgtcttgcgccgctgatggacaatgaccggcgcaagatcgagctgatgaattcgctcttgctgtcgttccccggcacgccgatcatctattacggcgacgagatcggcatgggcgacaacatctatctcggcgaccgcaacggcgtgcggacgccgatgcaatggtcgccggaccgcaatggcggcttctcgcgcgccgatccggcgcggctctacgcgccgatgatcatggacccggtctacggctacgaatccgtcaatgtcgaggcgcagtcgcgcagcctgtcgtcgctgctgtcggcgaccaagaggctgatcgcggtgcgcaagtcgacgctggccttcgggcgcggcaccatgaccttcatccgcccggaaaaccgctcggtgctcgcctatgtcaggcagtatcagggcgaggtcatcctctgcgtcgccaatttgtcgcgctcggcgcaggcgaccgagctcgacctctccgccttcaaggaccgcatcccgctcgaaatgctcgggcgcacgcgcttccccgcgatcggcgagctgccctatatgatcacgctggcgccctacggcttctactggttccagttgcaggagcgcgacaagtccgagccggtgacgccgcgcgcggtgccggaattcgagaccctggtggtgccgctgaattcgacctggacgtcgctggcgcgggagcgcggcgtgttcgagcacgacgtgctgcccggccatctggcccggatgcgctggtacccggagcattccgccaaggcgatccagccgacgctggtggcggcgatcccgttctgcgacgtcggcgacaaccggccctggctgatcttcttcgaaaccaccgaacgcggcaccaccagccgctacgtgctgccgatgcagattgaatgggtgcggttcgaccgcgaacgctacaacccgcgcgctttcgccgccgtgcgccagggcgcgcgcgagggcacgctgctcgacgtcgccaccgaccagatcttcaccggcctgttcctgcgcaatttgcgcgaaaacctcacggtcgatgaaggcgagcagggcctgaagctcgaattccggccgaccagccgcttctccgaccggccggtacggcagcccgagcgcatccgcgtgttcgagaacgatcagccgcattcgaccgcgctggtcgacaatgaatatgtcaccaagatctaccgcaagctcgaagtcggcatcaatccggagatcgagatgggccgcttcctcaccgaagtggtcaactttccgaacaccccggccctgctcggcacctctgaactggtcgagggcgacaagcgcagcgcgatcgcggtgctgcatgcgatggtggtcaaccagggcgacctatggaccgtggccgcctcgcacctcgaccgcctcgtcgaacggcagcgcctgctcgccgcgagcgaaggccccgccgagaacggcggcgatcaggcaacctatctgcgccacatggcgcatgccggaaagcgtctcgccgagctgcacatcgcgctcgccagcaaccgggatctgcccgagttcgcccccgagccgaccaggtccgaggacctgcagcgctggatcgacgagatcgtggcgcgcgccgagcgcgtgttcgacacgctgaagcagcgccgcagttccctgaaggaggccgagcggctgctggccgatcaattgcaggcccagcacgatatgctgccggagcggctcaaggcgctgctgccgcgcgacactgacgggttcaacatccgccaccatggcgacctgcatctcggccagctgctggtggtcaaggacgacgtcttcatcatcgatttcgacggcggaccgggccgcaccatcgccgagcggcgccgcaaggccccgcctgcgcgagacgtcgccggcctgatccgctcgatcgactatgccgcgaccgcggcgctggaacgggcgctcaaagttttccccgacgagagcggcaggttaagcctcgctctggccgaatggcgcgaccaggcagcggataccctgctggcggcctaccgcgtgaccatggccgggcagcggctttggcccaatgaggccaaggcggccgaccgcctgctcaactttttcctgcttgagaaagccttctacgagatcgagtatgagttggccaaccgcccggattggctccgcgtcccgctgactggcctgttgagacttctggcgcaacagccgcatgaggttgcatgaacaaactgcccgccgaggcctatgccatcatcgagggtcgccactccgatccgttccactatctcggcctgcacgccgagggggatcgcaacgtcgtgcgcgccttcctgcctgatgccaccaatgtcgaggcgatcggcgagcatggcgaaaccgcaccgctggcgcggatccatgatgccggcctgttcgcgggccccctgccgaacggctcgacgcgctaccagctccgcgcccgattcggcgacaacgtcgtcgagctggaggacgcctaccgctttccgccgatcctgagcgatttcgatctctatctgctcggcgaaggcacgcatcagcgggtttacgacacgctcggtgcgcatccgatgacgctcgacggtgtcgacggcatcggcttcgtggtgctagcgccgaatgcgcggcgagtcagcgtggtcggcgacttcaatttctgggatggacggcggcatccgatgcgggtgcgcggccccggctattgggagctgttcatcccgcgggcacgggtcggcgaccactacaagttcgagatcatcgggcgcaacggccagcatctgccgctgaagtctgatccgctggcgtttgccgccgaggtacggccgaagaccgcctcgatcgtgatcgacgagcgcaagatcccgcatccgcgtccggcgcccgatcgcgtcaacgcactgagctcgccgatgtcgatctacgaggtgcatctcggctcgtggcgccgcaagggccgcaatgagtggctgacctatcgcgagatggccgagcagttgccggcctatgccagcgacatgggtttcacccatctcgagttcctgcctatatcagagcatccgttcgacggctcctggggctaccagccgaccgggatgttcgcgccgaccagccgcttcggctcgccggacgatttcgccgcgctgatcgacgcctgtcacggcgccggcctcgccgtgctgctcgattgggtccccgggcatttccccgacgatccgcatggcctcggcaatttcgacggcaccgcgctctacgagcacgccaatccgctgcagggccgccacctcgactggggcaccttgatttacaattacgggcgcaccgaggtcaccaatttcctggtgtcgaacgcgctgttctggctcgaccgctacggcgtcgacgggctgcgggtcgatgccgtcgcttcgatgctctacctcgactacagccgtccggccggcggctggatcccgaacaaatatggcggccgcgagaacatcgaggcgatcgatttcctgcgccgcttcaacaccgagctgttcgcacacttcccgcaggcgacgaccgcggcggaggagtccactgcctggccgcaggtgtcgcgtccggtcgaatatggcgggctcggcttcggctacaagtggaacatgggctggatgcacgacacgctgaaatacatcggcaaggacccgattcaccgcaagcaccatcacggcgacatcctgttcggcctgcactacgccttttcggagaacttcatcctgccgctgtcccacgacgaggtcgtgcacggcaagcgctcgatcctcggccgcatgcccggcgacgactggcagcgcttcgccaatctgcgcgcctattacagcttcatgttcggccatcccggcaagaagctgatgttcatgggctgcgagttcggccaggagcgcgagtggaatcacgactactcgatcgattggcatctgctgcaacagccgaagcacagcggcatccagaacctggtccgcgacctcaaccggctctaccgcgcgctgccggcgctgcatgagctcgactgcgaccaggccgggttcgaatgggtcataaccgacgatgccaacaacaatgtgttcgcctggatccgcaagggcaatgatgcgcgcgcacgctgcctcgtggtcgtgaatttctcgcccaacgtctatcgcaattatcgcgtccgcgtgccgttcgccggcaaatggcacgaggtgttcaactcggattcctcgcattacggcggcaccaatgtcggcaatatcggcgaggtccgtgcttccgagggcgccacgcccgagctgagcctgaccatcccgccgctggcagcgatcttcctcgtaccggaaagctagctcatgcgtctgaccgggggaacgtccgcacggctcggtgcaagctgggacggcagaggcaccaattttgcgctgttctcggcgaatgcggagaaggtcgagctgtgcctgttcgacggccagggacgccgcgagctcgagcggatcgagatgccggagcgtaccgaggacgtctggcactgctatctcaatgacgtctcgccgggccagctctacggctaccgcgtctacgggccctacgcgccggaacggggtcaccgcttcaacgccaacaagctgctgctcgatccctacgccaagcggctcgccggacggctggtgtggagcgacgcgcatttcgcctatcgcaccggcagtgcgcgcgaggatctttccttcgaccggcgcgacaacgcccgcggcatgccgaaggcggtcgtggtcgacgagagcttcaactggggccgccgcgagatccggccgcacgttccctggcaagacaccatcatttacgaggcccacgtcaagggcctgacccagaagcgcgaggacgtgccgccgaatttgcgcggcacttatggcggcctgtcctcgcctgcgatgatcgaccatctcaagcggctcggcgtcaccaccatcgagctgttgccgatccacggcctgatcgacgaccgcgtcctggtcgagaagaagctttcgaattactggggctacaacaccatcgccttcttcgcgcccgaggcgcgttacgcccaggaaaatgcgctggactcgttccgtacgacagtcgcacgactgcacgatgccggcatcgaggtgctgctcgacgtcgtctacaaccacaccgccgagggcaaccacatgggcccgacgctgtgcttccgcggcatcgacaatgcctcctactactggctgaaccgcgagaacccgcgcttctacgacgacttcaccggctgcggcagctcggtcaacctcacccatccgcgcgtgctgcagatggtgatggactcactgcgctactgggtcgaggtctgccatgtcgacggcttccgcttcgatctcgccacgaccctcgcacgtgggccgaacggattcgatcgcaaccatcccctgctcgcggcgatccgccaggacccggtgctggcgaccgcaaaaatggtcgccgagccttgggacctcggtctcggcggctaccaggtcggcgccttcccgtcgcaatggtcggagtggaacgaccgctatcgcagcgcgatgcggcgctactggagcggcgagggcagcctgatcggcgatatctccggccgcatgaccgcctcctcggatctgtttcaccacgacaaccgcgcgacccgcgccagcatcaatcacatcacggtgcatgacggcttcacgctcgccgacctgttcagctacaacgagaagcacaacgaggccaatggcgaggacaatcgcgacggctccaacgacaaccacagcaacaattgcggtcatgaaggcccgaccgatgacccagcgatcatcgcgatgcgccgccaattgcggaagaacgcgctggcttgcctgctgctcgcacaaggcacgccgctgatacttgccggcgacgaggtcgccaacacgcaagggggcaacaacaacgcctattgccaggacaatgagaccggctggatcggctgggagaacctcggcacggacgacgacgtcatcgatttcatcggtcatctcaccgcactgcggcagcggttcgggcagatccgctgccagagctggctcgacggccgccgcgccgacggcagctacggggtactctggctgacgccggcggcggaggagatgaaggaatccgactggcaattcccggaaagccggttcctcgcctacgtgctggggccgatggaacaaggacaggcgccgatctttatcgtgctcaatgccgcgccgcaggagatcgtgttcaggatgccgaggatggccgaatacaagagctggcagcaggttctgaacacgacgaagtcggagcagaccggtgaccagattgcggccggcgccgataccaccgcaccgccgcgttcggtgctggcatttgcaggctccgcatgagcgcgcagcatttcggacccgaactgaccgctgatggcgcgcgctttcggctctgggcgccggcggcgaagcgcgtcgacctgctgctggacaagccgcacgcgctcacgcgcgatgcggccggctggtacgtcgccgagattccgggcacgcgcgacggaacccgctacaaattccgcatcgatgacgaggtcgacgtgcccgaccccgcctccgcgttccagccggacgatgtgttcggcccgagcgaggtgatcgatcacgcagccttcaaatggcgcgcgacggggtggcgtggacgtccgtggcacgaggccgtcatcctcgaggcccatgtcggcaccttcacgccggacggcacctatcgcgccatgatcgacaggctcgatcatctggtggcaaccggcatcaccgcgctcgaactgatgccgctggcggatttcgccggcaagcgcaactggggctatgacggcgtgctgtggtatgcgcccgacagcgcctacggcaggccggaggacctcaagaccctgatcgacgaggcgcatctgcgcgggctgatggtgatgctcgacgtggtctacaaccatttcggccccgaggggaattacctcggccgctatgcgccgagcttcttcagcgacgcgcatacgccatggggcagcgcgatcgattatcgcgtgcccgaagtgcgcgcctttgcgatcggcagcgtcgtgagctggctgcgcgactatcgcttcgacggcctgcggttcgacgccgtaaacaccatcgtcgaagccggcgaaatctccatcctgcacgacttcagcaaagccgccggccaactcgcggctgagaccggccgccagatcaacctcgtgctcgaaaacggcgacaacatcgcgagcctgctcgatgatgcggaggacccgccggatggcaagttccgtggacagtggaatgacgactaccaccacgcctggcatgtgctgctgaccggcgaaaagcagggctattatggcgactaccgggcgccgaagctggacctcgcgcgcgcgctgtcatcgggctacatctaccagggcgaagtatcggagttctggggcggcaaggcccgcggcgagccgagcggcgcgctgtcaccgacctgcttcattaacttcctgcagaatcacgaccagatcggcaaccgcccgctgggcgaccggctcgagagcattgcaaaacccgaggcgatcgaagccgcgctcgcggtcacgctgatcgcacccaacacgccgatgctgttcatgggcgaggaatggggcgcgacgacccccttcccgttcttctgcgatttcaacggcgacctcgccaatgcggtccgcgccgggcggcgccgcgagttcgcctgggcctatgccaaatatggcgacgagattcccgatccgcttattgatgagacaatgcagtcggccgtgctcgattgggcggcgctcgaccatgatccggcgcgtgcgcggcttgcgctggtgcgcgacctgctcgccgtacgccggcgcgagatcacgccgcggctcccaggggcaagcttcggcggcgaccgcgtcacgagtgatctcctgaccgcgcattggcggctgggcgatggccgcacgctgtggctgaccgccaatctgtccgatcgggacatacccggcgcgccggagccgaagggaactgcgatctggggccgcgcgttgtccggcaacctccccggctgggcggcgcgctggcacatcggatagcacaatgcctccggcgatcccgatcgcgacttaccgtctgcaactcaccggtgatttcgacttcgatgccgcagcccaggtggcgccgtatctgaaggcgctcggcatcagccatgtctacgcctcgccgttcatgaaggcgcgcaagggctcgagccatggctatgacgtcgtcgaccacaccaagttcaatccggaactcggcggcgaggaaggttttgcgcggttcagcgatgcgctgaagcggaacgacctcggcctgatcctggatttcgtgccgaaccatgtcggcgtgcattttgccgacaatccgtggtggctcgacgtgctggaatggggaccgcagtcgccgcacgcggtctccttcgacatcgactgggaccagctgccttatcgcgcgcgcggcggcgtgctgctgccgatcctcggctcgtcctatggcctggcgctggagcgcggcgagatcgcgctgcgctacgacgcaagcgaaggcggtttctccgcctggtatttcgagcaccgcctgccgattgcacctgaacgctatggcgaggtgctgcggaccatcgttcgcgaggccgctgccgaagacagccaggccgggcgcgcgctggtcgaactggcggcgcgctaccgcggcctgcgccatccgaaccgcaaggaggcgccgacgctgaaggcggcgatcaaggcgatcgagggcggcgccgagatcatcgcgcgcgggctcgacgcctatcgtgccggcgaagaccgctccacccagacgctggcgctgcatcatctcttggaacgccagcactacaagctcggccactggcggctcgcctccagcgacatcaactatcgccgcttcttcgacgtcaatacgctggccggcctcagggtcgaggacgccgcgaccttcgaggcaagtcatagcctggtgaagcggctgattgcggaagaccggctgcaggggctgcggctcgaccatatcgacggcctgcgcgatcccgcgcagtacttccagcggctgcggcgcctgatccgctcggcgcaaggtgacaaggccaggccgttctacatggtgatcgagaagatcctcggcgaggacgagaagctgaccaggtttgccggcgtgcacggcaccaccggctatgaatggatgaacacgatcagccaggtgctggtcgatggcagcggcctcgatccgctcaacgagatctggcgccagatcagcaaccagtcgccgaacctgacaccggtgctgcgcgaggccaagcgccgcgtgctggagaccttgctgaccagcgagttcaccgtgctggcgcggctcgtcgcgcgcatcgccagcgggcactattcgacccgcgacttctccgccgacagcctgcggcaggcgctcgagctctacgtgctgcattttccggtctatcgcacctatctcaccgcgtccggcccgaccgcgcacgaccgcgcgctgatcagcgagaccatcgcccgcgcccgcgccgactggttcgccgccgacgaaggcatcttcgacttcctgcgcgacgccctgaccatggacctgctgaagcccggccggccaccgcacagcgcgccgcgggtgcggcgcttcgcgctgaaggtgcagcaattcaccgggccgatgatggcgaaatcgctcgaggacaccaccttctaccgctaccaccgcctgctcgcgctcaacgaggtcggtggcgatccggccgcaaatgcgatcgcgcccgagcgcttccacgccatgatggcggcccgcgcccgcgaatggccgcacggcatgacggcgaccgcgacccacgacaccaaacgcggcgaggacgcgcgcgcccgcatcatggcacttgcggaaatccccggcgaatggaccagcgcggtggcccgctggaaggtgctaaacgcaccgcacctggtgctggagggcgagatgcgcgcgccatcggcgacgttcgaatacatgctctatcaggccctgctcggcgcctgggacccggacgatccttcgctgctcgcgcgtatccaggcctatgcgctgaaggcggcccgcgaaggcaagcaggagaccagctggctcaatccgcacgagccttatgagaccggcgtgaagaccttcatcgaccggatcctcgatcgcaatatctcgcccgaattcctcgacgcactcgacgcgctggcgcggcgcaccacgctgatcggcgcgctgaactcgctcagccaggtcacgctgaaggcgaccatgccgggcgtgccggatttctaccagggcaccgaaggatgggatctatcgctcgttgaccccgacaaccgccgtccggtcgactttgccgaacgtgcggacacgctcgccgcactggaaactccggactgggacgcgctgaccgagggctggcgcgatggccgcctgaaattcgcgtggacgcggcacctgctgcgattgcgcaacgaactgcccgaagtcttcaccggcggcgactatcagccgctcacggtcggcggtccgcaccgcgatcatgtcatcgccttcgcacggcgccatggccgcgcggcggtcatcgtcgcggtgggcagatcatttgcgccgttcacgcagggcggacgcagctggccgcgccccgaagcctttgaaggcgagatcgacgtgaccggatacgcactcccgggcggcgacagcaaagttcagctcgcgacattgttcgccaagctgccggtcgcggtgctgaaggtcaaagccgcggccggcacgaagcaggtccgaaaacgcgcccgcgcgcacagctagcgccgcctctcagcgcttggtcagcagcaactgtccgctcttctggatggcggcctgcgcgacctcggcgaaccgctgcagcagccacggcagcgtcacctccagccgcacatggctatcctcgacatcgacatgcccggcggcgacctgccccagcgcgcggacgcgaaagctcatgcggttgccgtcccagcgctcctcctcgacgctcatgaccggcacgttcgccgccgcgcgcgacaaaccggtcttcagacggcgcacggcctcgtcgcgaccaaggctgtggggaatcgagacgataagcggagccgacatcgcagtgcactcctccacggattccgttcatgtagttctgttccaacccaaacggaagatcgcacagctttatcgtaccgccgaaaccggaaccttcgtagttgcggattgtttccctacccgaagggcagagatcggtgagcccacggggctgaggagagactcaatgtcaattggaacaatcattcttatcattctggtcatcgcgctgcttggcggcttcagcggcatcggcggcggaccgttctacggcaccggctattacggcggtggcggtctcggcctggtgatcgtgatcctgctgatcctgctgctgctcggacggctgtagcctgcgcgcatgttgcgtactatccgcatcgacacctgtcatcacccgctttcgcgaaagcgggtgatccagtattccagagacgccagcgcttgaatcgataggccgcggcgtactggataccccgcttgccgccttcgccaaagcttcggcgggcccagcccttctgccccggcgaagccttggcgaagacgggtcgcggggtatgacgaggagaggcgaagtcgcttgtcgtgacgattctcagcgcgtcgcgagtttcttcatcgccgccttgatcgacgatgctgcatcctcatagccgtcccacgccttggtcttggcgagcagcgcgggcaccgaccgcaccgtgtacttcttcggatcgagatcgccgcgcacctgggcccaggtcagcggcatcgataccgttgcacccgcccgagcccgcggcgacagcaccgcgaccgcagtcgaaagccggtcgttgcgcagataatcgaggaagatctttccggtgcgcttggccttcgacatgttgatcagatagcgctcgggagcatcctgcgccatccactggcagatcccttgcgcgaagcccttggcctccttccacgtcaccctgtcgcgcgcccctgacagcagcggcgccacgacgtgaaggcccttgccgccggtggtcttgcagaaactctcgaggccgaccgcggtcagccgctggcgcatgtccttggccgcgtcgatcacgtcggagaatgcgacgtcgggcgcgggatcgagatcgaacaccagccggcccggtgtgtcgtaagcatcgggcgcgcagttccagggatgcagttcgaggccgccgagctgcgcgaccgcagccagcccctcgatctggtcgatctgcagatagggcttgcgatcgccggagaccttggcgagcttcaagagcttcgacgtgccggccatcgcgtggcgctggaagaaggtctcgcccttgatgccgtcgggcgcgcgcacgatcgagcacggccggcccttgagatagccgatcatccattcgccgaccgcctcgaaataattggcgaggtcgagcttcgtcaccggcgcgccgtcgccggcgtcgggccagagcgccttgtccgggtgggagatcgcgacgcccatcaccgtaccggatgatttccctttcgccatcggcttcaccgctctggttacgaccggccgttcggcctcgacctcatgcgccggcttgtcctggcgcaggcccttgaacgcggcctggcggatattgccggcgtcggtccagccggcgaactcgatctcggcgaccagctccggcttcagccagtgcacgtcgcgggtcttcttcggcgcgtccttaccgccgaacgggctggtgtccgatgctgcggcgttcagcgccggcatgatgcggcgaaccgtgtcctgcccgaagccggtgccgacgatgccgacgaaggcgagatgatcgtcgcgataaacgcccgccatcagcgagcggaatttgccgttggtggtcttccagccgccgatcaccacctcgtggccggcgcggatctttgccttggtccagtcgtcggagcggccggagcgataggcgccgtcgagccgcttggagacgatgccttccagcccgagcttgcgcgctgactccagcacggcgtcgccgcgctcctcgaaatgctcgacatagcggaccagagggtatttgcccttgcgcgccgcgagcatcgccttgagccgcgccttacgctccgtgagcggcagcgggcgcagatcctcgtggccggcaaacagcaggtcgaacgcgtagaagatcagttgatcggtcttgccgtcggagagcgccgcctgcaacgccgaaaaatgcggtatgcccttcgcatcgagcgcgacgatctcgccgtcgatcagggcatccggcagtttgccggcctccttcacgatcgcgccgaacttgtcggaccagtcgagtcccttgcgggtcttcaggacggcctcgccatccgcgatccgcagctgcacgcggtagccgtcgaacttgatctcgtggcaccagcccgcagcattcggcggactctcgactgcggcgcagagttgcggcgcgacgaagtccggcatatctgccacctgcttcgatttcgcctgcggcggctgcttcaacggcgccttcaattttcccttgggcgccggcgccttggtcttggcgcgcgaatccgcggtcatgccgtgattggaatgccagaccgcgtccgccttgatggtcggcttggccttgccgtttcccttcccatttcccttggccagcatgaacggcttcggcgcgcggcccttgccggctgcgatctcggccatcgagcggccggaggcgaccgagcggtcctcatcgaggatcgcttcgccattgccgtccacggcatactcgtcgcggtgcttgatcaagagccagttggtgcgcttgccgccgaaacggtcgttcttcatccgcaccagcacccagctgccatgcaacttgtcgccatgcagcgtgaacttcagatcacccttcttgaagccgcgctcgggatcgtcggattcccaggtgccgcgatcccacagctgcacggtgccgccaccatactggccttcgggaatcgtgccttcgaaatcgccatagtcgagcggatgatcctcgacctcgaccgcgagccgcttgtcatgcggatcgagcgagggcccgcgcgtcaccgcccaggacttgaagacgccgtcgaactccagcctgaaatcataatgcagccgcgtcgcatcgtgcttctggatcacgaagcgccgttgcctgctgggcgcgaccttgacgtcgcccgacggctcgctggtcttctcgaagtcgcgcttcttgcgataggtggtgaggtttctcagcgacacgtgcaggcctcggcgcaaacggcggccgccgccccagtgcggccgtcaggaaccaaaacctacggtatccgttcaagttccaaactcaagctgtttggagacgatcatggccgctccccgcgcctactggaaaggcacgctcaagctctcgctggtgtcatgccctgtggcgctctatccggcctcgaccacggtcgagaaaacccgcttccacatgatcaaccgggagaccggcaaccggctgaagcaacagatggtcgataccgaaaccggcgacatcgtcgagggcgaccagaagggccgcggctacgaggtgagcaagggcaaatatgtcgagatcgagaaggacgagctcgaggcggtccagatcgagagcaatcacaccatcgatatcgacgctttcgtgcccgagagcgagatcgacaagcgctatctcgaccacccctattacatcaggcccgacggcaaggccggcatcgacgcattcgcggtgatccgcgacgccatgaaggaccaggaccgcgtcgcgctggcgcggatcgtgctgaccaaccgcgagcacgtgatcgcgatcgagccgctcgacaagggcatgctcggcaccaccctgcgttacccctatgaggtgcgcgacgccgacgactatttcgacgatatcaagagcccgaaggtgaccaaggacatgatcgagctcgccggccacatcctcgacagcaaggccgcacatttcgacccgtcgaaattcaaggacgaatacgaggccgcgctcaaagccctggtccgccgcaaggcagccggcaagccgatcaaggccgccgagcgcgaggaaaagcagagcaatgtggtgagcctgatggacgccttgaagcagagcctgaaggaccgcaagggtggcacgctgcgacaggcctcgagcccaagacgtccgacgtcgcaccgccgtgcggcgaagaaggcgcatcgctcgagcgcgcggcggcggaaggcgggctgaactccctccccgtcactgcgaacgaagcgaagcaatctatttctccgcgcgtgcggaaagatggattgcttcgtcgctttgctcctcgcaatgacggctggacgggtcggctatctctaccgtttcttcgcgaccttgcgcttcttggccgtcttccgcgtcttggcggtcttcttggacgccttcttcggcaccctcttgccctcggcacgcgcttccgagaggccgatcgcgatcgcctgcttgcggctcgtcaccttcttcttggagcggccgctgcgcagcgtcccggccttgcgcttcttcatcacacgctcgacatcatcagacgccttccgcgagtattttcttgccatggcttctctcccgataagggagaacaagcctcgatcggagcgaaggttccgaagctagtcgcccgcgcgcagccgatagccgatgccggtctcggtcagcacgaattgcggacgctcgggatcggcctcgatcttctggcgcagctgccggacatagacccgcagatattgcgcgtcggtcaattcgtcccacaattccttcaagaggaagcggtgggtcagcaccttgccggcgtgctgcaccagcacgcgcagcaggtcatattccttcggcgacagcttgatctcgcggtcgccgaccttgacgatccgccgcaccaggtcgactgagagatcgccggagcggaacaccggccgctcgccctgcacctgcagctggtggcgcagcgccgcgcgcagccgcgccagcaattcatccatgccgaacggcttggtcagataatcgtcggcgccgagatcgagcgcctgcacttttccggcctcgtcgccgcggctcgacagcaccacgatcggcacgttctcgttgcggccgcggatcatgcgcagcaggtcgtgaccctggatgtcgggcaagccgagatcgaggatgatcagcgccggtccttcagccagcatctccagtgcattcttgccgttggacgcttcgaggatgtcatagccctgcgtgctcagccccattcgcagcagcttgcggatcggcggctcgtcgtcgatgaccaggaccttgatcggcgttgcgttcatgcagcagtgtccagcgcgttggtgtcggcggggatcggcaggcggatggtgatgacggcgccggtccggtcggagcggttggctgccgagatcgtgccgcgcatcgcctcgacgaagccgcgcgagatcgccagcccaaggccggtgccggggcggacatggtcgcccttctcggcgcgatagaacttgtcgaacacgctgtcgagctcgtcagcgggaatgccgttgccttcgtccatgatctgcagcgcgatcgtctcgcggtcgcgcgcgccgcggaccgagatcgtggtgccgacgggggcgtacttggctgcgttgtcgaacaggttgaacagcacctgctcgaacagcaccgcgtcgagctccaccatcggcagatcggccgcgagctccagcgacaccttgtgatgcaccaggatcttggccgccctgcgcagcgcgctgccgacgatctcgtcgacattgtgccgcgcggtgttcggcacgaccgcgccggattcgagcttggtcatgtcgagcagattggcgatgaagcggttgagccgttcggactcgtcgatcacggtcgccagcaggtcatgcttttgcgcctccgtcaggttcgatccgaggtcgcgcaacgtcgaggctgagccgagcaccgaggcaagcggtgtcttgaggtcgtgcgagatcgaggtcagcagcgccccgcgcaggcgatcggactcgatcgtgcgcttgacccggtccatgtcctcgaccagcagcacacgctcgatcgcgagcgcgccctggtcgacaagtgcgtcgagcaggcggcgctggtcgggcgtcagcagcggcccgctgcggtcgtcgtcgatgccgatcacgccgatcgggccgcgtccggtgcgcatcggcaggaacagccgcttggcgccgggcaatgtatccgagccgcggccggccgggcgatcattggcccaggcccagttcgccgcagccaggtcggcctggtcgagctggtcctccggcggatagcccgctttcaccgtcagcacgccgtcatcgggcaacagcagcaccacgcgcacccgcagcatcagtgcgatctggtaggcagtcgcccacagcacgtcgtccagcgtcgcggtgcccgccagcttgcggctgaacgcatagagcgattcggtggtccgaacccgcccgattgcggtgtcggcctgggtacgtacgcgcgcggcgacattggagacgagcaatgccaccagcatgaagaagaagaacgccgcgatattggtcgggtcggtgatggtgaaagtgtagatcggcggcaggaagaagaaattgtagctcagcgaggccgccacgctcgcaagcagcgacggccacagaccgtagcggaccgcgaccgccaccaccgcggtgatgaacaccagatcgacgttctcgatgcccagccagcgctggatcagctcagcaaccgcaaggccggcggcgacgacgccgagcgaccacagataggggcgcggattgagcggctcggcgcgcgccgcagtatgcacctctgccttggcaacgggcagctcgtcgccggcgatgacgttgacgctgatatttccggcgcgccgcaccagatcgtgcacgacggaaccgcgcgtcatctcgaaccagagcgagcgggtcgacttgccgatgatgatctgggtgacgttgttggcctgggcgaaactgatgacgtcgtcggcgatgcggcggccgacgccgggaagcgtcaatgcctcgccgccgagcgattccgcaagccgcatcgtatcggccagccggtcgcgctgctcgtcgctcagttgcaggctgcgccgcgtctcgatgctgacggcggtccattgcgcatgcagccggtcggccaggcgcttggtatagcgcacgaggccggcggcgcgcgggtcctcgctcacgcaaaccaggatgcgctcgccggcggcccagggaccggcgatggcgttggcctgcatgtgggtcagcagctgctcgtcgacccgctcggcggtgcggcgcaacgccagctcgcgcagcgcggtcaggttgccgggcgagaaatagtgctccagcgcgcgctcggcctgcttgggcacatagaccttgccctccttcagccgctggatcaggtcatcaggcgtgaggtcgatcagctcgatggcatcggcgcgatcaaacaccgaatccggcacggtctcgcgcacccggacgtgggtgatctgcgcgaccacgtcgttgaggctttcgatatgctggatgttgacggcggtgaagacgtcgataccgtgcgacagcaactcctcgacgtcgagatagcgcttcggatgtcggctgccgggcgcattggtgtgggcgagctcgtcgaccagcgcgagcttcggccgccgcgcgatcagggcgtcgaggtccatctcctcgagggtctggtcgcggtagcttagccgcttccgcgggatcacctcgaggcccttcagcagcgcctcggtttccgcccgcccgtgggtttcgacgacgccgaccacgacgtcgacgcccgccttgaggcgggcgtgggcgttttgcagcatctcgtaggtcttgcccacgccgggagcggccccgacaaagatcttcaaccgtcccgaacgatcggtctcccggcgcgccgcttccagcagcgcatccggcgagggtcgtttttcagggtcgcggcgctgattggccataccgcaatatagtcatcccgagagagtcagcctactcccctatttcgcctttaccgcgtcgagcgccaggttgagcgcgagaacgttaacgcggggctctccgatcacgccggcgaggcggccctgcgtatactgcgtcaccagctggcgcaccgcgtcctcggaaatgctgcgcgccttggcgacccgcggcacctggaacagtgcggcgtcgggcgagatgtcgggatcgagcccgctgcccgacgtggtcacgagatcgaccggcacggaggccggcgggttctccgccttcagcttctcgacgtcctccttcacccggtcgttcagcgccttgctggtcgggccaagattggagccgccggaattggccgcattgtagggcgccggcaccgttttggaggaatcgttcggatcgggcgcgaccgtcgccgacggccggccatggaagtatttgtcctccttgaactcctgtccgatcagggcggagccgatcaccttgccgtccttctcgatcaggctgccttgcgcctgcttcggaaagatgacgccggcgatcgccgtcatggcgagcggataggcaaggcccgtgatcgcggtcagaaggaccagcaccaggatggcggggcgaatttctctgagcatgataagtctcctaaatctctctcgtcattgcgagcgaagcgaagcaatccattgttcggcataacggatagatggattgcttcgtcgcctcgctcctcgccatgacggctacactgttaagccaggcccagggcggcgacgacgaggtcgatcgccttgatgccgatgaacggaatgatgatgccacccaggccatagatcatcaggttgcggcggagcaacgcgccggcgccgaccgcgcgatacttgacgcccttcagcgccagcgggatcagcgcgatgatgatcagcgcgttgaagatgatcgccgacaggatcgcgctctgcgggctggccaggtgcatgacgttgagcacctggagctgcgggtagaacgcgaggaacatcgccggaatgatggcaaaatacttcgcgacgtcgttggcgatcgagaacgtggtcagcgcaccgcgggtcatcaggagctgcttgccgatctcgaccacctcgatcagcttggtcgggttggagtcgagatcgaccatgttgccggcctcgcgggccgcctgggtgccggtgttcatggcgacgccgacgtcggcctgcgccagtgccggcgcatcgttggtgccgtcgccgcacatcgcgaccagcttgcccttggactgctcgtcgcggatcagcttgagcttgtcctcaggggttgcctgcgccaggaaatcgtcgacgcccgcctcggccgcgatcgcggccgcggtcatcgggttgtcgccggtgatcatcacggtgcggatacccatgcggcgcagttcggcgaagcgctcgcggataccgcccttcacgatgtccttcaggtgcacgacgccgagcagcttgccgtccttggccaccgccagcggcgtcccgccggccttggcgatctcgtcggcgatcgcctggatctcgcgggcttcggcacttgtcgttgccgccaccgagcggatggtattgcccgaggcgacggtgcggggctcgccgccgtcgacataggcgaggatggcgtccaccgcgcccttgcggaccgacgacgtaccggcgtcgataccgctcatgcgggtctgcgcggtgaacggcacgaaggtcgcggccagctcatgcatgtcgcggccgcggatgccgtacttctccttggccagcaccacgatcgaacgaccttccggtgtctcgtcggcgagcgaggcgagctgcgccgcgtcggcaagatcctgctcggagacgccgcggatcggacggaatgcggtggcctggcgattgccgagcgtgatggtgccggtcttgtccagcagcagcgtatcgacgtcaccggcggcttccaccgcgcgaccggacatcgccagcacgttgaagcgcaccaggcggtccatgccggcgatgccgatcgccgacagcagcgcgccgatcgtggtcgggatcagggtgacgaacagcgccaccagcaccacgaccgagatcgagccgccggcataggccgcatagctcggaatcgtcaccgtcgcgaacacgaagatgatggtgaggccggccagaaggatgttgagcgcgatctcgttcggcgtcttctgccgctcggcgccttccaccagcttgatcatgcgatcgatgaaggtcgagccctgcgccgcggtgatgcggacgcggatccagtccgacagcacctgggtgccgcccgtgaccgccgaacggtcgccgccggattcccggatcacgggcgcggattcgcctgtgatcgcagcctcgttgaccgaggcgacgccttcgatcacctcgccgtcggacgggatgttgtcgccggcctcgaccagcacgatgtcgccgaccttcagcgaggtgcccggcaccagccggaaggtccggtccgttccggtcagcagcttggcctggctctcggtgcgggtcttgcgcagcgattccgcctgcgccttgccgcggccctcggcgacggcctcggcgaagttggcgaacagcaccgtgaaccagagccagaggatgatctggaaggtgaagccaaggctggccccaccggtgagcagatcgcggacgaagatcacagtggtcagcgcggcgacgatctcgaccacgaacatgaccgggttcttggccatcagccggggatcgagcttgacgaaggccgaggtgatcgcaggcatcaggatcttagggtcgagcatggtcgacgcctgcttctgcaattttgcggtttccatggatgtgactccggtcaaattcgatcagaacaaggtgttggcgttcatggcgaggtgctcgacgatcggtccgagtgccagcgccgggaagaaggtcaggccgccgatgatcaggatgacgccgacgacgagcccgacgaacagcccgcccgtggtcgggaacgtcccggcagacggcggatgcgacttcttttcagcgagcgatcctgcgatcgccatcgccggcacgatcatgaagaaacggccgacgaacatcgcgcaggcgagcgtcaggttgtagaagaaggtgttgccggtgaggcccgcgaaggccgagccattgttgccagtcgccgaagtataggcatagagcacctcagtgaagccgtgcggaccggcattcgccatcgaggccaccgccgacggcagcaccacaccgaccgcggtccagccgagatacatcagcggcaacaccaggatcgcgagcatcgccatcttgacttcgcgcgcctcgatcttcttgccgacatactccggcgtgcgaccgaccatcaggccggcgacgaagatcgagatgatcacgaagatgagcatgccatagagcccggcaccgacaccgccgatgatgatctcgccgagctgcatattgatcagcgggatcatgccgccgagcgcggtgaagctgtcatgcatggcgttgaccgcgccgcaggacgcggcggtggtgacgaccgcgaacagcgacgacgcgacgatgccgaagcggacctccttgccctccatgttgccgccggtcaggccgtatgcctgcaggagcgaggtgccgttggcttccgcccaataggtgacggcgacgccggcgacgaacagcacgcccatcacggcgaagatcgcccagccctggcgttcgttgccgaccatgcggccgaacacgttggtcagcgccgcgccgagcgcgaagatcgaaatcatctgcacgaggttcgacagcgcggtcggattctcgaacggatgcgcggcgttggcattgaagaagccgccgccattggtgccgagcatcttgatcgcgacctgcgaggcgaccggtccgagcgcgatggtctgcttgccgccctcaagcgtggtggcatcgacataggccccgagcgtctgcggcatgccctgccagaccaggaacagcgtgtaaacgatgcagatcggcagcagcacgtaaagcgtacagcgcgtgacgtcgacccagaaattgccgaccgtgcgcatcgacgaacgggtgaagccgcggatcagcgccatcgcgagcgcgatgccggtcgccgccgacaggaagttctggtgagtgaggcccagcatctggaccagataggacagcgtgctctcgccgccgtagttctgccagttggtgttggtgatgaaggagatcgccgtgttgaaggagagatcctcggcaaccgcggtctgtccggccgggttgaacggcagaaatgcctgcaaccgcatcagcccgtagatgagcgcgaagccgccgacatggaacagcagcatggcgaccgtgtaggtcagccaatgctgctcgcgccgctcgtcgacgccgccgacccagtagattccccgctcgaccgggcgcagcacgggcgagaggaaggtggcctcgccattgaacacgcgggtcatgtaccagccgagcggcttgaccagcgcggcaacgatcgcgcagaacagaataatttgaatccagccgatgacggtcattgcgtcaaacctttcgaatgggtgcgaagctcagcagcgacgcgaacacgccgagcaacagcccggtcagcgccgcgtcggctaacagaatcttgcaaagtgcgaacattgccggccgtctagaagcgttcgggccgcagcaatgcgtaggtgaggtagaacaacaggccgagcgagacgaggccggcgagcgagtaatcgaagatcatcgcagcctccccttacagccgttcgcaggcgtaggcgtagccgatgccggccgcgaagaagccgatcgcgagcgccgccatgaggatgtccatcatcgaatgctcctattgcgccggattatccacggataatcgtcgccgaattccgaaaagcgaggttgagacagatcaaccgcagatcttgcttctgcgcttacctgctacgcgaatgtcacgtgccatccagcgcataggttttcgagatgaggcgaatagggacgttatatgaatcttataaagggcgaggatttggacccaacgcgcagcgcaggttagggagtgcaaggcacactccaaccgtgcatgatccgcttgagccgctgtggcgccctgagtcgaggcccggcgcggggatgcctcgcattcttatggagttcttatatcgtcgttggccgacctgtctcgcgggcggctgaccagcgagccaattcgacataaggggcccgcgcaccggctcggcgcctcaggttcagccgcacgcggggttcaaggtcgacggcccggtcgatggacattatcttgaccttgcggctcgttgtctcgtctccgttcaatgcaattgggcagctctgttgccattgtcagcccgaccaccgacacgaccaaccgtttcagagtgggtgacgcaagtggaccgacaagcctccgccgagtggcgcgcgcagttgctgcatacctggcagctggcggtactgcgctttgcgatcacgctggacgatgcagatcgattgcacctcctggctatcgccgatgagatcgatcgcggcggccaattcgatcgacagagcagctttagcttctttcgcagttgcagcaccgaactctgcgcagccattctgcggcagaacgattctgcagacgccatcttgcggcattttgctgcacgaattgaggacgctcggctgcggcgcgcgttcgcggccgcagtaggaattcggtccgatccgggcggcagcaagtccaggcagccggactggctgtggcgagggctcacgtcgcgcgacgtttgcgcggtccagcccggaacggtcagagaatcagcaatccggacgcggcctccgcgccgcgagcgaggatgagtgctgactgtccaactgccccttatggaatccctatatctccgcccctcgcctcatctcgttttcaaacagccatccggccattttgggcgtgcggccaatgccttgaaccagtgctttgaacccaatgccttggaccgcgcgcaagacgagatgacgccatgtccgtgctaccccaaaacgcccccaccgacctcggcgaccggctgcgcgacgcctatgcggtgtccgccgaattcatggccgacatcatcggccagacctgccggcgctttccctcggttggacagagcggcaagacctcgcgcgtcgagcgcctgatccagtccggcgcctggaccgacgccgcgatcgcgctgctcgacctcgaactgccgcaatggcagattcgccgcctggtctatgacgagggcgagtggcactgcgccttgtcgcgcgaacgcgagctgcccgactggctcgaccagtcaatcgagacccatcatgccgatctcgcgctcgcaatcctcagcgccttcgtcgaggcgcagcggatttcctggcccgatagccggcccagcgtgcccacagcccgcggcggcacgcgttcctgctacgcgccgctgctcgtcgacaatttctgctgatgacggcgcaaccgtgaacaccaaacaactgcctcaacagctgcagtcggtccaggtcatggtccggttcggcttccggcttgccatcatgatcggctttgccgtgttcgccggcgcgggcatcggccggggcctcgtcgcgctgctgtggatgtcggcgctgatctgcgcgctcgccgggctgttcaagcgcgagatgccgttcgccgcgaacctcaaccactgggacgagatgaccgcctatgtcgcgctatgcgcactcggcaccggtatcgtccagcacctctgaacccatccttcaaatcctatgccgctcctatgaagtcggccatccgccgcgctcgatttcatatccgacacaacagacattgatcgcgtgacttcgaactgaaggactgaccaacgtgaaagtcgtcgaacctccctcgtgtagtgcagcgtccaccatcgtcttcatcggccgcaaccaccgcggccagtgggtcgcccagcaacagaacggcctctatggcggcctgttcatcaaccgcgcccaggccgtcaaatatgcgctgttcgagaacggccagcatcccgaaatgatcatcgagctgtcgcgtgagttcgagctcgatatgcgcggcaagaccgctgatatccccgcgagccgcgtggcgtgagccgccccatgatcttcacaccagcatcgagatgggcaccgaacgccgattcggccgaatggctgtcgggcttcatccccgatcttccgacccccttcgacctccacgacgagatcgacgccgatacattcggtcggctgtgcgagcgccagatcgcggccggcgcgaccgcgcttgtggtcggcgagaccgcgggcgaaagctcgacgctggagcccgcggagcgcgcgcagctggttagcatcgccgcccgtgtcgcgcgcaagcgggtccggatcatcgccggcgccgggtcgaacgcgacggaccgcgccgtcacgttcacgcgagccgcgcaggcggctggcgccgacgccatcatgtcggtcgtgccctattacaacaagccgatgccgcacggcatggcggcgcacttccgcgccgtggccgcggccacgacactgcccatcatcctgcacgacgttccgtcacggacggtcaaaggtctcaccgacgagacgctgctcgaactcgccgcatcgccgcggtttgcgggattgcgcgacggcagcgccgacattgcccgcctggcacggctgcgctcacgcctgcccgcgcgattccggatgctgaccggcgacgacatttcatcgctcgcctggctcgcggccggtggcgacggctgcatctcgaccgtggccaacgtcgcgcccgatctgtatggcgccgcctaccggcatttccgcgccggccggctgtatcaggcgcgcgagctgcatcagcggctggtgccgctcgcaaccctgctggagcgcgagcatcctgccgccctgaaattcgcgctggcgctgctcgggttcatgcaaccggcgacgcggctgccgatcgtgcaactgggggcagccgacaaggccgaggtcgcccaggcgatggctgcgcttgccgacgagtatcttgcagctgcgcagtgacccgctgacgcaacgcaagtcatcgcaatgcacaatggcacgtgcaacgtcgcccgtgacaccgcgacatattgaggttccggaaccgcgccccatatccacggcaagggagtgcttgccgtgcagaccttcaaggcggctctcgttatggcgatcgcactggttgtctggatcggtcccggcgcggccgcggacggcaaccgtgttgccctgaccatttccatcgatggcgcgatcgggccggcatcggccaactacgtcaaggacggcttggcgaaggcagcggagcgtcacgccgaggtcgtgatcctgcgcctgaacacgccgggcggtctcagcaccagcatgcgcgagatcatcaccgacgtactggcctcgcctattcccgtcatcggctatgttgcgccctccggcgcccatgccgcgagcgccgggacctatatcctctatgcaacccatctcgcggccatggcgcccggcaccaatatcggcgccgcgacgccggtgcagatcggcggcccgttgccgggtctgccgggcagcaacccggataagggtggcaaggacaaggacaattcggccgagccgaaagatgccatgacggcgaaggtgacgaatgacgccgtcgcgttcatccgcagcctcgccgaactgcgcggccgcaacgccgactgggccgagaaggcggtccgcgatgccgccaccctctccaccaacgctgcgttgcaggcccatgtcaccgaattcaccgcgcatgatccggccgacctgctcaggcaggtcgatggccggacggtggagctcgccgacggcaagacgcataccctggcgaccaaggaagccgtgatcgaggccatcgatcccggctggatttcgcgcgcgctcgcggtcatcaccgaccccaacatcgccttcgtcctgctgatggtcggcatctacgggctgatcttcgagttcatgtcgcccggtgccgtggcgcccggggtggtcgggacgatctgcctgctggtcggcctctacgcgctcaacatgctgccgatcaactacgccggcttcggcctgatgttggtcgggatcgcgctgctcgcgatcgaggccttcaacccgaccgtcgtgatcggcctcggcggcatcgtcgccttcgtgctgggagccgccatgctgttcaggatcgaggcgcccggatatgccctgtcatggccgctgatcggtatcgtcgccgcgatgttcaccgggctcatcctcgtcgtgctcggggcgctgcgccgcgcgcgccacggcccggtccggaccggcgcgcaggccatgcgcgggctatcggccgaggttctcgactggtccgagacatcaggtcacgtcttcaccaatggtgagcgctggcaagcgcgcggcaccgagacattcaaggcgggagagacggtcgaggtcgccagcatcatcgatttgacgctggtggtacggcgtgcgccggccgccgccggcgaaggaggttcagcatgatgcttgattatttcacctatggggcggtcgcgctgcttgtgatcatcttcctgacccaggcggtgcgcgtgctgcgcgaatacgaacgcggcgtcatcgtcacgctcggccgcttcaccggggtgaagggcccggggctgatcatcctgattccggtggtgcagcagctcgtgaaggtcgatctcagggtgatggtgcaggtggtgccgccgcaggacgtgatttcccgcgacaacgtctcggtcaaggtcaatgccgtgctctacttccgcatcgtcgatcccgagcgtgccatcatcaaggtcagcgattacatgtccgcaaccagccagctggcgcagaccacgctgcgctcagtgctcggcaagcacgagctcgacgagatgctcgccgaacgcgacaagttgaacgccgacatccaggagaccctcgacaagcagaccgacgtctggggcatcaaggtcaccgcagtcgagatcaaggacatcgacatcaacgagaccatggtgcgggcgatcgccaagcaggccgaggcggaacggctgcggcgcgccaaggtgatcaatgcgatgggcgagcagcaggcggccgagaagctggtcgaggccggccggatccttgcccaggagccgcaggcgatgcagctccgctatttcgccgcgctccacgacattgccggcgagcgctcctcaaccgtggtgttcccgctgccgatgaacctgctcgatcacctgacgcggcgcagcgaggccacctgacccggcagatgcttggcccgccaggccggccccgggccacgcatgtaatgcgcctcgggccgatagatgctgatcggctcctcgccgatccaggccagaaacttgaacagcgcttgcgcggcgctgcgcagcggggcagcgatgaatgatgcggtgcgcatttcagtagtcccacttctcgccgagcacggccggcgtccgcggatagcgctcggcatcgccgccgggcataccgacatcgagatgggctcgcgcccacccctcgtggccacgatgcagcaacagctcgttgcgcaaccgatggatcttggcggcggcgatcgcgcgatgaaccgtcctgaaggccgcgccgatccggcgcatgacccgtcgcagggtcaccggcatggcgccggccgaattctgcggccggacgtcgtgtaaatggagcaaggtcatgtcccaccttcctgttggcggcgcgtgcgagcgcaccgcgtcaagctcaaagatgctgggaaggccgtaggaattcgagaggacccgtcgttgcgccgcataggcacggcataaacggccagatgtcgccgacgcagtgcagccgtgccgcaaatcacgagatttcggacaattttaccctcgaacggccgtgcgcagggccggtttacggtcggcggcaagaccggtaacgttgcccgccaatgcgacgtggagagtgccgatgcggcccaaggaccagaccaactggatgctgtcggatgcgatcgaggcgctcgcccgcgccgaacggttgcaccagagcttcctcaatttgcacccccgcgcgggcggcagcgagccgagctgggaaccgccgatggacgtgatcgagaccgagcaggagatcctgatcctggtcgcgctgccgggggtcgatcccgaccaggtcgaggccgcgctcgacggcggcacgctggtgatctccggccgccgcaccttgccccctgaactccgtaacgcccgcatcctgcgcctcgagctgccgcaaggccgcttcgagcgccgcatcacgctgccgaccggccgctacaccatcagccgctttgccgcgcatggctgcgtcggcctgcggctcggaaaatcgagctagaggatttcgccatggctgcatccgacgtttcaagcccggcgagctccgcgccgatcccgagcgacgcgctgatcatcgtgcccgtccgcaacaccgtgctgtttcccgacgtcatcttcccgatcacgatcgcgcgtgcgacctcgattgccgccgcccagcaggcggtgcgcgagcagcggccgatcggcatcctgctgcagcgcgatcccgagaccaacgatcccggcccggacgggctctaccgcgtcggcaccgtcgccaacatcgtgcgctacatcaccggcgccgacgacagccatcatctggtctgccagggcgtgcagcgcatgcgcgtgctcgactatctgcccggcacgccgttcctcgcggcgcgcgtgctgcagatccccgagcccaccacgacctcgcccgagatcgaggcgcgcttcctcaatctgcagcgccaggcgctggaggccgcgcaattgctgccgcaaacgccgcccgaattgatcgccgcgctgcagggcacgacctcgccggcaaccctcgccgaccttgcgacctcctacatggacatcaagccggcggagaagcaggacatcctcgagaccatcgacctcgtggcgcggatggacaaggtctcgcgccacctcgccgagcggatcgaggtgctgaggctgagtcaggagatcgggcagaagaccaaggcggtgttcgacgagcggcagcgcgaggcgatcctgcgcgagcagatggcgacgatccagcgccagctcggcgagggcgacggcaaggccgccgaggtcgccgagctgaccaaggcgatcgcggacgccaagatgccgccggaagccgagagccaggcgcagaaggaattgcgccgctacgagcggatgccggaggcggcagccgaatccggcatggtgcgcagctatctcgactggctgatcgacctgccctggagcattccggaggagaagccgatcgacatcgccgaggcgcgcaagatcctcgaccaggaccattatggcctcgagaagatcaagagccgcatcatcgaatatctcgcggtgcgcaagctcgcccccggcggcaaggcgccgatcctctgctttctcggaccgcccggcgtcggcaagacctcactcggccaatcgatcgcgcgagcgatgtcgcggccgttcgttcgtgtcagccttggtggcgtgcatgacgaggccgagatccgcggccatcgccgcacctatatcggcgcgctgcccggcaacatcatccaggcgatcaagaaggccggcgcgcgcaattgcgtgatgatgctggacgagatcgacaagatgggccgcggcatccagggcgatccgtcggccgcgatgctggaggtgctcgaccccgagcagaacggcaccttccgcgacaactatctcggcgtgccgttcgacctgtcgcgcgtcgtcttcatcgccaccgccaacatgctcgacggcgtccccgggccgctgctcgaccgcatggagctgatcagcctcgccggctacaccgaggacgagaagctcgaaatcgccaagcgctatctggtgcgccgtcagctcgaggccaacggcatcaaggccgaacaggtcgagatcgatccggacgcgctgcggctgatcatcaagagctacacccgcgaggccggcgtccgtaatctcgagcgcgagatcggcaaggtgctgcgcaacgtcgcggtgcagatcgccgaaggcagcaccagccacgtcacgatcgcgccgaaggacatcgtgtcgctgctcggacagcccaggttcgagaacgagatcgcgcagcgcaccagcatcccgggcgtcgccaccggtctcgcctggaccccggtcggcggcgacatcctgttcatcgaggcctcgcgcatgccgggccgcggcgcgctgatgatcaccggccagctcggcgacgtgatgcgcgagagcgtgcaggccgcgatgacgctggtgaaaagtcgcgccgcccaactcggtatcgaccctgcggtgttcgagaagaacgacatccacgtccacgttcccgccggcgcgacgccgaaggacggcccgagcgcaggtgtcgcgatgttcaccgccctcacctcgctgctgaccgaccgcaccgtgcgcggcgacaccgcgatgaccggcgagatttcgctccgaggcctggtgctgccggtcggcggcatcaaggagaaggtggttgccgcggcggccgcgggcctcacccgcgtcatgctccctgcccgcaacaagcgcgattacgacgatatccccgccggcgcccgggccaagctggaattcatctggctcgaacgcgtcgacgacgcgatcgccgcagcgctcgagccggccaaggcgacgcctgccgctgcggagtgatggttgctgcacgaggctccaaccgacatctcgcccggggccacccctctccccaaccctcccccgcaaggggggagggagccagaggcggaagggttccctcccccttgcgggtagggctatcgcatatgggccaggacggtgagaaggaagtcgttgctccatcttg

SEQ ID NO: 46 - DNA, 52622 bp, Bradyrhizobium enterica
gcacaacggcctgagcgggctgcgcttctcgatctgcgcttcggcgccgtcgaactggcccgaccgcaaaccaagttcctgcgccatctgccgaaaagcctacccttgatcctggtcgatgtgcgcgagatcgagccgcaggccgggatcgagccgctgcactggcggctgctcaccacgcatccggtgacgaatgcagaagaggcctggcgcattatcgaatggtacaagcggcggtggctgatcgagcagttcttccgcatcttgaagacacaaggcctcaagctcgaagacagtcagatcgggaccgccgagcggcttctcaagctggtcgcgatcgcggccaaggcggcagtcatctcccttcagcttgtgcaggcgcgcgatggtcgcgacaaccagtctgtccgaattgccttcaatgctggggaagtcgctacacttgccgccctcaatcgcaacctcgaagcccaaagcaagcggctgagaaacccgcacccgcctgacagcctcgcttgggccgcctggattatcggccggctcggcggctgggacggctatccatcgtccaaaccgccgggccccatcactatgaaacacggcctgcaatacttccacgccgcagccgctggatggtccctcagagatctgtgcatgccctagcgccttcgcggggacgacgacgttgttgtggatcgagccttcagctctcccgccgcttcgagctgttccagcgcttcagcgaggtccagacgccgcgcgacaggcggaaggcatcgaccgggctcgacgagcccagcgcctcgaagcggtgcagctcgacgccgctccactggaagccgcacttctcgaggatgttgcgcgacgacgggttgacgacgcgggcgcccgcgatcagctggtcgagatcgaattcctcgaagtagtaatcgatcacggcgcgcgcggcctcggtgccgaagccttggccccaataatcgacgccgagccagtagccgagctcggccgatgtctcctcgcgccagtcgatgccgaccatgccgaccggcgtgtgattgttctcgatcaggaaaacggtctcgcggccgccggcgccgagcgcgcgcacgaattcgatggcgtcgtcctgggtatagggatgcggcaggcggcgggtgttctccgcgatgcggcgatcattggcgaggcgtgcgattgcttttacgtccgcgagcgtcggcttgcgcaatgtcagccgttcggtctcgaggacgcaagctcttgcctcgcgcaaggtcggcgtcgggatgtcctgcaacatgtcgagctcctgtgatgcgacaattggtacgcaacgcttggaacgtcacgcgcggtcgaaccggatcgcgcgcaacaaaaaggggaggccggtcatcccgcctccccttggagctctttgctgctccgccggttcaacaggacccggcggactcatgtgtgtccaccgtctactcggccgcctgcgccatcgggataaccgatacgaatgtgcggccattggctttggcacggaactcgacatgaccctcgaccttggcgaagagagtatgatcggtgcccatgccgacattaaggccggggtgccaggtggtgccgcgctgacgcgcgatgatgtttccggggatcacgcgctcgccgccgaacgccttgatgccaaggcgcttgcccttggaatcacgtccgttgcgcgatgaaccgcctgcttttttatgagccatagctcgtctccgacttcgctttgatctctagatcaattccttgacggaatcatttcacgttttgtcacgcttcacatctgaagacgcgacgatcacctttttgcgcgtgcccgcgaacggcctattcggctgcctcggcgggcgcttcgacctttgccttcttcggccgcgggccgatggtcggcttggcgttatcggcgaggatctcggtgatgcgaagcaccgtgagctcgtcgcgatagccgcgcttgcggcgtgaattcttgcggcgacgcttcttgaacgcgatcaccttggcgccgcgcttgtgctgcagcacttcggctgcaacggtcgcgcccgcgacggtgggcgttcccagcaccggcgtgtcaccgccgagcaccagaacttcgcctagctgcacgatcgtgccgacatcgccggcgatcttgccaatctcgagtacatcattcggaacgacacggtactgccggccgccggttttgatgactgcgaacatcgtttgattccttcgtgttcggttccggcctcggacagatcgcccgggtcggctttttgttcagtcgctatgggttatgtgttctgcgcgaagggaatgaattcccaaatggttcgcacaaaaacaatcggcgcgagaaatccccgcgccggatgggcggacttatagccgcaaacgacgcagagtcaaggtaaagccgggcaaaaaccggccaaagatgaagggtttggcgcgatttcggcccggattggcggctcaggccgcggtctgtgccgcgacccgcgcgtggcggcggatcgcctgcggcggctggcccagcacccgcaggaacgcccgccgcatccgttcgcggtcggcaaagccggtctctatggcaatttcgtccatcgaatggcggccgtcgccgatcaattcgcgggcggcctcgacccgcagctgctcgatcgccttggccggcgactggccggtctcggcgcggaaagcgcggctgaactggcgcgggctaagccgcgccacctcggccaattcctccaccgacagctcgttgcgcagatgcgtcttggcgtagtgcagcgcgttctggatgcggtcggatttcgggtcgagctcgagcagcgcggaaaactgcgactggccgccggtgcggcggtgatagaccacgagcttgcgggccaccgagcgcgcgacctcgacgccgagatcatgctcgatcatcgccagcgccaggtcgatcgtcgcggtcatgccggcggaggtccagatcggcccgtcaacgatgtagatgcggtcctgatcgaccttcagcttcggaaatcttgcctgcaattccgcggcgaattgccaatgcgtcgagacgcgccggccatcgagcaggcctgcttcagccagcgagaaggcgccgatgcagggcgcggcaatccgctgcgactccgtcatggcgcggcgaatgaagccggtcagcttcggcgacgccggatgcagctcgtggccggcgccgatgaacagcgtgtcgaagctgcgcgcgccgaaagcttcggtctcgacattgaaaccggcggatgaccgcaccgggccgccatgctccgacagcagcgtgacctcatagaaggggtcgcctgcgatcagattggcgacctcgaacgcagtgatggcggtgaagcccatcacctggaattccggaaaaacgacgaagccgatctcctgcatggaaccctccgacgtgaaatcgatgtcctaaaaaggtgtatatatgacatttgagacatgcaaggggacctgtagaacctgatcagcggccaaaaccggccgcccagggtcaaacaggagaccaacatgaccaagtcagccaaaggaacggcgctcgtgaccggtgcgtcgtccggaatcggtgccatctatgcggaccggctcgcacggcgtggctacgatctgatcctcgtcgcacgtaaccgcgagcgcctcgacgggctcgccaagcgtctcgcggcggagacaggccgatcgatcgagatcgttgccgccgacctcagcaagcgcggtgacgtgtcgcggatcgaagccattctgcgcgacaatgccggcatcagcgtgctggtgaacaatgccggcgtcggcgccaccgcgccgctgctcgcatccgacgtcgacaagatgagcgacatgatcgcgctcaatgtcgatgcgctgatgcgcctgacctatgccgcggtgccgggattcgtcgcgcgcggcggcggcaccatcgtcaacatcgcctcggtggtcggcgtgcagccggagctgctcaacggcgtctacggcggcagcaaggccttcgtgctggcgctgacgcactcgttgcagcacgagctgaaggacaagaacgtccgggtccaggcggtgctgccgggcgccacggccaccgagttctgggacatcgccggcacgccgatcgctcatctgcccggcgagatcgtgatgaaggccgaggacatggtcgatgccgcgctcgccggcctcgaccagggcgaggtcttcaccgtgccgtcgctgccggaggccgccgattggcaggcctatgaggctgcccgccagaagctgatgccgaacctgtcgcgcagcgtccccgcagcgcgctacggggtaacggccgcctgagactattctgcggtctttgcgagattgcgtcccgcgcccggccgaacgccgccgcgcgggacgcaaccatttgggttccccgcagttgtctgacggaacctcaagcgggcaggcgaatggctgacgacaccggactgaccacgggcatcgcgcaccacggtgccgcgcggctgccctccgtcgatatcgacagcttcaacatcgagctgaaggacgacgagggctttctcggcgatcgcgcctccaagggcgcgttccgcaagatcttcgatcgctggcgcaagccgctgcgcaaatccggcgaggatccgttcggcgacgagccgtccgacaagatcagcaagaagaagctcgacgagatgctggtcggcgacgacaccgaagcctccgcggtcgtgcacagcgcgatcgaggagttcgcccaggagctcgcctacgtgacgcggcgcttcctcaacaccaaggcctgggccaagaccgagcgcatcgtggtcggcggcggcttccgcgactccaggctcggcgaactcgcgatcgcgcgcaccgacatcatcctgaagtcggaggacttcaaggtcgatttggtgccgatccgcttccatcccgatgatgccgggctgatcggcacgctgcatctggcgccgtcgtggatcttcgaggcccatgacggtgtgctcgcggtcgatatcggcggcaccaatatccgctgcggtgtcgtcgagacgcgctggaagaaggcgcccgatctctccaaggcgacggtctggaagtcggagctgtggcgccatgccgatgacgagccgacgcgcgaaggcgcggtgaagcggctggtgaagatgctgaaggatctgattgccgccgccgagaaggagaatctcaggctcgcgccgttcatcggcatcgcctgtcccggcgtcatcaaggaggacggcggaatcgagaagggcgcgcagaacctgccgggcaattgggagagcagcaagttcaacctgccggcgagcctggtcgaggcgattccgcagatcggcgatcatgataccgcgatcgtgatgcacaatgacggcgtggcgcaggggctggccgaggtccctttcatgcaggatgtcacgcgctggggcgtgctgacgatcggaaccggactcggcaatgcccgctacaccaatcgcaggaaagacaacggcaaggacgacaagaaggccgacaaggccaagaacgacgatggcgacaatggcgagaagaagaccaaaaaagccaagaaggccgacgcctgaagatttcatccgtggtcatacggcccgggatcgcgcggtaaggttgaccggttaggttaagatcggcttcgcgttgccgatccagcgggcgccgctaccgtggaccgtgtcgctcccgccgaccggcgaagccgcacttcccggcctgcaatattaagaagcggcacgggaccgccagtttttgtcgcgtcctggcggtcccaccattctctcacctccaattgatccgctcgaagaaccctgcgatctcggcggctgcgcgatcggggtcctcgcgatgcgggaaatgcccgacatcgggaaacatcgcgagatcgaggttggagaaggtctcgcccagccggtcggtccatgagtaaggaaacagcgggtcgtgctcggcccagcggatgcaggtcggcaccgtgatcgggggcagcgcgggcgcctcgccctgcatcatcttgacgcgccccgcatgcgacgcgcgataatgcgcgaagccgccggcgaggttgcccggcttgaagaaattgtcggcaaagtcctcgatcacgtcgtcgaacgcggccttgcgatgcgtccagttgcgcaggaaatggccgatgtaggtgcggcagttttcacggctggcgccgaccagcgcgggcgccatctccatctggtggaacgactggtaccagatgtgattcagccggtccggcgcggccatccgtggcccgatgccgggatagacgaaatcgaacaacaacagcccggcgatgcggtccggcgccttgcgggcgagcggctgcatcaccgcgccgccgacgtcgtggccgaccacaccggccctgtcgatgccgagggcgtccagcagcgccagcatgtcgtcggtatgctgatcggggccgtaagggcccgtcggcttgtcgctgtcgccgaagccgcgcaggtcgggcgcgatcagggtgtagcggtcggcgagccgcgccatgaccggcttccaggtcagccagaattccggccagccgtgcagcagcagcagcggcttgccgcggccggtccgcacgacgtggaacgccgcgccgttggctcgaatcgttgcatgatccatggtccgctcctgctgcttccggctcgcccgtgcgctgaccgcgcgcgaggtgtcccgctagcgcgttgtttccgcgcactttctcccgtcatggcgctgcttcggccgcgccatgcgccggtgacggaaatattattgcagcgccttgtctgtcccgtcatcctcgcctagaacacgccccgaccgcgggtggcgcaaatcacccgggccatcggagaggtggcagagtggttgaatgcaccgcactcgaaatgcggcataggtgcaagcctatcgggggttcgaatccctccctctccgccacccttcgcccgatccgaacccgccagagctatccggctgtgccggagcaggagaccgcggctggccgtgacccggtccgcggcgcgtgacgacaagccgatgaccactgacattccaaccatcagcaccgctcgtttgacgcttcgtccgcaggcgatcgatgacttccccgcttacctcgcgttcctggcctcgccgcgctccgccggcatgggcgggccgttcgatgtccgcgcggcgtgggggatgttttgtcacgatctggcgtgctggcgcctgttcgggcatggcgcgctgatgatcgaactcaccgcgtcgaagcagtgcatcggccaggtcggcatcaaccacgggccgctgtttccggagcaggagctcggctggctgctctatgacgggcatgaggggcatggctacgccaccgaagcggcgcgtgcattgcgcgactgggcgtttgcgacgctgaagctttcgacgctcgtcagctacatggcgccggacaatgcgatgtcggctgcggtggcgaagcggttgggcggtgtgctcgatccgtcggcgccgcgcgaagaccccgacgatctcgtctatcgctatcgggtgcgctgaacggtcagttcgccatcccgtcacttcaggcacgttctgcaacttgtcgggattgtgggtcgcacaacagcaacgatccactcgccttcgacctgcaaggcggtcgcttggacaaggtcgtcctcgatggtgatgaagccgggcgagaaatctattgatccgaagcagccaactgcgccgtttggcgtccgccgttcaactctctcaactggttcacgtattcctcaggcttcaacaaatggaatggagctttcagacccatgaagttggcgatgcgaccaataaaggccgtgcaattggtcgtctccgcattccaaacaggcgaggtcgcctggaggtgcttgatatacgcaaaaaccttcttcgcgtcggcctcactcaggtaaacgcgatagctggccgtcaaatactgctcgtcgaggtcaccgtaacttgctccggtttcggagggcacccaagtcagatgtcccagcacataaggcaggacatcgcctgccggatgcagccccgcgacctcgacctgcttttcgcttgtcttgccgtaccagacaaacgcatgcccataggaagccgccgtgcgggcacgaaagtcgacgtagtatggccctttgactgaagcccttcgagccggcttcgcggctgcttcggaggcgggaccgttcggaccagcgacggccgctgccacaaccgctctcgtcgacggcttgcgcggcttgtcctgcggcagcggcgcttgatccgattgcgccgccaattgctgcgcatgaccgatgccggcttccaaagtcatggaagccacaatgacaccaattccggcaagcaaccgcaagccgttccgtttccggttggattctggcacgttcaagccctcacaagggtagtcaatcccaagcagcgccttgctgcccgagctatcccttcgtcacgatcggagcaggagcttttccgaccgggtacttgccgacgggggacttgccaaccggatacttgccgatcggtgccttgccaatcggagccgtttccgcaaccggctgcgggtgggggaggtctgccgcgctgacagcagccatgaaaccgaatgtcgcaactccagcaaccaggaacttcagcatcgtgatctccaagatgggtagcgtcaatatgaacagattaccctctaacggcgatggcgtaattaacgctctcgcaaagctggtgctcgcgcggtcgtttccttgccgagtgtggcaaaaacggcacggggctgtcgctttgcgtgtgtatccggacgtgagttcggcgagagcagcctgcaagccggttcagaaaagccgcggcaaaaggcgtccggtccgggccatatactggcgatactcgtcgccgaaggtgtccaccatcatctgctcttctttggcaatccgcccgaaaaacaaggttccaaatccgatcaggccagcgaaaccagccacccagttggggagcagcaatgcctgagcaacagcccagagccagaacgcggtatacatcggatggcgaattctccgataaataccgtctgtgatcaggcgatgattctcccgcacgtcgaggcttacggaccaattccgaccaagggctcggtgagtcagccggaacatgaccagcgccgcaaccgcgaccaaaacacccagccaggcttgagccggccggaaggcgtatgatgcgaaatgaggcatggccgtcgcggtgtagatgagtggcacaatgccaagacccgtgagcgatatcagcagcagggtgttttcgcgccagcctcgggcgctcctcgtgaccttttcacggcgagctcgacgcgcgtgtctgtagcggatgagataccaaccgaccgccatcatcacgaacacgaacttggcaatatcgggcgtcatcgtggaccacgcgcttgtgtcgctggcgccgcatcttcgccgatcatcgaaagggtgccatccttggcgagcgtccaggatctgacagaaacaggtccacagaccggcatcaaccaatcatacagcgcttgcgggtcgtttccagcgattagttggcagtccgacaggttggatcccgggcggatgcgttgccgggtttgcaccgttgccggatagcacgacgccggcacggaaaggctttttctatctcgcgcgcggcgaagccacggtggccctccggtctatctccaacacgcgcgggagcaactgcgacgctatgaaggcatgccccgcatccgtgaggtgaatgaggtcgaaagcgtagtactgcgcaggaatgtcttcgtcatacaaaatgactttgatggcgcgatcacggagccgccgctccatcgccgcgatgttggccgcccgctgctccttcgtgacgaggaagcgcctgtcgttgcctccaggctgcaagatgacgatgtcggtcccctttggcacatcgctgtcaatgcgcttgagcatcccggcggtggtgtcaaagggcactccggcattggcgacggtcgcgttgacgcccttttctctcagcaaggcctccagcttggccgggtaggcgccttgcttcccgacgtaccagccctgggtgttgcttgcgccgactgccacgatgtgaatcggcttggagaaggctgcgcacacggtcgccgcgcaacacagggcgatcgcgattgagagttttctgaatggcgtcactgagtccctctccggcttgaagtgctcaagaaaacaacaccgacaccgggctccttcaaggacctaatctaagcctcacaccttgcgtcaacaccaacttcaaatggtctttcgggtggtatgctaggaagtggtcgaagcccgggctgcaggtgaaaccaggttcgaaggcccctgatttcttcgtgggtgcgcgacagccgatccgattgagcggacctttcgtagcaccatgttatgcaacgctgggtccttatcgatgttaaagtgagtgatgtttacgtcacgaacataaaaatttgtcagctccccccggaaaccgggtccgcgaccgattcgaacgctttcactcttgtacagattcagaacgcgcccgacattggccgatgccatatgcgacgatgttccgtcaaatggaacaaccagcgcaacgggcacgcccatttgaccaaggtactctgccatcgacatcacggcatctgcaccaagagagtgccccaccaggatgataggcccgcgctggcctgccctatatctctcgatgatgtcgtcggcgacgcttcgccattgggtatgatttgcaacaactgcggcaacgccagccgcttgcagctgggcggcaaggctgtccatgcccaacgaaaagacgttcagtagtccgcggaacaagtaaacgtgcgccgtagaagacggcatgcgagcgggcgaactgatcgatctcagcgcaaccctcgttccgggcttcgcctgagccccgttgttcaaaaacaagctgcttgcaaaaacaatcatcaagccggcgcaaatcagcgctgcgctgtgccgcactctctccatcttcagaatcctcaccctcaggtctagtcgcattaaatcagactcgggaatcgtggcaattcatgaacggcttgaaaagcgcgttgaggcgcacaattgcctcactgtcgcgtatctgccacacgaagagcgatcgacgtgccgcgaccatcagggccctccacgtcaatgccgccaaaggacgccgcacttttttgctcaaggccaaactcaacgagtgccaccccgcggacgaagtggtaattttacaggtcaaagtccgcatcatccacgtcaggttcaccaaggaccggcgggcaacgaggaggcgctaatcatccgcaaaattccgtttttcagaacagatgccgatcaatttctttccagaaatcgagttgcctagatgatccagcggcggcacgtcttccatatcggtggttacgatccaatcacccccgaagagcaggtcgaacgcttgcggcggtcgctctcgagcttccaaaagatttggggcgcttcctcacggctgtcggaattatcgagcacttctgcaattagtgcttcatgcagcctggaagcgtgggggccgaactggaaaactcactccaccttcgaaatgctccgctgggatgatctcatccggtgcgacgcgaaagtcggcttcgtgtctcgcctcgttcaatcgttgaaagcgctgttcgatttcatcgtaacgggaacgatattcagatacgcgatcgcaagctggaagtacgctctctttttcatgtttccatattgctgtttgctgctgatcgcattttgcagcgttgggctgtcatatctgttgatcaggctcatacacgcgacattttggatagaattgctggttggattttttttgtcgcttgccatcttcgtcggcgcgatgctctggattggaccaaggcgcaggataaatcacattctcgatgatgccattttctcccaccaatttctttacgggcggaagagcgaacttgataagcggctcggcgcttttgcggacctgatagcaagaacggttcgggccgcagaagttgatgaagttctgattattggccattcccttggtgcggcgctcacaattgcggcggtcgcgcgcgcgctgaaatcggatcctccgctcgaagcgtgcggacccaagctatgcattctcacggtcggcgccactatacctaaattctcgctacatccgatgggggggcaaatacgggaagcggcgcaactcgtggccggaacgccagcgatagactgggtcgaataccaggcacgagatgacgcaatcagcttctatcgcttcgaccccgtcaccctgaaacgtgtcagtcgagaccatccgggttgccgcccgaggattcggcgcgtccagatacattcgatggtcagtccgatgcgcttcaaacgtcatcgcttcaacttcatgcagatccattatcagtttctgatgggaaacgatcagcgctcggcctacgactattgcatgattacttgcgggccgctcgacttcgacgtttcgacttcgccgtgcggagcggttgggctgttcgaggcggacggttcggtgatgacgaccgaagttgacgatcggcttgacccgtcatgtcgagaatagcgtagccggttgccagctgcctctgccggcacttgccggcaccaggttgttgagctgagtagggtgcgtaggcgccatgatagacgatcgggatccgggcgtttccgtcgccggttccgacgtcgtgtatggtgtcctctgctgctgccattgcggcaccttctgcagcttgtcgggattgccgggcacatgaacagcgacgatccgcatcaatagtgatccgctggctttctcctgcgcgacccccatatcctgagcgacatggaaatcattcgcgcggacgcgctcccaagatcggctgaggacgtcgatttttccttcgagattgatcgtatcgtcgtagagccgttcgatgcggtgccgttgcgcgtcgagccgctctcgcaaaggcataaagcctatgggctggacgatgcgctgtttgaacgatgcgacggcaccgacaaggtgctgttcctggcaagcgaagcgggaaatctcgccggatacatcaccgccagcctgggatggaacggctgcgccatggtcgatgatttcgcagtggcccgatcatttcgccgacgaggattggctagcgcgttgatggatcggattgtcgattgggcgcgtgacaaagggctgggagcgatccggttggagacccaatccaacaacgtcgcagcttgcagcttctaccagcgctatggctttgtcctcggcggctacgatcgatttctctatcgcgaactgggttcggacacggccgacgaggtggcactcttttggtatcttgatactcgctcccgtaagccgggcgacaaccgcataccgaacgagtcgtcgagggatgaagggctttgcccgcaatgacatcggcagctgcgccatcccgcgatgaggagaccgttgaagcggcttcacctcgctgacgggcccgcacgccagcgcctcgcgagcgcgactgggagccgcgttccatcgtgacaaaagcggctctcggcgaaacgagccaatcggagcggccgcacgtcattaaccttaatttttcctttcgattgtcagtaaaattttatcgattatcctcgtgacggttgagcggtgtgacgaaccgcacaatgagaggcgagagccgagtggctcgacggcctctctgaaatcgaagggtgggcagagcgcagtgccagccacctttcgggctgtccggcggcggccggcggggcaaatcaatttctgaagtgcatttgattgccagattgcggcgcatcgcgtgccgcatgatgcttcacaattgggatgttccaaatgacgttcgcgcatctattgatcgcggccggtggcggctttgtgctgctggccggcttcgtcgcatttgccctttggcgaaacgcactccattcgacagcgcggatttagcaaccggcgagatctgactccggcggcctcgctcatgggggtgagtgaagcctgcggggatggccgcaccgccgcgcggcctgacagccgagcaccgcgcctacaacctgccccaaggcgacgcgtgctcggctgttcattattcaaacgaccttcaccgttcgaagcattgatcgtgagagcaacttgcttcgacgctgagagcgtcggcgaggaagatcattcggtgcgtgtcgtggtggcggccccgttgcgctctctgcgcgtcaatgcggccgcgcgggaggtgcgatcaattccgtcgcatcggggatgttgtgcagcttgtcgggattgcgagtcacaaagatcgcaacgacccgttcgttctcgatctgcagggcggtcgtttgaacgaggccatcctcgatggtgatgaagccgggcaagccgttgatggttgcgtagcggatcaagcgtgagggatgcacaacgaacaggcgagcgagccccgcgaaccgctccatcgccgcttcgaggccgaccagcggtcgaacaggtgccgggacccggccaccgccgtcggcgtagaccacgacatcttcggcgagcatcgcgcgcaatgcggcgaggtcgccggtcctggtcgcagtgaagaaggcattggccagccgcaggccttcttcatcgccgaccacgaatcgcggcctggcatcgtggatatgcgcgcgggctcggctggcgagcttgcggcaggtcgcggcctcgcgtccgatcgtctcggagatggcgtcgaactccattccgaagacgtcatgcagcaggaaggctgcccgttccaacggcgacagccgctccagcgcgatcatcaacggcagtatcagatcgtcggcggtctcctcctgctcgggatcgaagaacggctcgggcagccacggtccgacataggcagcgcgccggcgccgcgcggatttcaattcgttcagggataggcgggtgacgatggtgtagagcagggccctgggatcgcgcatccggtcgcgatcggcggcgagccaacgcagccaggcatcgtgcacgacgtcctccgcgtcggccaccgagcccagcatccgataggccagccggatcagccgtggccgcagatcggcgaacatctcggctgccgcggtttcagccgcctctttcatgacgccgcccgaatggccgcggcagtcgcctcacggccacgcgcgaactgaattgccgtcgtcgccacgcgccgtccgaggtggcgcgcggtcgcgagatcagattcaggcggcgcagtgtcggcaccctcgtcggtgttcgactgcgcgccggcgccgagccagaaccccagccggttcggatcggccgctgatcccgatgcggagttgttgcccggcggcaggtcgagattgacccaatgcatgccgtgctgggcggcgaacagggcaagctggatcaaggtggagagcttatcgccggcgtgggcccccgaattggtgaagccggccgcgagcttgtctttccagcgatagcccttggacatcaccgcacccgaggttgcttcctgaaacgctttgaaggccgcggacgccgcgcccatgtaggtcggcgtgccgaagataaatgcttcagcatccagcaaacaatcccgattctgttccacgtcctccacaggcaccaacagggcctccgcgccatcgacatccccgacgccggaccagacggcctccgcctggcgccgggtgtggccatacgcgctatgatagatgatcgcgatcagggtgcgaccgccgccggttccgataggatgcatgctgtcctctgctgctgccattgcagaggctaagacaaggcagcgcgtcgaaacgtgacatgcgctgcgaatttttgcccggaggatattgcgccaattgaccgccgctcaggcggtcgcggtggccgccggctgctttgcatggggttgttttcgttattttggcgggagccggccgccgatctcgaacctgcgggtgatcccgatcgcctccaggaaggcctcatcgtggctgacgaccagcaaggcgccgtcataggcgcgcaacccggcctcgaccgcttccatcgagtcaacgtcgagatggttggtcggctcgtcgaggatcagcagcggtggcggcgttggcccgcccaggacgcaagcgaggccggcacgaagcagctggccgccgctcaggtccgcgacggtctgcagggccgcgtcggcgcgaaacatgaagcgcgccagcgcggcccggcaggcgttctcgccggcatccgggttgatgcggcggaagttgtccaggatcgaggccttggcatcgagcaggctgaccgactgatcgaacatcgcaaatcgggtcatcacctcgacggtgccgcgcaacgcggtcagctctccgctgacgagcttgagcagcgttgtcttgccggcgccgttggggcctgtgatcgcgacgcgttccggacccgacatgaagaaggtgaggccgcgcaggatcggcgcgtccgcgctgtggccggcatcggcggcctcgatgcgcagcgctatcctgcccgccggcagatgcgtcgacggcagctgcaccgagaacggttgcagcacctcgatgcgctgccgcgctgcggcggcaagctcgcttgcctgtgttcgcctgcgctcggcgagccgggccgtctcgccgccgctgtcctcgctgcggttcttgcgcagcccggcggcgatccgcggcaggtcgcccttggcccgcttcctcgcgccggcgccgtccttgcgcgccttcctctcggtggcttcccttgtcttgcggtcgatctcggcgacgcgtttttcggcatcatccagatcgtgtcgtgccgccgacagctcgatcgccttgcgcgcgcggtactggctccaattgccgccatagcgcggggcctccagcgaggtcagttcgacgatcgcatccatggtccccagcagctcgcgatcgtggctgacgacgatggcgccttgccgccaaccgacgagcaggtcgatcaccgcctggcgtcctgcgcggtcgagattgttggtgggctcatcgagcagcaggaaatcgggctgcgcgaaggtcaacgcagcgaggcgcgcccttgtggcctgtccccctgacagcatcgccagcggggtgtcgagcacgtcattcagtccgacgcgcgcgagcgcggccgcgatgcgatcgtcgagcgtccagtcgatatccgcgagctcctctgcgctcgcaaggccctgctccgcacggcgtaacgctgccaatgcgcggcgggcgccgaacaggtcgatgacggattcgtccggcctcacctgcaccgtctgatgcagcatcccgacgcgtccctgaaccgcgacggcaccggattgcggcgcctgccggcctgcgatcaggccgagcagcgttgtcttgccgatgccgttgcggccgacaaggccggtccgttcagggccgaaactgagatcgatgttggaaaggagaacccggccgtcaggcgcggacagggtcagattcgagagcgtgatcgatgctggcatggcgatggatatcccggtgggcaaggctgatgggcgttgctgtccggatgaaatccatggccgtcggcatcctctcgagttgatgattgatcagctttagtcgcgtattgcgccggcatcaaggcgtgaagcaaaacgtcaggcggcttcggcgaaggtccagcggtcgggatcgggggtgtggccgatcaaggcgagaccataagcgatcgattcgaactggtccgccgaggtcaatcgcgcctcgccgaagcgttccgcgaacagccgctgcaccgccggcacgaacgaggtgccgccggtcaggaacaccttctcgacgtcgcgcgcggtgatgccggatttcgcgagcgcctcgtccaccgtcgcgcccagccgttcgatgtcgtcggcgatccaggattcgaattcgtcgcgcgtcacggtggcgccgatatcgatgccttcgcgggcgaagcggaactcgacgcggtcgcggctcgacagcgcgaccttggtgtcggagacggcgcggtacagcgcgaagccgagatcgtggtcgacgatggtgatgaaatcgtgcagcggcgccggatcgagtgcggtgcgcgccagctgctgcaattcgcgcagatcgccgttgccccgcatcatcgcgagctggtgccagcgcgcgaggctcgaataatagtgattggggattggcagcaccttgtcgaacgagcggtagttggtgcccttgccgagccgcggcgacacgatgtggtcgacgatgcggtagtcgaacgtgtcgccggcgatgccgatgccggaatggcccagcggctcggcgcgcagcacgccgccctggcgcgagaagcgcatcacggagaagtcgctggtgccgccgccgaaatcggcgaccagcacggtcgcatcgtgatcgaggctgcgcgcgaaggagaacgccgcgccgaccggctcgtagacatagcgcgcatggccggcgccgagccgctcgaacgcggcccggtagcgctgcatcgcgagctcgtcattgggattgccgccggcaaatttcaccgggcggccgaccatgatggtcggggcgcccaaatcgaacccttcgccggcatggcgcgtcagcgtgcgcaggaacgcggcgagcaaatcctcgaacttgtagcgctgccggaatatctgcgtggtgttgaaggccgagcttgccgcgaaggtcttgaacgactggatgaagcgatggatcgtgcgtccctcgaggaattgctcgatcgcccacggcccgccctcggcgcgcggatgcaggccggcgccgggccgttcctcccagaagcacagcgcggagacatagacgctatgcgtgcggccgccatgctcgaagcgaacagcctcgacacggccgtcggcatcggacagcgcgaccacggtgttgctggtgccgaaatcgacgccaatcgagacggcgggcggagcgctcgacatgtcatgctcgggatttggtgtgaaagggggcggacctttagcggctttggccgggcttgccaacccttgccgagcgcgcaaaattcacgatccggcgaatgacaatgacttcacgcgcgacctcagaaattcgccacggtcttcagaccgaacaccagcgcgttcgggttcctgctggtgccgccgggatcgacgacatactggatgttcggccgcacctgcaggccggccagcggccggtaggtgtagtagagttccatgacgtattcattgccctggaccgcgaccggaccgaggccggccagattctgcagttcctccgaccaagcgatgcggccgttgacatgggtggtgccgactgcaaatccgatgtcgtcctcggggcgggattgcagaggtccggtgtaggtcagaccacccgcgatctgataatcggtggtcgcggtgcggcgatcggccatggtcgcgttgaagaacaggctcagcgcacccgcggaactgacctgcgacgagcggatcacctgctgaacgaagctgacatagccgccgtagcgtccgcggctctgcagcaggggctggccgctgagcatggccggactaccattgatatcggtgaccacatcgggggcggtcgacgtgtcgtaccagccgccgaatttgtagctgcccggcagattgccgaacttcggcagccaggcgatctcggccgggatcagcaggccggtcgaccccgaatagaacaccggaagcgccgattgcgacacattcagataattcggattggcgtcatagacgccgaactgaaaatagccgaagcccggtaggttgaacttcagtcgcgttgcccattggctgaccggccaattgtagatgtagttgccgaccaggttgccgggctgcgcgccgcagaaggtcaggttctggaaatcgcaggcgaaagatgcgaagtcctcgccgaaggtgatccgtccaatcttccagtcgatgaggtcaccgatgaacttctggtcgtaccagaactgcgtcagccgcagcgtctggccgcgtccgaacaattcctgcacctgctgtagcgtgccgagccgcgcgtcgtcgctcagattgctgccgttgcggtcggtccaagtgacctggatcgtgccgtcgggcacgacaccgagctttgccagatcaaacgtggtgccgaaggtccattgatcggtgtaggccgcatcacgccgctgaccgccggttgcgttgccggcgacctcgctggtgtagccgaactggaagtcgatgcccgcattcgacaggcgggtgcgcgcgccgttccagtcgccgagcagccagggaacaggtgcgggcgcggccgctgcgccgggcgtggtcagatcggccgcatgcgcgacgtcgccgcctgcacaggccgacatcgccgcgatgcccagccaaagatagatcgccgtcggatgtctcgctcggctgcgggacgacgcgcgcatgacgacgctccccggttcaatccttcaatgcgtaggcgatgacgtagtcgccgcgtttggtgccgaacgagccgtggccgccggccgcggtgacgacgtactgcttgccgtccgcttcgtagctcatcggcgtcgattgcgcgccggcgggcaggcggtcttcccacagcaccttgccgtcgcgcacgtcgtaggcgcggatcgtgtactcgtaggtcccggtgtagaacgcgacgccgccggcggtcgtgatcgggccgcccagcatcggaacgcccatcttgaacggaagcggcagcggcgtggtgtcccggatcgtgccgttgggatgctgccagacgatcttcatcgtccggagatcgatcgccgccatcgagccccatggcggccggtaacacggcacggacagcggcgagaggaagctcgagatgtccaccccgaacggggtgccgtacatcggctgcgtcccgacttcgctgccgaccggcttctcggcggtcggcgccggcggattctgcgggccgcgcgggatcagcctcgacctgaacggcagcgacatcggattggcgatcgcgatctgcctgacgggatcaaccgcgatgccgccccattcgaacatgccgagattgccggggaagactagcgtgccttgcaacgacggcggtgtgaaggtgccctcgtaacgaagctggtggaacatgatccggcacagcaactgatcgaagatcgtgccgccccacatgtcggcgccggtcagcttcgcctccggccggaacgtcagttcggaaaacggctgcgtcggcgcgctgcggtcgccgggcgcgggcccctgcggcaccggacgctccggcgccggcacgatcaattcgccggtcctgcggtcgagcacgaagatattgcccaccttggtcggctggatgatcgcgggaacgacgcccttggccgtggtgacgtcgaccaggctcggttgtgagggaacatccatgtcccagaggtcatgatgcacggtctggtacgaccaggcgcgcttgccggtattgacatcgagcgcgacgatcgagctcgaatagcgctcgaccaaagcatcgcgattgccgccccaaatgtctggcccgttgttgccggtcgggatgtagaccagatttagtttcggatcgaacgaggcggtgatccaggagttcggcgaaccgttggtgtaatgccgcgtcggggatggcaatgcattctcgtcagccgcgccggaatcccaggcccagaccagtttgccggtatagacatcgaagccgcggatcacgccggacggcacttcgaccgcataattgtcgatcaccgcggcagcgacgaccatgatcctgtcgctgacgaccggcggtgacgtcggctcgaagaagcccgcggtcttgatccccatgccctgctggaggtcgaggatgccgtgatcggcaaagccgtcgcacagcttgccgctgtcggcatcgagcgcgatcatgcggccgtcattgaccggtaggaagatccgccgcgggcactcggctggcgccgggctgccgccggagtcgacggcaccctgcgcggtctcgtgataggagacgccgcggcaagtcatgtgctggaacgtcttgttgtgcacgagcttggggtcgtagcgccagcgctcggtgccggtcctggcgtcgagcgcgaacagcacctgatgctgcgagcagagatagagcgtgtcgcgcaccttgatcggggtgacctcgaaggtggtttcgccggaatcctcaggcgtcgccacgtcgccggtgcggaagatccaggcgaccttgagcttgccaacattgtcgggtgtgatttgcttgagcggcgaatagcgttgtccgaactgcgtgcggccataggcgcgccagtcgccgtccggctgcgggtcggcttcgctttgcggcacggcaggcccggatgcggcaatcgtgccgttgatgtcgtgatagctcgaaagcagcgcggccacgaggacggcagctgatgccacgacgccgatccagagcggcgctgtcgcgcgcgcgtaggacataggctcgcctcgaatcagggcgcgaacgatcaccggcgtcagcagccagagtgccatcgggaagatgatgtcgccgcgcgccgcgagcggccaccagtcgagacgcacctcgtgcacagcccacgccagcgtgccgaccagcacgatcgcaaacagccatagcgcggagcgccgctgcatcagcagcaacgccgccgtggcgaggacgccgacgccgaggacgatgtagaagatggagccgcccagggcggcgagccagattccgcccgccgcgaggaccaggccgatcaaggcgtagacgatggctgtgataaggactgccctggatcgctgcatggccactccggtgcgcaagagggaccgggcttgtcgtgcaagcgcaaaagaccgtgtccgcctgcaaggactgtggttcagccaatcgcaacttgcaacctggaactgcggcgtggatgctgccgccggcgctgacgcaaaggtgagggggcttcagcgaattttgtatcgacgcgcccttccggtcccgcgcaggcgctgctctataccgtcggcagatttcatcgccgaaagctggctcgcaggagacgcacaatgacactgaaccctacagccaagaattatcgcgtcgcggtcgccgcctacgaggcaggccggccgagctaccccgcggagatcgtcgccgcactgccgcttcaggccgcgcgctgtgtcgttgatctcggcgccggaaccggcaagttcacccgcctgctgctgcagcatctgcccgcgaccacgcgtctggttgcggtcgaaccggtcgccgaaatgtcggccaagctggcgcaggaagcaagggtggaggtcatcaacacccgcgccgatgcgatcggtcttgcaaccggcagcgtcgatctcgtgacctgcgcccagtcgttccactggttcgacaacgaggcgtcggtcgccgagatcgcacggctgctgcatcccggcggcacgctggcgctggtctggaacaacagggatgatcgtgcgccatgggtgcacgcattgtccgccatgattgaaggctacgccggcgacacgccccggcaacgctcgggacgctggcgctggatcctgaacgatgcccgcttcgtgctcgagaaggaaatcgtgcaggaccatccgcaccggatggcgcgccaggacgtcttcgagcgcgtcacatcgaccagctatgtcgccaatcttcctgatacggagaaggcggcccttcgcaagaagaccgatgacatcctgcgtgaggccggtctcggtgacgccgacgaggtggtgtttccctatatcacgcagctctttctgctgaaacgggtctaggtcacgctatggcacggcacgtccttgctcgacgacctgcttcaggcgtggaagagtcatgcgccaatagaacgcgacgtgcttcgcgccttactcggagccgatttcccatccgttcctgcggcggatcggtgacggcggcacctgctgggttacggtcagcaccgtctcgccgccgtcggtcgtgagcgtcatcataacagtcgcataggattgcggaacgtcgggcaggccggagacctgcgaccaataggagtatgcgagcagcattggcggctcgatgcggatgactcggcccttgtcgcgatagtgcttcgcgccgatctccgcctcgatctcgatcggcgcaccgatctgccagtccgtcgtgaaatgtgcgttgcgccacgtctcgcccgctttgggatccaggatcgcgtcccacacatgcttgggccgcgccgcgatgcggatcgactcggtgacggactggaagaccgggatttcgttcgtcatcgcatgctcacttgtcgcccacgatcttccatttcccgtccgcgccacgccgcagcgccggatcgccgatccggatgttgcttgccagaaaatcgatgaaggcgcgcacccgtgccggcagcggaccggcgtggccgacatagaccgcgtggatgtcctcgcggtcgcccggattgaggttttgcagcaccgggaccagacgcccggcttcgatgtcggggccgatatggaacagtgccagccgcgcgacgccgatgccgccgagcgtaagctggcgcgcggtctcgccgtcgctggcgcgagcgaccggcggcggcaatgcttcctcgatcttttcagcccggcggaacggccagccgcggatgctgcgcggaaaggtccagccgatgccgcggtgggcggcgaggtcggccggcgtcttcgggatgccgtggcgggcgagataggacggcgcggcaaccaccgccatgcggctggtgccgagcttgcgcgcgatcagccgcgaggcgccgagcgggccggcgcggatcgcgacatcggcacgcgcctgcatcagatcgaccagcgtgtcggtcagcacgacgtcgagcgtgatgtcgggatgctcgcgcatgaagcgcggcagcagcggcatcacatgcagcatgccgaacgggatgttgctgttgacggtgagatggccgcgcggcacgcaggaggcggcctcgcgctcggcctcgtcgatgtcggcgaggatgcgttgcgcgcgctgatagaacgcctggccttcctcggtgagctgtagcttgcgcgtggtgcggttgaccagccttgtgccgagccgcgtctccagccgcgacaccagcttgctgacgcccgacggcgtctggcgcaggctgttcgcggcggcggtgaaaccgccgaggtcgacgacgcggacgaacacgtccatttcgccggagcggttggtgtcggtacgagccatcttgaattcacgtcacaaatgattggatttcggccattctaatccttcctcgcccgggccgctatctcgcattgcggaatccttaccctccggagcgacacatgcctctcgcagtccttgccttgaccgccggtgcctttggcatcggcaccaccgaattcctcatcatgggactgttgctgcaggtcgccgccgacatgcatgtgtcggtctccgcggcgggcctcttgatctccggctatgcgctcggcgtgttcgtcggcgcgccgatcctgacgctcgcgacgcgcaagatgccgcgcaaggctgtgctgctggcgctgatggcgatcttcacgctcggcaacgcggcttgcgcggtcgcgccgaactacgacctcctgatggccgcgcgcatcctgacctcgctggcgcacggcaccttcttcggcgtcggctcggtggtcgcgaccagcctggtcccggaagacaagagggcgtcggcgatcgccacgatgttcatcggcctcacggtcgcgaccctgctcggcgtgcccttcggagcctggttcggcctgatgctcggttggcgcgcggccttctgggcggtggctgtcatcggcgtggtcgccttcatcgtgctcgcggtgctggtgcccggccatgtcggcgccaaggacaagccggcgccgctgcgtgaggaactcgccgtgctcggccgcccgcaggtgctactcgggctcgcgatgacggtgttcggctttggcgggctgttcgcggtcttcacctatgtgcagccgatcctgacgcggctcaccggattctccgacgccgcggtgtcgccgatcctgctggtgttcggcgccggccttgcgatcggcaatgtcgcgggcggtcggctcgccgataaggggcttgcgcgtgcactgctggtgtcgctcggcgggcttgccgcagtcctcgtcgcgctggcggcggtggtctcgatcaaggccttggctgtggcgctcttgttcgtgctcggcatcgcatcgtttgcaactgtcgctccgctgcagcttcgcgtgctcgaagccgcgggcgccgagggccggacgctggcgtccagcctgaacatcgcggcgttcaatctcggcaatgcgctcggcgcctgggccggcggcgtcaccatcgatcgcggtcttggtctcggcgcactgccgttggttgcggccgttatcaccgcgatcgggctgctgctcgcgctgtggagcctgcggcttgatcggcccgctgtgctggccgcgcagtgtccggcggaatgattggcatcacaaggagtacgaccatggaatatcgcaatctcggcacgtcgggtttgagagtccccgtgctcagcttcggcaccggcaccttcggcggccagggaccgttgttttccgcctggggccgcagcgacgccagcgaggcgcggcggctgatcgacatctgcctcgaggccggcgtcaatctgttcgacaccgccgacgtctattcgaacggcgcatcggaggagatcctcggcgccgcgatcaagggccgccgcgacaaggtgctgatctcgaccaagaccggcctgccgatgggcgacggcccgctcgatgcgggcacgtcgcgttatcgcctcgtcgccgcggtcgacgccgcgttgcgccggctcggcaccgattacatcgacctgttgcagcttcacgccttcgacgccttcacgccgatcgatgaagtgctgtcgaccctcgacacgctcgtgcgggccggcaagctgcgctatgtcggcgcctcgaacttctccggctggcatctgatgaagtcgcttgggatcgcagagcggcacggctggccgcgctatgtggcgcaccaggtctactattcgctggtcggccgcgactatgaatccgagctgatgccgctcgcgctcgatcagggcgtcggtgcgctggtctggagcccgctcggctggggccgcctcaccggcaagatcaggcgcggccagccgctgccgaacaacagccgcctgcatgagaccgcgaagttcgggccggcggtcgacgacgagaagctttacgcgatcgtcgatgcgctggacgccgtggccgcggagaccggccgcaccgtgccccagatcgcgatcgcctggctgctcacccgcccgagcgtgtcatccgtgatcatcggcgcgcgcgacgaggcgcagctgcgcgacaatctcggtgcggtcggctggtcgctctcgccggaccagatcgcgcgtctcgacaaggcaagcgccgtgatgccggcctatccctactacccttaccggatccaggagggctttgcccggatcaatccgccgccggtgtaggcgtaggccgatcgctggctagcgtcgcgatctcacgcctcgagcttggtctcgcagacctgccggcggtactccgccggcgtcacgttcatgtgctgccggaacacgcgattgaggtggctctggtcggcgaagcctgccagcagcgcgatctccttcagcgccacgcggtccctgcgcagatgctggcaggcatgctcgaccttgcgccgcagcacataagcgtgcgggcgcatgccgtaatggacgcggaacttgcgcgcgaactgcaccggcgtgcaattgcagatgttcgcgagctcctccagcgtgatgttccggaagatgttctgctcgacatagtcctctatcagccgcgcgtgcgctgggcgaaagcgcccctgcgcgcagggcatcttgaactcgatcgcggcgtatttgcgcaggatgtgcacgctggcctgcagcgccagggcgtcgtagcagagccggccgccgggaccgcccgcggcgatttcctggaccatctggtcgttgatccaggtcagcatcggatcctcgaccttgagcagatcgtggagctcgaccgtctcggcgtcgcggtcgaacgcttcgctggcggtcttcgtcatcagcgtcggcgagatgtagaaatggctgacctcgatgtcgtgctgccagcgccagttcgagggctcggcgcgcgtcaagagcgtcgtgacgccgcggccgacatgatcctgcttccaagcgccggtgacgcggcggttcatcgatgtgacgccgtcgcgatagatcacgacgaggtagttctccgacggcgggacccagatgtcggatggcgcatagcggaatatccgcagccggaaatcgttgcggccaaccggcgtactatccagcttcagctcgccgggagcgtagcgcggcagttcctcgaccgtgatcaactggcccatcgcgcgagcctcctccctggaatccgcggcgcgattgacggcttcttcttggccggacggctgcgcacaggataggcggctttcacggtttgccaaggcgacctatggccgagcgccgcctgcagccgcgttccagagattgtcggtttcatccaagccccgcatgccgcaagggccatagcctccggtgcgttccggcagccccaccgatgccgccgaggacgaaattggcgcaacgcaccgtcatcccgcgatgcagcggatgggaaggagcgggcgagacaccacacaggaggaaaccatgaccgcgaccgcaaccaggtccaatggaagcaatggcgtgcacgcgacatctaaactcgacgccgtggtgatcggcgccggcgtcgcgggcctctatcaactgttccgcctgcgcgagcagggcctgaatgtcagggctattgacgcaggatcgagcgtcggcggcacctggtactggaaccgttatcccggcgcgcgcttcgattccgaaggccacacctatcagtatctgttctccgaggagctctacaagggctggagctggagcgagcggtttccgggacagcccgagatcgagcgttggctgaactatgtggccgaccgtctcgacctcaagaaggacatccagttcgagaccacggtgaaaagcgcgcatttcgacgaggcggcgcagcgctggcaggtcacgaccgacaagggcgaagtgatcgacacccagttcctggtcacctgctgcggcatgctctcggccccgcacgtgtcgttcccgggacaggagacgttcaagggcaagctgttccacaccgcgcgctggccgaaggggccgatcgaactcgccggcaagcgcgtcggcgtggtcggcaacggcgcgaccgggatccaggtgatccagtcgatcgccggcgaagtcggtcatctcaaggttttcatccgcaccccgcaatacatcatcccgatgaagaacccgaaatgggatgcggcggacgccgaagcctacaagtcgaagttcaagttcctcaccgaacggctgccgaagacgttcaccggcttcgaattcgacttcgagcatgcctgggccgacctgacgccgcagcagcgccgccaggtggtcgaggattgctggaacgacggatcgctcaaattgtgggtgtcgtccttcgccgaattgttcttcgacgaatccgtcaacgccgagatcaccgaattcgtgcgcgcgaagatgcgggagcggatcaaggatcccaaactgtgcgagcagctgattccgtcggactacggcttcggcacgcaccgggtgccgctggaaagcaatttcctcgaggccttccatcggcccaatgtcgagatcgtcagcgtcaaggataacccgattgcccgcatcacgcccgagggcatccagaccgcagatggcacggcgcatgaattcgacgtcatcatcctggcaaccggtttcgatgccggcaccggcgcgttgacgcggatcgacatccgcggccgcgacggccgttcgctgaaggaggattggggccgcgatatccgcaccaccatggggctgcaggtccacggctatccgaacctgttcacgacggcggtgccgctcgcgccttcagccgcgctctgcaacatgaccacctgcctgcagcagcaggtcgagtggatcgacgattgcatcaagtacatgcgcggcaacaacctgaacgtcatcgagccgtccagggatatcgaggatcagtgggtggcgcatcacgatgagaccgccaacgcgaccctgatcgccaagaccaactcctggtatctcggctcgaatgtcgagggcaagccgcgtcgcgtgctgtcctattgcggcggtgtcggcacctaccgccagaaatgtgacgaggtcgccgcgagcggctatcgcggcttcgcgatgcagtaggcccgatcgcgatcggatttggtagcccggatggagcgaagcgtaatccgggaccagtgacaccgactgccaaccccggatttcgcttcgctccatccgggctacgcaagtcaacatcacaagaatatttggaggaagacaatgagcgcgaatttcagtgcggcagcagatgcaattctcgatggcgtcgtgacgtcaaatccacgcgtccccggcgtcgttgcgatggtgaccgaccggcatcgcaacatctacgaaggcgccgcgggcaaacgccggctcgaccagccggccgacatgacgaccgacagcgtgttcgccatcttctcgaccaccaaggcgatcacgggcaccgccgttctgcaactcgtcgaggaaggcaagctcgatctcgacgcgccggccaagacctacgcacccgacatcggcaggcttcaggtcatcgagggctttgacgacaagggcgagccacgcctccgtgcgccgaagcgcgacatcaccacccgcatgctgatggtccatagtgcaggcctcagctacgatttcatcaatcacacctacaaccgccttgcgcaggagaaggggcagccgagcgtcatcacggcgtccaaggcctcgctgatgacacctctgctgttcgatcccggcgagcgctgggaatacggcaccaacatggattggtgcggccagatcgtcgaggcgatcaccggaaggcggctcggcgaggtcttcaagacgcggatcttcgaaccgctcggcattcgggataccacgttcgagctcaccgatgcgatgcgccgcaagcttgccagcatccacgcccgcaatgccgacggctcgctcacgccgatggatttcgagttgccggccaatccggaaatccacatgggcggccacgggctctacggcacgatcggcgattacatgcgcttcatccggatgtggctgaatgacggcgccggcgagcatggccgcgtcctcaaggccgaaacggtgcggatggccgagaagaaccatctcggcaacaacaaggtcactgcgatcaccggcgtgatcacctcgctcgccaacgacgccgaattcttccccggccagtcgaaatcctgggcgctgagcttcatgatcaatgacgagcaggcgccgaccggccgccccgccggcgcgctcggctgggccggtctcgccaatctgttctactggatcgatcgccagaacggtttcggcggctactgggcgacgcagatcctccccttcggtgatccgacgtcgttcatcggctacatgaacttcgaaacggcgttctacgaatccctcaggctgcgcaaggcgggttaggccctgatccgcaagagcgcgatgacgatcaacccaatcgcatcgcgcttttgtgccgcctgccgcagccatctctgcccgatcaacgggacggctgcaccttcggaaacaccatccgcatgcaggcgccgccggacggcgcctgatcgacttcgatccggccgccatgcaggcgcatgatgttctgcaccaggtcgaggccgaggccggcgccgcgtccgcccggatgcagccggcggaacggctccaggatctgctcgcgctcgtcgggcggaatgccgtcgccatcgtcgcagacctcgatcaggcccgccgccgtgacccgaaccaggatcgtgccgcgccgccgtccgtggtcgatggcgttctgtaccagattggtgagcgcacgctcgatcgaggtctgatcgccgttcatcacagtggtctcgtcctcgtgctcgaacgacatctcgtagccggccgcgaaggcgagcggtgcgagatccagcacgacctgccgcgcgaccgcgacgaggtcgatggcggcgaacgtgtcggcctgctgatccagccgttgcaagtccaggagctggccggccatgacgctgagccgggtggcgtcttcgagcagataggtcttctccggtccgggttcgagtgaggcgacccgtgtcgaaagaatcgcgatcggtgtgcgcagctcgtgcgcggcatcggcgaggaagcggcggtggcgttcgtaacccttgtcgaggcggtcgagcgcagcattgatcgccttgacgagcggggtgatctcgatcggcaccttgtcgagcggcagctgcacgccgcgctggtcgatgtcgatgcgttcggcctgcgccgcgacttgcgccagacccgtcatggcccggcgcaccacgaacggggtcgcgaccagcgtcgccagcgtcatcagcacgatgatcggcagtatcatgttgaggaacagcagcggggtgctctccagcgcgcgccacatcgagagctggccgtacgtgccggtcaggatctggatccgtcccgccgaggtgtcgacccatttgacgagacccgccgggcgcgtgacttccgccgcgttccatttgagccgcgcctcgctcacatgatcgaggctcgatgcgatcggcgcgaattccgcgggcaccgtgccttcggacaattggtgcccctcgccgtcgcggatgacgaaccagaggtcggcgtgctccgcgcgcagagcggcgagctccggcgttgcgcgtagcgccaatccgcccgcttcatcgcgggtgacggcgtcccgcaacgtatcgagcgtgctgccttcgtactcgccgatcaagagccccgcccggagcaacccgatcgcggcggctccgatcagcagaatcagcagcgtcaacgtgaccgcctgcaggcccgcgaggcgcccgaccagtcgccaggtcagggatcgtggtcgcagcacgctcacggcgtttcccgcagcacgtagccgaggccacgaaccccgttgatcgtgacgccggcgtcggcctccgtgagccggcggcgcaaacgcgacacatgcgtgtccagcgcgttgggctgcacgtcgtcgtcgaggccgtagaccgcctccatcagcgcggaacgctgcaccatgcgccccatccgatgaagcagcgtctcgagcaccagccgttcgcgacgcggcatctccagcgggcacccgtcgacactggcctcgcgatgggtgaagtcgaacgacaggcggccgatccgcgcggcgtgctgctgcacattggcgggccggcgcagcagcgcgcgcaaccgtgccagcagttcctcgaacgcgaacggtttgccgagataatcgtccgcgccgctgtcaaggcccgtgacccggtccgcgagctcgccgcgggcggtcagcaccagcaccggcacggtgttgccgctggcgcgcagtttcggaatcagcgacagcccgtcgccgtcaggcaattgccggtcgagcacgatcgcatcgtagcttcctgcggcggcgatcgcctcggcttccgacagatcaggcgcgtgatccaccagcatgtcgtgacgcgcgagtgccgcacgcagcgctgcgaccatttccggctggtcctccaccaacagcacgcgcattcgtcaccttcatccctgtatcgggttcgtcattggtctgccggctttatgtccgattcattgcggcaaccttgcggtttgctccgcgccaatgcgtcgcggagcgaaatttcgcacgcgcgcccgttcgcgacaggctgccgcaagcttcgcatgagacagagggctccatcggagcgggtcgaatcgtcccgtcaccgaccgacacgacgctcaaccggcgggcgcttcctccacacgatggtggcacctgcaatgcgaaagatacgtaaatggctttaacgaatccgcggcgcgagatgcgcaacgcgcccatcgtgcgggagctccagcatgtcggccgctgacatcctgccgttcttccgcgcctgggtgcgcaatccgctcggtgtcgccgcggtggcgccgtccgggcccgccatctcgtccctcatggtgcaggagatcatggcggacgccggtccggtgatcgagctcggtcccggcaccggcgtcttcacccgcgcgctgctgaagcgcggcgtgaggcagcaggatctgacgctggtggagtacggctccgagttcatcccgctgctgcagcggcgcttcccgggcgcccgggtgctctggatggacgcggcctggctgtggagggagaggctgttcgaaggggcgccggtcggcgccgtcgtgagcgggctcgggcttctcatcatgccgccggagaaggtcacgacgatcctcgatgccgccttccgctatctccgcgccgacggtgcgttctaccagatcacttatggcctgcgttgtcccgtgtcggacgcggtcctggatcgcctcgatctgcaggcgagctgcatcgggcagacgttccgcaacctgccgccggcgtccgtgtaccggatcagccgccgtcaccctcacgcttgaacgaggcagcatggacacgtcgagcacgatcgcgatgtttctgcacttcggcctggtcggcgtcggctgcctcgccgttgccgagaagttcatcccgttattgccgtcctacgtgctgctgatgctgctcggaatgaccatccccgacggcgcgacactcgcgatgaccatcctggcgaccagcgccggatcggtcatcggcgcgatcggctggtacggccttgggcgcgcgctcggctcgcggcgcatcgaagcgctggtggcgcgcttcggcaaattcgtgctgttgcggccgtcgctctaccagcagctcaccgatgcctatcgcggcaatcatttctgggtgacgctgatcggccagaccctgcccacggtgcggatctatctggcgctgcccgccggcgtgctgcggctggagccgcgcgccttcgtgatggcgaccgcgatcggcaccgtgatctggaacatgccgttcctcagcctgggctatgcgctgcgcggcagcggccatgatccggtcagcctcggattctgggtggtggtcgtcctgatcgccgtggaagtcgcgctcttcgttggattccgcttctacaagcgctcgctcgcgccgcggcctttcgcggagccgctcgcgctcccctcacgcttgccgatggaggaaggtgcatgagagtcgtgttgtcccgcctgcggccgagttcgcacaccctcgaaagcgcagccgccgcgctgctggtcctggctgcgagctatcagttcggtgtcgcagcgtccggcgggcgatatcgcacggccgagttcgcgctgctggttctcgcggcaggcatctattggcatcgctcgatcttccggcgatgcgccagccgcgatatcaccagggttctcgctggattggccgaggccatggcgacggcattccggcgcgacggcagtgaggccgatcgagatgtccggcttcggggacacggcgaccgtgccggcgcagtgcggctctcgtcgcggcatgtcgtcaaggtcagaagcctgttcatctccgacgtccatctcggaaccagggggtgccaggccgagcggctgatcgactttcttcggcaccatgatgccgaaaccgtgttcctggtcggcgacatcgtcgatggctggtgcctgcggtcgagctggtactggcccacggcgcacaatgccgtcgtgcgggagctgatcgagctcgcgcaacggggccgacgcctggtctacatccccggcaatcacgacgaatttctgcgcgactatgccggcgcggcgttcggcggcgtcgaggtcgtcgaacgcgcgatccatcgtggcctcgacggccgcgactatctcgtcgttcacggtgatcatttcgatctcgtggtgcggcatgcgcgatggctcgcgctgatcggcgatgtcggctaccgggccgcgctggcctccaatgtctggctcaaccggatcaggcgccagttcgggttcggctattggtcgttttcgtcctgggcgaaattgcgggtcaagaatgcggtcaaccacatcggccggttcgaggaggtgctgtcctccgaggccaggcgccgcaacgttcagggcgtgatctgcggtcacatccaccacgcggcgatgcacgacgaattcggcgtgcgctacatcaataccggggactgggtggagtcctgcacgggcgtggtcgagcgctatgacgggcagtttgaaatcgtccgatggacggatccgcagccggcgtcgaacgcggcgggcctcgcgccgctcgtggaggcggtcgcgtgatgcgcgtgctggtggcgaccgacgcctggcgtccgcagatcaatggtgtggtccgctcgctcgagtatctcgccagcgaagcgccgtcgctcggcgccgatatcagctttctcacgccggctgatttccgcaccgtgccgctgcccggctatcgggagatccggctcgcgctgccgtcgatcgggcggatcgagcgtgcgattgccgctgctcgcccggactcggtgcatatcgcgaccgaaggcccgatcggctggatcacccggcacgtctgccagacgcgcggctatccgttcacgaccagctatcacacccggtttccggaatatctcgcggcgcggctgccggtcccgttgcggtggagctacgcggcgctgcgccgtttccacaatggcggcgacggcatcatggtcggctcgccgtcgctcgagcaggcgctgaaggcgcatggcttccgcaagctgatgccatggtcgcgcggcgtcgacgccgagctgttctgtccgcgcgtcgagcggccgcttgccttcgcggcgccggtgttcctctatgtcggccgcgtcgcggtcgagaagaacctcgatgcctttctcggtctcgatttgccgggttcgaaagtcgtggtcggggatggcccgctgcgcagcagcctgcagaccaggtttccgcaggttcatttcctcggcacgcggaccgggcgggcgctcgccgatgtctacgcgtcggccgacgtcatggtgtttccaagcctgaccgatacgttcgggatggtgctgctcgaggcgctggcctgcggcgtgccggtcgccgcgtttccggtgatggggccgctcgacgtgatcggcaaatcaggctgcgggtgcctcgatgatgacctgcgccgagcggcactcggcgcgctgcgtgtaccgcgcgagaaatgccgcgcccacgctttgacctttacctggcaggaaagcgtgcggcagttcctcgacaatatcggccgcgcgcacgcttcgccggcgtgcgcggccgtcgcgggagcgatggccggctgactagagcatgatccggaaaagtgcgaagcggttttccgaaaagattatgctcaaacaaagagctaaagcgcgatgacgattcgacccaatctcatcgtactttagctgccgagcagctccgtgatcagtcctgcggccttgatcccggtgccgctgatgatcacgacggtgcgttccgtcggccggatcgcgccgcgcgccttcaggacgtcgagcgcggcggccgccgaggccgaggtcggctcgacgaacaggccggtcaacgccagtcgcttcaatgcggcgacgatgccgtcttcggggatcgcgaccgtgccgccgccgctctccttcagcgcagcgatcatctgcttcagccgcagcggatgcctgatcgcggtgccttcggcgatggtcttgcggacttcgcgatcgaccggcgtgtcgacgccggcggaaaagctcgcatcgaccggcgaacaattgagcggctgcgcggcgaacagccgcggcaatcgcgtgatctgcccggctgcgagcagttccttgaagccgatgtagcagccgagcaggctgctgccggcgccgaccggcatgatgacgttgtcgggcgcggtgaagccgaagtcttcccagatctcataggccagcgacttggtgccttgcaggaagaacggctgccagttgtggctggagtagaagatctgcttcgactgccggatcgcttccgcttcggattcctcgcgcgggccttccaccagctgcacctcggcgccgaaggcgtgcatctgcgccaccttcatcggcgacgtcgtcgccggcgccaggattttcacccgcatgccgccggccgcgccataggccgagaccgacgcgccgccattgccggagctgtcttcaagcaccgcatcgacaccgagctggcgcagcaacgacagcatcaccgtggtaccgcgatccttgaagcttgcggtcggattgaaccaatccagcttgaaatgcggccgcagatcgccccacgccttctcgacggcgggcgtgcagccttcgcccatcgtgatcggttgcctgatctcgaccggcagcgcggcgcggtagcgccacagcgaccgcgtcccgcgctcgacctcgtcgcgggagatgcccggcagcggtgtgacgagcaaaggcttgccttcgtcggagcaccagcgcgggatatccagcgggtagagctttccgttcagcgggtcgacgtagctgggtgaaggcatctcgattcagtcctcaaggggcgggccggacaggtctcgtccaagcacgaaagccggcagggtcgcaaggttgtcacgaaccatgatcggggcgggcgccccttccggaaggttcattgcggctcgattatgccaccaagtcggcaagtgcacacgtgccgttccgaacagatcataggccgatcccgcgacgaacaggcatcgatttgcggggatcggcaattcgtcgagcgcgagctggtagggttgcggctgcggcttgtagtagcccgcgcgctccgccgtcacgaacaccgtgagcgggataccgaggcgatcggcggcgatgtggccgagccgctccgagcagttggtcacgacgccgagcgcgacaccggcctcgtgcagcgttcgcaggacatcgcgagcctcgggccagggatcgagctccgcatagcgtgcgccaagctcttcggcccgttcgaacggcagcccgacattgtgtgccgcttcaccgaccagatcctcataggggcgataacggccggtggcataggtgttcttgagatactcggcgcgccagcgcagcccggcctcgtcggagcccgcgaccttgttccaaagcgtccagctgtcgagcagcgcggtcaagaggtcgaacaacacggcgtcataggctcgtttcatgggctgcgctccgtctgctaccatccgcgaaaccgctcccattgcctgacggtgtcggcgcccgcagcgacgacatgataacggtcgtgctgggctccggtggcgcaggcatggttgggcaggatccgcaccttcgcgccgaccggcagcgcaacctgcggcgcggtgctgccgggacggagcgcgatgatgccgtgctcctgattggtctcggtcacgatgaggtcgggatagggccggccatcgacgtcgcagacgatgccgtagccctggtcgaccggctgcttcgcggtgccgcgatcgcgcgacagcgccatccaacccgcgtcgacgaaggtccagccgcggtcggcgcgatggccgatcaccgtcgcgagcaccgacaatgcgatgtcgtcgaccgcgcagaccccgatcccggccatcaccaggtcgaacatcacgaacacgccggcgcgcacctcggtgacgccctcgagccggcgcgcgaaatgggccgtcggcgtcgagccgacgctgaccacggggcagggcagtccggccgcgcgcaacgcttcggcgcagcctaccgcggcggcgcgctcctgcccggcggcctgctcgagcgccgccacgctgcggcaggaataggattcccccgcatgcgccatgacgccgcgcaactcagcgccgccctgatgcagcgcgcggccgatctcgaccagcagcgggtcgttcgtgcccagaccggcgcgatggccgtcgcaatcgatctcgatcagcgccggaatgcggtcgcccgtcatgcgcgccatcgcggtgacggcggccgcctgctccacgctgtcgagcaccacggagaggtccacgccccgccgccgcagcgcggcgacgcgatcgagcttctgcggcgcgatgccgacggcatagaggatgtctgtgacgccatcagcggcaaaggcctcggcctcctgcaaggtcgagaccgcggccgggccgcccgggccgtccatcacggcgcgcgccgccggaattgatttcgcggtcttcagatgcggacgcagcggcactccgagccgcgccagccgcgtcttcaggcgggcgatgttgcgcagcatccggtcttcgtcgaggaccaggcagggcgtgtcgatcccggcgagcggatgcggtgcgttcgaggcaggggctgatgacatccggcgagactagccgtttcaatgctaagtacaatttaccgaatgtcattgttatattaagtctggacttaatgatatcgaccgacgacatccgcttcttcatggccatcgctgcggcccggtcgctcgcggccgcggcgcgagcgctcgacgtgacgccgtcggcggtctcgcagcggctacagagcctcgaacagcgtttgggcgttcaactggtcagccgttcggcccggcggctgacgctgaccgatgagggcgagctgctggtgctgcgcggcggcacgctgcttgacgacgcgacggagctgaccgaagcactgcaggcgcgtcgcggcaccatcgccggccatctgaaggtgcttgcgccgctcggcttcggacggcgccatatcgccccggtcgttgccgccttccgatcacgtcatcccgaggtgtcggtcgagctcgaactgtccgatcggccgggccgtgccgcggtgcgtgcgtgggatgtgatgatccacatcggtgcgctgaaggactccacgctgcgcttgctgcgcctcgcgccgaacgaacggtatctgtgtgcttcaccggcttatctgaaacggcggggaacgccggcgcgcccgcaggatttgcgctcgcatcagtgcatcgcgctgcgcgagaacgaggaggacgtgacgctgtggcggttctcccgcaagcgcgcggcgtcggagcctgatgtggtcaggatcgagccgatgctgtcgagcaatgacggcgaggtcgtgaagacttgggcgctggcgcatcacggcctgatcgtgaggtcggagtgggatgtcgccgaggatctcgccgccggccggttgatccgtgtcttgccgaaccatcgcctgccgtcggccgacatcgtcgcgttgctcaatcccgggcgcggcggccgcgcccgacgcacgcaggctttcgtcgagcagctgcacgccgcgcttgcgccgccgccatggcgcagcgggccgcgctaaagcatgatccggaaaagtgcgaagcggttttccgaaaagatcatgctcaaacaatgaaccaaagcgcgatgacgattcagcccaatctcatcgcgctttagctgcgctcacgctgcgccggcctgcttgctcaagtagctcctcgcaaaatcgagataccagtcgaggcatccaggattggccatcgcatcgcggttgatgaccttctcgacggggtggccgagcaacagcttcttgaccggaagctcctgcttcttgccggacagcgtgcgcggaatctccgccaccacgaagatgtcgttgggcaggaagcggcgcgacaatccggcttcgactgcctggttgatcctggccttcatcgcggcatcgaagacaacgccctcgcgcagcaccacgaacagcggcatgtagctgtcgcggccgagatattcgaggtcgaccaccatcgaatccagcacctcgggcagcgcctcgatcgccgaatagagttcgctggtgcccatccgcaggccatggcggttgatggtggcgtcgctgcggccatagatcacgcaggagccgtcgggttcgatcttgagccagtcgccatgccgccacaccgggccgcggcctgagccgtcgaaattgtcggggtaggtctcgaaatagctcgacagatagcgcgcattgccggggtcattccagaaacgcagcggcatcgagggcagcggctcggtgcagacgagctcaccgacctcgccgatcacggcgcggccttgttcgtcgaaggcttccaccgcgcagccgagcaggcggcattgcatgatgcccggcgtctgcggcagttcgcgattgccgccgatgaacgcgccggcgaaatcggtgccgccggaaatattggcccaccacatgtcggcttgcgctgtgttgccgttcgtcttcgacagcgcggcgaagcgctcgttgaaccaggcctgcgtgtcggctgagagcggcgagccggtcgagccgagcgtgcgcaggccggagaggtcgccgacggcggcaaggtcgatctcggccttggtgcaattggcgaagaacgccgcgccggcgccgaagaaggttgccttggcatcggcaacgaagcgccacagcgtggtccagtcgggtttgtccttggtgccgccggggctgccgtcgaagatgcagcaggtggtgccgttgagcaggccgttggcctggcagttccacatgatccagccggtcgaggagtaccagtggaagcgttcgccgaacgagttcggctgatagctgcagccgacgtcgttgtgcagcgtcgagagcggcagcgccaccacgatgatgccgccatggctgtgcaggatcggcttcggcaatccggtcgtgcccgaggaatagacgatccatagcggatgatcgaacggcagccattccggctcgaaggcgtcgatcgtcgggccctggcccgcgaggatggtggatagtcgtgtctccgacggtgccgcgtcgctgtgcaggatgacatgttcgactgtcggcaacgcgcgtcgcaaatcctcgatcacattttgccggtcatggcgccggccggcataggttacggcgtcgcaggcgatcagcactttcggctcgatctgcttgaagcggtcgatcaccgctggtgccgccatgtcgggggcgcagacgctccagatcgcaccgatactggcggtcgcaagaaacgcgatgatggtctcggggatattcggcaagtacgccgcgacccgatcgccggcgcgcacgcccctggccttcagatgcagcgcaagcgccgccgatttgcgttgcagttcgggccaactggtctccgaaagcctgccgtcttcgccgctcgcaatcagggccggcaggccggccgcatgcgccggcccgacatgacggaagacctggcgtgcataattcaccgaagcgccgggaaaccacaatgcgccgggcatcttgcggtcggcaagcacggcggaatgcggcgtcggcgagcgcaggtcgaaataatcccagacgctctgccagaacgcgtcgatgtcggtgaccgaccagcgccgcatcgcctcgaaatccgcaaacgcaaggccgcgggtctccttcagccaatcgcggtaaagggccatttgcgggacgtaaggtgcggtcatgggcggtttccgaagtttcttgtgtcgtggcagacgcgagtgaggcgtgccggcgtgtcttaacatagggacgcgagcacggggaacgcagtcgcgccatggcttgcgtcatattcataccgctgctgcaacgtgctattccgcaagcgcgcgggctgattccatgcgcatgcggtggagcgagcggcgatgtccgtcggcgaacttttcatcctcggcttctacggcagggtcatcccggcctggctgaaggactttgccgcgcaattcgggctcggcggcgtgatcctgttcgactactcgtgccagacccgccaatacgacaacaacatcgcttcgcccgagcaggtgcagtcgctctgcgccgagatcgcagcgctgccgtcgcagccgctggtcttcatcgaccaggagggtgggcgggtgcgccggctcaaggacagcctgggcttccagccgctgccgagcgccaaggatttcaatcggcttgcgatggcggacaggcaggcgatcctggctgccagctatggcgagctgcgccggctcggcatccgctacaatttcgcgccggtcatcgacgtcgactacaattccgacaatcccaatatcggcaggatcaagcgatcctattcgtccgatctcggcgaggtcgaggccaatggccgcctggtcgacgccgcggcgcggcaagcccgcgtgggtctctgcctgaagcattatccggggatcggcggcgcgcacgtcgattcgcatctggaattcatggacatttccgacgcgctgcggccggaacaggaagagctgttctacgcgttggccccggatactttcggcgactcggtgctggtcagccatgccattgtgcgccaatgggacgcgcagcatccgatgacattgtcaccggccgggatcggccggcttcgccgccgcttgcccgagacgctgttgatcaccgacgacatgcagatgcaggggctgcagaaggcgctcggcaccagcgcggccagcctgcgggcgatcgccgccggcatggacatgatctgcatcggcaacaatttgttcgaccaggagcaggcgatggcgggcatcgccgcggcggtcgcgggtgcagtgcaggacggatcgctggatcagaccgcggtgcggcaatcgatagcgcgcgtccaacagcgcaaggcgctgctcgcctgaaagcattgaaccaaaatttgcgccgggcgaccacaagggacggaaccaattttcgttaccgcgatttaacacagacgctcatcggggctaacaaccatgaagatgctcaagcgtctcttccgattgacctggctacgccgcatcgcacgcagttcagccgattttccgcctgcctccatcgatcccgacgaattcgcccgtctgctgtgcagcgggcgcagccaggatttgaaaatcctggcgaaacggctgagccagcgtacgcgcgcccacgcttgacgatcacccggcagggcgatgacgtcgggcgcgattgcgctgccgccgatctactgcgtcgacatggcgacccgggcgacgcatgtgctggcctcgtcgtccccgtggctcgagggttgctgcgcgacagggccaccgggagatgcctcccaagccgcgatggcggcgtcgatcgccttttgtcctgacatccccttctcgatggcgatgatcgcgcgtcgctggtcggcgtaaatcaccgggatatcgaaccacgatcgctccttcagcagcagcgtgttggcgttacgctgggcatcgacgttcgacagcgccaccagaaagatgttgtcgaccaccttggccgcgagcgcctgcagcggcgtgccgcgcgcctgttcgccagacttcatcagcatgcccgggaggtgaatgattgcgcgcccactgaagccgggcgaggggacaaaagtcagccggaacaggtaattcgccggcaaggtcgggtcggagttgcgaccgagcgagatgcataaacggaatttgccgggaaattcggcgatcgcgcgcacggtgacgtcgccggcttgcgtgtctgatttggctggatcgacccgccagaccgccgaaccgacgagcctttggccggttggatcggtgctggattcctcgtaaagcgcagcgcgttcgctcacgccgtcgtcggtcgcatgcactggtctgccagcgagcacacaccacgcgatcaacgcggcgagcaaatagcgataccaatggggcggcaagtctcttgcggacccatgccgcatcactttgccctatcgtgcttgtcggccccgaccgccttgtagtcgtaggtcggatagaactcggtgcgataggcgccccaggcactgttctcgatcacgcggttgacttcgcgcagccgcgacggcggcagtcgcagggtcacgacctggccgatgcccatcatcacgtaccagctgaccacctcgacaccttccggcggaaacgccttgtagaagccctgccgctcgagctgcgcattgagttcggcgagcgggcgtgactgatcatgcttgaagaagatgctgaccatgatcgcgttgtcttgtggcggcgctgcgtcgccggtccgcgtggtctgggcctgtgcagcggcgccgaacagcagcgccgcggccagcgtcgcgatcgtcatccgggatccaatcggcccgctccgccctcgcttcattgtcgcgcccgtttgttgttggtcgagaggctgtgatcatcgcggcgccggaccgagctgtaaattgacattcgcctgacccgacgcccacgcacgcgccgccccttgggccgatgtgatccgcctcatacgaacgcgtcccggcgtgcggtaagccgatgcgatcccgatgcccggaggggagatcaatgtcgacccggcgaatggcgtattggtggttcaggttcgttatttcggggcggttcctgcagaaattcctgcggctccgccgctcctgacgtccgggggacggcgcggagcctggctcgtgcagcccgaaacgcgggacgcggatgcgcccgcggagcccttaacttcccaccagcagggatatggaggcacaggcggcctgccgtcccgtaagaatactgtcattcgactcaaatatgcgacattcattgccaaatcagcggtaatctgcgcctgcttggcaggtcggggcccgaggtcacagttgcgtcacccgtagttttacggagtcccgtgttaacgcggccacaagttcaccttcggtaaaccatacttatgacgcaacatgacaatcgagccgaggcgcgccttccggcatggccgggtggaaccgcgacgctcgagacgcagccgcttgagcttcagggggccgcaccgccacgatcgcaggcgaccggggaggccagcgcggcgatcgtccggcagttcaatggcccggtgacggcgctgctgctctatatgaacgagctcaaacagcacagtcagcagttcgcgcaggcgcccggcaacggggtctatctgcgccaggtgatcgagaacgcgctcgagcagaccgagcgggtgtctgcgatgctgaagcagatttcggatctctatccgaatgccgttccggccggcgacgttagatcgccgggtgatgacaagccggcagctgcccgatcacccgatgtcatgttcgcaccggaggccggccgcaagccgttgaccaagcgcgagcgtgaggtgctcagcctgatcagcgacggctattccaacaagcagggcgcgctacggatgaacatcagcccgcgcacgttcgagagccatcgtgccgaggccatgcgtaagctcggtgcgcgcaacaccgcagatctggtccgcaaggcgctattgcattccgcctgagcggagacccggttctcagacatcgtcttccgtggcaaagcgcagccgcggcgcgcgccgcgcggcgcgggcggccgtcttcggctcgtccggaacgatcgtgaccacccatgctgccgtcgcgccggcgttgctttcgacgatcgcgcgcacccgtccggtgaccgtcgcaccggcggacctgatcgtagcaggccggccgttgaactgggccatacggaagcgccgggcttccttccggtcggtcgtctcgtacgtgaacatcggctcccccgtgcgtccacgcgactttgcggaagcagcgttatccgacggtgaaaatcccacgccgtagaagtacggcttgcgcgacggagcgcgcgctttcgagcgaagcggtgaccgctcgaatcgaaaccctagccgctggtttccacacaactcagcagcccggcatactgtgccttgaccgcggcgtagcattcgcacgcggtcctgatcaggccgtccgggttggtgatctcgatgtggccgcggctgtagtgaatgaacctcgcctgttgcaaggtatgcgcgaccagcgacacgctgttgcggcgcgcgccgatcatctgtgccatcgcctcctgtgtcaggatgatcttgttgctgcccgagagatcgcgcatgtgcagcaggcatcgcgccagccgcgactccacggtatgcgcggcgttgcagcccgccgtctgctggatctgggcatagacggcgagcccgtgccggagcagcatggtacgaagcgtcgggctctggccggcagccgcgcggaacggttcgagctcgaccgttgaggcgcggccgggcaccagcaccgtggcattgttcaagacacggctctcgacgagcggagcaaatgcgccaaagatgctgtcgcggccgaccattgcgacctggacgcgctcgccccgtgccagcttgaccaccagcgagatcacgcccttgtgcggcatgtaagtccgcgtgagcatctcgtcggtctcggtcaggaccgaatcggctgcaaggtcgaccgtccgcagatgcggccggatcaggtcaaagtcgctcgccgacagcgaggacaggaagccgttaggcgatcgcggaaccgtatccaaagcaacctcctgcctgccggcaaagtttgtctctgggcaccaatggccgatgcctgtggcctgtcgttcatgcaacttattcgggcgtgactgggttccaatggaagcacgtcctggttccaatagatacacctatcgcagaacacgcgcgtttgtgttccgttcagtcttccggcccgatcaactgtgtggtgtgcgccttgaccgtggcatagcattcacacgccgccttccgtaggccgtcgatatcggtgatttcgatatggccgcggctgtaacgcaggatgccggcctgctgaaacccgtgtgcgacgatcgagaccgcattgcgccggacgccgatcatctgcgccagcatctcctgggtcagcggcaacgcctcgctgccgcacaggtcgcgtgcgcgcagcagccagcgtgacagccgcgcctccaccggatgcgagacgttgcaggcgacggattgttgcgtctgcgccatcagcgcctgctcatagagcgcaaccagggtgcggaattctgcactgcgattggctgcctcacggaaatcctccgcccgcatcaccgatgccgtgcccggcacgacgacaatggcgtcggcgagcggcggccgctcgtgcagggcggcggatgcaccgacgataccgtcacgaccgatggttgcaatctcaaccgattgcccgtcggacagattgaccatcatcgagaccacgccggcgtgcggaaaataaacccgctgcaccggcgcgccggcatcggccagcgccgtctccttggtcaattcgacggtttccagaagaggatgaagttgcgcgtattccgcggagggaagtgcttgcaacagacgattgggcgggcgcgttaccgcggacattggagctcctgccgagggcgggagcactacagtctcgcatcacctactcttggcgtgttgagtgcgaccatagcttgcctgtccaatagcacaagggttgtagtgcgaaccttataccctctagggggcagacggtcggcatcacgccggtccgtgcggcgatcgaagcgattcgtacgacacgcaatccggccggtacggttgcgacattgtctcgcatttattgatttccattaactctgatgcagaccaggcgcgtgtcttcgacgattgcaattccgggtttcgaagccgccagccggcagcgtgagcatgcggcaagtcctgcaaatgcggagacaaattcaccgtcacgtcgtcgatccgacgacggacaaagtcggctgggccgcgcgtctgcgcggcggccgtagaattaccggcaagggccgttctgggtatttgtacggagcagccctttaacgaacgggtagcgcggacggaccagtgtggcaccggtcgccgtgcgaaatttacggcgtcgcgtcaatcgtgttcatccagaagggtaccagtatgtccggcatcgtcctttcgtcatcggtccgtcagaacctgctttcgctgcagtcgacggccgatctgctcgccaccacgcagaaccgcttgtccaccggcaagaaggtcaacactgcgctcgacaacccgaccaacttcttcacggcgcagtcgctcgacaaccgcgccagcgacatcaacaatctgctggacggcatcggcaacggcgtgcaggtgctgcaggccgccaacactggcatcacctcgctgcagaagctcgtcgacagcgccaagtcggtcgccaaccaggccctgcaggctgccgtcggctattcgcagaaatcgcaggtgacgaccgccacgatcaccggtgccaccgccgccgatatccgcggcaccgcgacctacagcaacgccattctcgccggcacggtcgtcaacaataacctcacgacgccggcgccgatcacggccgccaccaagctcgtcagcgcggccaactccgatacgctggcggcgaccccgaccggaacgatcagcgtcaatggcaagtcgatcacgttctcgacctcgcagaccacctcgacgaccgatgcgtccggcaacgtgaccctcggcaccggcaccggcagcaacctgacggtcggcgacctgctcaccgcgatcgacggcatcacgggcgcggccaccgcctccaccgtgtcggccggcgcgctccagatcagcactggcatcaaccaggatctcaacatctccggttcggggctggccgcctttggtcttacggccaccaccaaggcccgcaccgtggcaacgccgtcaccgctcgatggcctgacgctgacgatcaacccgaccggcaacggcaccgccaccaacatcacgtttggcagcggcgccggccaggtgaagtccctcaacgatctgaacaccgcgctggcagccaataacctgcaggcctcgctcagcgcgggcggtgcgctcaccatcagcaccaccaacgatgctgcttcgtcgacgatcggcacgatcggtggcacggcagccggttcaggcaagctgttcaacggtctgacgggcagcgccccggtgcaggatccgaacgggctggcgaaccgcgccaacctggtcagccagtacaacaacatcctggaccagatcaccacgaccgcccaggatgcctcgtacaacggcatcaacctgctcaacggcgatcagctcaagctgaccttcaacgagacgggcacctcgacgctgaagatccagggcgtgaccttcaacgcctccggcctcaacctcaccaagttgaccgccggcacggacttcatcgacaacgcttcggccaacgccacgctgaagacgctgaacagcgcgagcggcctgctgcgcacccaggcttcgaccctcggttcgaacctgtcgatcgtgcagatccgccaggacttctcgaagaacctgatcaacgtgctgcagaccggttcgtccaacctgacgctggccgacaccaacgaggaagcggccaacagccaggcgctgtcgacccgccagtcgatcgcggtgtccgcgctggcgctggccaaccagtcgcagcagagcgtgctgcagctgctccgctaagcgtagccgcaacagacaactgatatcgaggcggcgggggcaaccccgccgcctttgctttgcgcgtgatcgaccggtccgcggacttcaaccaaagggcgatcgggctttgatgcaggccgatgccgtggcgcgagtgtttcgctcggcttagcggctctgcgattccatttgattcaaattgcgacgaccggtggaacggcctctttcccgttcgggtggtaaggcctgcccgtgcgagaccggccgtgacgttgcgatgcatcgcgggactcctcgtccgtatttgcacggacggcaaaattaacgtcgctgtgaagcccgccaagttatcgatgcgatgcgagcgttccgcagcaccttgagggggcctatccatggacgatctgttgcgcgagttcctgacggagagcagcgagagcctggatacggtcgacaaccagctggtgcagttcgagcaggatccgaaca

SEQ ID NO: 47 - DNA, 46371 bp, Bradyrhizobium enterica
cgaggcgctggcgacgctggtggtcaaccgcctgcgtggcggcctcaaggtcgccgccgtcaaggcgccgggcttcggcgatcgccgcaaggcgaagctcgccggcggcgttgccgtcatcaaggtcggcggcgcgaccgaggtcgaggtcaaggagaagaaggaccgtgtcgaggacgcgctgaacgcaacccgcgccgctgtgcaggaaggcatcgtgccgggcggcggcgtggcgctgctgcgcgccaagaaggcggtcggccgtctcaccaacccgaatgccgacgtccaggccggcatcaacatcgtgctcaaggcgctcgaggctccggttcgccagatctcggagaacgccggtgtcgagggctcgatcgtggtcggcaagatcctcgagaacaagtcggagactttcggcttcgacgcccagaccgaggactatgtcgacatggtcgacaagggcattatcgaccccgccaaggtggtgcgcaccgccttgcaggacgcctcctcggtcgccggcctgctggtcaccaccgaggccatggtcgccgaagtgccgaaggacgcggcgccggcgatgccgggcggcggcggcatgggtgggatgggcggcatgggcggcttctgagccccccgctgcacctccgtatcaagattgaaggccgcctccgggcggccttcttttttgcgatttgatcacgatcgagatgtaaggacgatccgatgtcccgcgacgccagatcactgacgacaacgctggcgctgttctacgcgatcggcgcggtgctcgcattgggcgcctatgcccaggacgacatggacgctgttgcggtcgtcgtgacgttctggttcaagcagacgctgacgttcgccgttctcggcgcgggctatagcctctattacgttatcgccggttcgatcggtcatcgtccaaaagcgccgctgcgatttctcgacatcgcctttctgaccggtgtcgccacgctcgccgttctgatggcgatcaacggttgagcaagtcggacgtcgccccgaatgccgttgcgctccctctcccgcttgcgggagaggcgtacggcgtgtgcggggatgctggttcagccaaaaattttccgtgccttacgcgacgcagatgtccggcaccgcgaccttccggaacagatgcggtgacgctaccgccgaggccggataggccgaaagcttggcccggaactccgggttcatgaacgcggcacggaaggcggccgtggattcccagaccgcgtaattcagataggccgggctgtcacccagcgcgcgatgcagctgggtcgaaataaaaccgggctgccgcttcatgatcgcggcgtcgtcctgccaagccctgaggaaactgtcctcgtcggccgcatcgagtgtgaagaggttgaccagcacgacgttggtggcgtcgaccgcgagctgacggtcgatcgggaacgcggggtccagggggcgcatctgcggcatggtttactcctttgatatggtgctatgatgtcagttcgatctgatggatacgtatcaatattgacattatgatgtcaatataccgctatggtgacaaatgccccagaccaagcgaacgccggcgggtgaagccctgagcggcctgattctcgacctgttcaggctcaacagcctgctgttcacgtcaggcgaccggatggtggccgggctcgggctgaccagcgcccgctggcagatcctcggcgccatcgtcgccgccgaacgcccgcaaccagtggcatggctggcgcgcgacctcggcgctgcccggcagaacgtgcagcggatcgtcaacgacctcgcaagggacgggctcgtcaccttcgagaccaacccgcatcaccgccgcgcccaactcgtggtgctgaccgacaagggccggcaagccttcgacgcggcgatgcgcctgcaactgccgtgggtgaaccgcctcgccgacggattgtccgtgaaggacatcgaaaccgtggcccgcgtcgtgacgacgctgcgcggcaggctggagagcggcgaggaccctgacccgcgcgcatgacgcgcggcacgctccatttgccgtgacagtgccagaagtcacttcgtccaaccgcggcggccgccgtcacgcggccttcttttttgcgcaatgacacggaggtttgctagttacgacggaaccgattctgcccttcgaggacttatcgtatgcgcgcgctcccgctcctgctgctcggtcttgccgtcgcttcggcgcctgccctcgcccagatgaagctgcaaaccaagccggcagccagtggcggccccgagacgcgctacttcaccgcgatcgacggcctgatggacggcaatgccgacgtcgtcctgaaggaaacccgccagggcaagaccgtaaccgcggcggtgctcgatgtctgctatcccgccgacaagagctccgaccgcaaggaccgcttcgtcgctaacctcgccatcagcggccagaccctctccggaaccacccagagcgtcgccgacaagcagccggtcaccgtcaagctgaaccgcaagcagaccggcgacagctttgagttccgcggccagatcacgatcggccagaccgtgaccgaggtcgcctcgacggataattccgatctcagcgagaaggaattccaggacaaccaggccaccgaggacggcatcacgccgcagccgaaggattttaccgacgtctcgccggaatcgatcggcgtgcgggtgaagctcgatgcagcatccgacttcctcaagagcctgaagggcgaggccgtcgagatcggcacctccagcctcccggtgacctgcgatgcgttgcgctcaggcgagcagaccatcaacctcaccgtcgatcccgagcacgccagcgcgctgctcgccaaggcgaaagcggcgcccggcgtcaccgcggccggctggaccagcggcgtggtcgagatggaccgaaccatccgctttgccgccgccgactggcgcgatggcgacaggatcaacaaggacaagctcgcgtccgcgatcgcgggcgtgctggcgaagacactggcggcaaagcccgcctccgcaacctggaatgcgaacaccggcaagctcaagctggtgctgaagcggccgagctcgatctaccctgcgctcggcctcacccagaactacgaggtcaccgccctcgtctcgcccgacaagcccggcagctccgacaaactgatgctgtgggtctcgagcccgacggtctcgacctcggacgacagtgccggcgccaagctcaatctgtccgacgattcgagcagcgacgaggaaggcagcgagaccaaggacgacaacggcgcgatcgacgcgctgctcaaggagttcaagggccagcgctgggacgccgacaagtcggtgtggcgttgagccacccgcttcccgattactcgacgacgttcgggaagcggcgccaagcatcatgtcgacaaagcggaatttcgtctgaaggctgaccgcgcgcccgatccggaatcgggtggtgcggcacgcgtctcgcattgcctaatgcgcgcattgacacagcaccggtcgtgaaaccggcaacgcgcaattggagacgatgagatgtcagagcaaaacaaaaatgtagtcggccgatggttcaaggagttctggggcaacccgtggaatccgcgcatcatcgaagaactcgcggcgtcagacatcgtggtgcactacccgatgcacgaaccgaagaagggccgcgccgcggtcacgcagttcatgaccgagtttcgcgaggcgtttccggatctcaatttctggggcgtcggcgatctcgtcgcggaaggcgacctcgtcgtcggccgctgggaaggcggcggcacgcacaccgggccagcgttcagcgacttccggctcggctcgctgcccgcggcttcgggccgcaagatgacattcgccggcacgaccgtgctgcgcgtgcaggacggacggatcgccgaggagctcggacaggaagatgcgatcactgccatgctgcagctcggcctcattcgcctgcccgagcagagtggttacgcgggttgaaccgacccttcgtcgaccagacacgctccaaccttctgggccggcatcgcatctcctggtgcggtgccggctcagtctctccaggtattccgcatcaagcaggaaagatcaggcacgtcgtcgtgccatgcgcgagcagccgtcccttggcgtcggtgaccctgccttcggcggtgccgacgcgacgtccgcaattgagcacatggccctcggcccggatcgggccagtgtcgggcgtgatcggccgcagcagcgagatcttgaactcgagcgtggtctggctcgttccggcgtcgagcatcgactgcaccgcaagtcccatgcagctgtcgagcagcgtcgcggtgagaccgccatgcacggtgccggccggattgagatgcgcatccgtcggcagcagcgtgacgacgacgcggccgcgttcggcctcagtgacatcatagccgagggtccgcgcgatggtgttgagcggcaaggcgccggaggcgagcccctggacgaattcgaggccgctcatcgtgagtttccgttcggcactgacggtgccgtagctcctggccattcgctgatctccgttgggttcattgcagcatgacgcctggcggccgcttccgtcgcaacgaggcgggagagcggccgtagagttttgcgaaggcggcgttcatgcgccttgcgctggagaagccggcacgttgcgccaccagcgcgagcgcaagatcgccgccgtcgatcaggcgcttggcgcgctgcacgcgcagcgacaatgcgacctgcagcggcgaggcatcgaggtgctcggcgaacagccgcgacagatgccgcgtgccgatgccgagccggtcggccagcgccgcgacattgccgcggtcgagtgcgccggcttcgatcagcgccagcgcgcgctcgacggtcgtcctggtgcccttccatgccgggcagaacggcgccgcctcgggacggcagcgcaggcagggccggaagccggcgcgctcggctgacgccgcgctgccatagaaccgcacattgcgggcgagcggcgtgcgcgcccgacagaccgggcggcaatacacgcccgtggtcttgaccgcgacgaacacgacgccgtcccaggccgggtcgcggcgttgaaaggcggcatattgtgcggcgaaatcaagcatgcgaccgctatagccgcggccgcacgccgaaacgacccggtttgcggagacgacgtccggaaacgaccgctgcgtgcgagcgcccccgggcatttacggggacctgcgaccaaaagacttcgtgctgccgcagttcggtcaccgaaaattaaggctcgatttagtttcgaggatcatcctttgcgtcatcgaacacaggtcacgccatgcaagaccgcgagccgatcaatcctgagagcatctggccgtcagatgcgacggagggtcattcgccggcgcagacggcggacctctgggacgtctccagcgagaatcacgacgccgccctgctgctgcgggagccgttcgccgaccgcatcggcaccgcgctgctggcagccaccgcgctcgccgcgagcttcgtgctgggctggaccggcggcgccaactggcatgacttcgtgggtcccgcgccggtcccggtggcccagaaggaggcgccggccccgcacgttgcggaggcaccgccgagccgaaagagcgaaagcccgcgccggaccgcgtccaacgccgagccatcggtcaccggcagcattcccaagcccgtcgccaacccgcgcccgcaagtgctgggggcagcgcccacgacgctcggcgcgcaagccgccgcgctcggatcaaagccgctgctttcggcgggaccggaaacgcggccgagcacgattcccggatggtcggtggtcgaggtccgcgacggcaccgccgtgctcgaagggccggagggcgtcaagatggccgcgcgcggcgacgtcgtccccggcctcgggcgggtcgattccatcgtgcgctggggcaaccgctggatcgtcgccaccgcgagcggattgatcgcgacgccctgagcgccggcacgacgctttcgatcagttgctgttgatcacgaagcgcagctgcttgctgccgatgaacgtgacctgatccccctgccgccgccagctcgtcatgtcgccgagcgccgccagcagatccttgtcggcctgcgcccggtccggcgtgcaggtgcggttctccagcgcgccgggcacgaacacgatggtgttgccggcaaccgagaactggcccttgccgccatcgcaccacagctcgaggatcacctcgccattgtcgccgacctcgatcgagggaatccgcttcgagcccggcatgcgcgcggcatcgagcgtcatcacgaagccgaacgggaattcctcctgagccttggccggaaccgcggcaagcgccgctgaaaccaacgccagcaccgccacgccgccgttcaaaatccgctgcatcgagctcatgccattccccgcaattgcgacgccgcccttgtatgggacgaggccgcgattggccagcttggccgcgcgggaaaagatcctggaaacgcaaaatccccgcgggctcgcacccacggggatcctggtttgggcgacgcctcgcctcgttatttcaagaccattgcagtgaacgggtagacgtaggcctgcagcgtcacgaacaggccgaccagacacgccagcacgatcgagtgcaggaacacgtagcgcaggatcgagccctcgtggccgtaccagttggtcgcggtcgaggcgaccacgatcgattgcgcgtcgatcatcttgcccatcacgccgcccgaggagttcgccgccgccatcagcaccggcggcaggccgagctgctcggaggtgatcttctgcagattgccgaacaggatgttggacgaggtgtccgatccggtcagcgccacgccgagccagccaagcagggtgccaaagaacgggtagagcacgccggtcgcggcgaaggcgaggccgagggtggcatcgacgccggacagccgggtcagcgtcccgatcgccaacatcgccgagatcgtgatcagcgagatcgcgcagaggcggatggtgcgaccatattctgcgaccagtttgagcggcgagaagcccatcaacagacccgagatgatcgccgcgatcagcaagccggtgccggtgaacgacaggtaggtgaagccgaacaccgcgccttccgccgtcggcttaggcaccaccggcggcaccttgaagatcagcttgtcgagctcagggaccggatagttccagacgaagttggcgttggcccaggccttgaaggcaccgttgccccagatcagcatcaggacgcagacgatgatccacggcagcagtgcgctccagagttcgccttgcgtcagcggcgtcttgtcgagcggcggggcggaggccatcgtcgccgccgattcatcgcggccgcgcagtttcggcgacagccagagatgctccggctgccagaccttgagaaacaggatcagcgcgcccatcgagatcagcgaggcgccgatgtcgacgatccagggattgatgtagttcgagatcacgaattgcgggaccgcaaacgacacgccggtgaccaggatcgccggccacacttccttcatgccgcgccagcccgcgaatgcccacaccacccagaacggcacgatcagcgagaacagcggcaactgccggccgaccatggcgccgaggatgtagggatcgagcccggtgaccgaggcgaggccctggatcggcgtccccagcgcgccgaaggcgaccggggcggtgttcgcgatcagcgacaggccggaggctgcgagcggcgagaagccgagcccgatcagcaccgcgccggtgatcgcgaccggcgtgccgaagcccgaggcgccttcgaagaaggcgccgaacgagaacgcgatcagcaagagctgcagccggcgatcctcggtgacgccgccgaccgcgcgcttcaacagctcgaacttcccgcacctcaccgtgacctgatagaggaagatgacgttgagcacgatccagccgatcgggaagaacccggtgacgatgccgaggatcgacgcacggatcgacatgccggccggcatggtgaagacgaagatcgtgatcaggttggtcacgatcacggcgatgatggcggcgatgtgcgccttcaccttgccgctcgcgatcaggaccagcagcgtgaccacgggaacggcggcggcgagcgtcgatagcccggcattgccgagcggattgtagatttgattccaggtattcatctcagggtccttcccacattcttatgcagcgcgccggcatcggtgctggcaggcgcgctggcgcgattgcgggagtccgtcggaaaagtctctagccccggctcgcgaatgaacgatcggtaaggatcgctcacatcctcgcgaaaaatcgaaggtcccccgcccctcgccgttgtcgtcatgctagggttgactcgatcgccgggacaagccaacgcttgcatgccaggcttacgactttagtcgaggcccacgccgattgtcccgactcttcaggcctttgcggccgcttccccggagacgataatctgtgaaaaacattcgctcgacgctcgcgacggtgtggcgcatcgcctcgccctatttcaactccgaggacaaatgggccggccgtggcttgctggcggcggtgatcgtcatcgagctcgccagcgtctttctcaccgtgctgttcaaccgctggaacaatgttttctacaacgcgctgcaggagcgcgatcaggcggtcttcagctatcagatcggctatttctgcgtgctcgcggcgttctggatcggcctgaaagtctaccagctctacctcaatcaatggctgcagatccgctggcgacgctggatgaccacgcgctatctcggcggctggctgcacgatgccaaccactatcgcatgcagctgctcggtgatgccgccgacaacccggaccagcgtatcgccgacgacacccagcgtttcgtcgaacagaccctgacgctcgggatcggactgttgagctccgtggtcacgcttgcgtccttcgtggtgatcctgtggggcctgtccaatcaggcgccgctgcatctgttcggcaacgacatcgcgtttcccggctatctggtctggggcgcgctggtctacgcgatcctcggcacaaccttgacccatctgatcggccggccgctggtcgacctcaatttccggcagcagcggttcgaagccgatttccgcttcaacctggtgcgtacccgcgagaacgccgagcagatcgcgctgctcgagggcgaaccggccgagcgcacgcggttgctcaatcggttcggattcgtggtcgggaattggctcgacatcatgcaacgaaccaagaaactgaccgccttcaccgcgacctattcgcaagccgctgtaatcttcccctacgtgctgatcgcgccggcctatttcgccaacaagatccagctcggcggcatgatgcagaccgcgtcggccttcagcagcgtgcaggattcactgtccttcttcatcaccgcctaccggacgctggccgaatggcaatcggtggtcgcacgtcttgacggcttcgagggctcgatccgcggcggcgatgctttcgcgcagcggcaggacatcatccgcgtcaaacccgcaggccgcgacggcatcgaactcgacgacctcgtggtcaccctgcccgacggcaaaccgttgctcgcggctgacggcttcaagcttcccaaccaccaacgcaccctggtcaccggcccctcgggcgccggcaagtcgacgctgttccgtgccatcgccggcatctggccgttcggcaagggcgcgatcaatgtccccgcgaatgccagcctgatgatgctgccgcaacatccctatctgccgatcgggtcgttgcacgacgccgtggtttatccgggcgcggccgcgcaattcgatgcggggcgggtccgcgagatcctcaccgccgtcggattgccgcagctcgcggcgcggctcgcggaggaggcgcactggaaccggatgctgtcgctcggcgagcagcagcggctcggcatcgcgcgggcgctgctgcatcaaccgcaattcctgtttctggacgaggcgacagcctcgctcgacgagccgtccgaagccgcgctctacaggctgctcgccgacagcctgcccgataccgcggtggtgtcgatcggccatcgctcgacgctcgacgccttccatcagcgcaacgtcgcgctggtccgtgacggcgaccgcttcaccctgcacgacagggtcgaggctcccgcgtcataggcgagcgaagcgagggccagaggtgcggttcacctctccccggtggggagaggtgaaaaacaaagccgccgaaaacaaaaagggcggcagattgctctgccgccccattgatcccggaaagggaaattacttcagattggacatcgcggtcaggtcgaccgagagcttggcgataccagccgcaccgcaccagttggaaccagtgccgcccggattgatcggggtgacgttggtggtgccgcccgcggtgtaatcgctggtgaaggcgctgcaattgcccttcgacatgtcggtgtcggaatagcgcagatcgagcgtgaacaccttgtaggtgaagccgatgccgatgttccaggtgttgtagtcggcatacttgatgccgttcgggaacgccgggacgccgtagaagctgtcggaggtgccgagccactgccggccgaactcacccgacacatacaggccgacgccgctggtgccgaacacggtgctgggcgcggtgtacttgccgatgatcgacgaatagttgccccaggcgccggtgttcaggaagttgggcgagtagtattcgttgatcgtgaacgcccagttgtcgttgatggtccaggtcgccttgccgtagacctcgaagaacgagacgtccttcttcatcacgttgccgttcggcaggaaattggtcaggcactcgttgccgagcggtttgcccgcagtgtcggtagcggcgccgaagtagcaggttccgcccggatacaggtaaccccagacaccgatgtcgaaggcgaaggcgccgaaggtcgggcggataccgccgtagacgtcgacttccgccgcagcacggttggcgaaggagatgctttcggtcgaggtgccgatgtagagctgcaggtccttgttgacgttgtagcgcggctcgaaataggcggtgaccgatggattatggttcgactgcgtgacgccgcggaagatgtagtcgctgacgatgccggcgccgaaggcgatatcccagggatcgaagggagccggcggcggcgccttgacggccttcaccgccatgtcagctgccattgccgagctcgaaatcattgctagcgccgttgctaacaaagccagtttcttcatgacggtccccatccaaatgtccagacagcccagctccggtggcccccagggcgcgcgataacggactgcaactcaatcgtgtgtgatcaatctgaaacgcagctcccttttggagaaggcgaaaagacatgcatctgccgactttttaggcgttctggcagtcccggcacacgttggttgatgggtgttgcatttgcaccacaaaactgaggctcccgttccggttgaacgacccgctcagccggaaatgagcaacggttcgacacactgcgggcggtgccgacgcgaatcgtcttctccgcaaaactacggaccactgacacggaaaaagccgcagcggcgtccgctgcggcttcggtcggatgaaccggtgcaggttcggtcagtggtgctcaccatcggaggtgccccagctcggcgccggctcgtggctcggcgtggcccagctcggggccggctgcggcgcaggctcgggcgccggcgtggctgcaaccggggcggccggcttcggcgcggcggccttcttcggagcgctcttcttggcagctttcttcgcagccttcttgggtgcggccttcttcggagcagccttcttcgcaactttcttggcagccttcttggctgacttcttcgccgatttctttgcagacttcttcgcggccttcttggccgacttctttgcggacttcttggccgacttcttcttggccgctaccgccttcttggcctttttggccttcttgcttttctttgccttcttcgacttcgccattgtggtcctcctattgccgctgatttgagtccaccgcgtattgaagtgatcgcttgccggtcgttggctgcgcctcggggagaggcgccctccacttcacttgtcgggcatgatggccgcgcgatcgcttcgcgtctgtggcagggaagcgcctgactttcacattgcttcagacacattgcgtcagacatgttgcgtcaggcacgttgcgtcagggcaaggctgaggtccggatcatgctcgagtggcagtcgatcaattcaatcctggccggggacctcctgtcgcccaatcgagaagctcaatcgtgtgcaccacaggaactgacgtaccgccggcaatctgaaccatgcacccaatattgcccgcggcgatcatgtccggtttgacaagcgcaatattggcgaccttgcgatcgcgcaatctgctcgcaatgtcgggctggagaatgttgtaggtccccgccgaaccgcaacacaaatggctctcgggtacatctttcaccacgaatccattcttggaaagcaattctttcggaagttgagtgattttctgtccatgctgcaacgaacaagccgagtgataggcgacggtgacatcgcctatctgcgttgaaggcgcgagctcgaggccggcgagatactcggtgatatccttcgccagcgccgagattcgctgcgccggcccggcgaatgctttgtcctcgcgcagcaggtagccgtagtctttgacaactgtcccacagcccgaggtcgtcaccagaatggcgtcgagcccgttctggtccgcttccctttgccacaccgtgatgttggcccgcgcgcgcgccagcgcgtcgccgtcctgtcccatgtgatgggtcaacgcgccgcagcattgctcgtccctgaccagcaccacctcgacgccgtgccgggtcagcacgttgatggcggcctgattgatccgcggcgccagcacctgctgggcgcagccctgcagcagcgcgaccctgccgcggcgccgcccgattggcgcaaacacggttcccgctgccggtcccggctgcggcaggccgcgcggcgcgagcgccagcatcgccttgatccgccgcagcaggccggggctcgccgcgccgaccgacggcgtcgggagcagcgctgcgaacggccgggcgagcccggccaggatcatgctggtccggaacaggccgggacgcggcagcacgaaagcgagcaccgaccgcagcagccgctcggtcagcggccgctgatagtcccgctcgatcctgacccgggcctggtcgacgaggtgcatgtagttcacgcccgacggacaggtggtcatgcaggcaaggcacgacaggcaacggtcgatatgcttgaccacctcagccgtcggcggcttgtccttctccagcatctccttgatcaaatagatgcggccgcgcgggctatcgagttcgtcgccgagcaggacataggtcgggcaggtcgcggtgcagaagccgcaatgcacgcaggcgcgcaggatcttgtcggcttcctggatgtcgggatcggcaagctgagccagggaaaattcggtcttcatgcacccccgcctcgtatcatccggccgcggttgagcaccgatcgcggatcgaagctcgcccgcacccgctcgccgagcgcggcaagcccggccgcctgcggctggaacacgtcgaccgcgcggcgcacatcttcgctggcccggatcaaggtggcgtgtccgccgatcgcctcgacatggctgcggaccagcacggcatgcgcgtcggcgttgggcggcaccgcggcccagatcagcgcgccgccccagtcatagatcacctcgccgccggtctcacgcgccagcgcctggccgaacgcgccacccgaggccggcgggcaaacgatgcgccacaccggccaggtcccgagcgcgccgttcgcggcgaacggcaagacgtcgcgcagcgcgctccagatcgcagcagaagcatcgtcagcaaggacgtcgaccgttgcataggacgagagggtctggctcaacgaagcggcccggtggatcgccgaggccgaaatcccctcgagccgcaccagcgtgaccggctggccggaggttgcgaggccggcgagcgcgccggttccggagcgcagcgccgaaccaggcagatgcgccgcgcccgagacgtcgaacggcgagcccagcgccgcggtcatcgccttgttggcggtgacgtcgtcgaggccgcgcagcaccagcgtccgctcggcctccggcttcggcatgaccttgagtgtcacttcggtcatgaccgcgagtgtgccccaggacccggtgagcagcttgcagagatcgtagccggtgacgttcttcaccacccgcccgccggtcttgaagccgtcgccgaagccggacaccgcgtgcgccccgagcagatgatccctgatgccgccggccttgatgcggcgcggaccggcaaggccggcgccgatcatgccgccgatcgtgccggcgcccgcgctgccgagcagcaccgaaatgtccaccggctcgaaggcgaattgctggttcttggcatcgatcagggattgcacgtcggcgagcggcgcgccggcctcgacggtgatgatcagctcgttcggctcataggcggtgaccgcgttcagcaccgacacgtcgagcaccgcattggtcgccatcggatggccgatggcgcgcttcgatccatgaccgatgatctcaagcggctgctcgctggcgatcgccgcgcgcaccacctcttcgacatccttgatgtctctgactttgagcgtttccacaggctaggcggtatcgaaattcggctccgaaatcaaatgcgcgcgccgaacacgtctcggaatgcgacgagcccgggggcggtgatctcgaccgaacggccctgcggccggcgccggatccagtcgcgctgcaacgcgaggtcggcaaccgcggcccctgcccgtccggccagatgcggacgccgctcgctccagtcgagacagggccggcacaacagccgccggctccgcgccggcgcacgcaggtcgatgccgagatcacggagaaatgcgcggcccgacgcggtcagctcgccggcctccgggtcgaggtggaggtgaccgcgttcccgcatcgcgtcggtgacggcgacgccgagctcgccggcaaggtggtcgtagcaggtccgggcccggcgcatctccgcatcgatccgcggcggcgggcgggacggatgcgggtcgatcgccgcaaccgtcatcatgccttcgagcatctgcgcaaccagcggggtagccagccggtagaggcgccgcggaccctgccgctcgaccttgagcagcgcacgctcgaccagccgggccaggtgccagctcgcggtctggggcgtgacgcccgcgacccgcgccagctcgctcgcggtctgcgcgcgtccgtccatcagccgcgacaggatgccggcgcggccgggatcggcgatcagggcggcgagctccgcaagctcgggggcgatggtctgcatggccggttcctgtcgaagtcatccatttgtcgcacgccaggccgccgcgacgcttcgatcatggtcgaaatgttcacgacatcgacacttcgatcgccgcctaaccgaacccgcagatcgatcccctatctctcgccctgcggttcggctggcataacggttggcgcaaatcatctggaggcgatcatgaagcgttcggaagtcaagaccacgacgatgatgctcacccgacgatcggccatcggctcgctcgtcgcggccatgacgatcgccggcgtctcgcccgggtccggatcgcaagctcgatcggagcaaagcaacggaggactaccaatgaagcactatgcgatgagcacgagaaccatcagcgatgcgatcaacacgtcaggccttctggtcgtcgcgcaatgggaagccaaggaaggcgaggccgacaaggtcgcggcaatcctcgacagcttcctgcccgaggcgcagaaagaccccggcaccaagctgttcctgatcggccgcggcaaggacaatccggcacagttcctgttctacgaattgttccaggacgaagcggcgttcaaggcgcatgcggagagcgcctatttcaagacctacatcgcggagcaggcgctgccgctgctcgccaagcgcgagcggacacaatacacgctgctgtgagctgcggcgccgaggaaagcgcgtcaaacaacaagctggagcttcggttctgactggaaccgaagctcatccttcccgcagatgcaaggtcagatcgatgcgctgctgttgccgagggatgcgcgcaactcgacgcgctccggcggcctgcgccagaagccgacgatcgccatccgcgacagcaccgcggcctcaaacgtctcgacccgcccccggagccgaagcgcgtgtttctcgacgagatgccaggacgcgacggcgacgccgaaggcaagcggcaggctgatcaggacgttcagataccagtgctggagcggcgggccgagcgaggcaatgcattgctggatgacgaagccatagagatacagcccgtaggagtaatcgcccgacgacacgatccagctccgccgcggattcatcaggccgagatagcacgcgacataggcggccggcaccggcgccagcgcgtcgccgcggccggtggccatgccggcggcgcacgccagcagcgccagcaagcacagggtgcggtggaacggaaccttgtcgcgccagaggtagaagccgacgccggcaaggaagcagaacaccagaagatgcgggcgaagctggatcggcacctcgtcccagcggtagatgtcgtagctcagcagcgcgacctgaacggccaccaggaacaccaggtaggccaccctgttgaagcagatcgtagtcaccgcgagcagcgccagcacgacgtagcaccacaattcatacggcaccgtccagagctgggcgttcaccacgtccggcatcggattgtgcaggaagacgcccggcagctcgtattggatgtcgccgacgatattgagaaaataggcgtggagtttcgggtcggcgacatactgcgccaacggcagctcggtgaagatcgagccgatgatgatggccgacagcgtggtctcgaccgcgagcgcgggcccgatccgaagcacgcgcaggccaaggaaggaaatcaggctcttgcagcgctgcaggctcgccgtcaccaggaagccgctcagggagaagaacagcgccaggatcatcgcgatgccgatgcgaagcgtgctctggatctccagcgcccgaccgagcccgagcgtcacgttcgcgccgtgcaggcagatgatcgtcgtcgccagcgcgatccgcatgtagtcgaaacccgccggccgattgcgcgtaagcgccagctgatcggccaggctgggcatcgatgtgttcccgaagacatgcatcccagggaaaataccggggaacagctgaaggccgtgtaaacggtgcaagccgcaattgcagcgacgcgcgacggcagcccggacggcgcgccacggccatcgcggccagcatcggttaaggttatcggttcgaaaggacgatccgtcgaattgtatcgatcgacgccctcgccggagcgacgccgcgcctagaaccgcgggatgtccggaaacgccagcttgccggcgtggacatggacgcggccgagttcggcacagcgatgcagcgtcggaaacaccttgccggggttgagcaagccctcggcatcgaaggcgcatttcagccgctgctgctggttgaggtcgatctcggtgaacatctccggcatcagatcgcgcttttcgatgccgacgccgtgctcgccggtgagcacgccgccgagctcgacgcagcagcgcaggatgtcggcgccgaacgcctcggctttctcgatctcgcccggcttgttggcatcgtagaggatcagcgggtgcagattgccgtcgccggcgtggaacacattggcgacgccgaggccatatttctccgagagctcgcggatccgtgccagcgccttcggcagcgcgccgcgcgggatcgttccgtccatgcagagataatccggcgagatgcgcccgaccgcggggaaggcggccttgcggccggcccagaacagattgcgctcggcctccgaggtcgagatcaggcaggaggtcgaaccgcaaccctgcgcgatcgcctcgacccgcttgatcaattcatcaacctcgacctgcggaccgtcgagctcgatgatcaggagcgcctcgacgtcgagcgggtagccggcatgaacgaaggcctccgcagcgtggatcgcgggcttgtccatcatctccatgccgcccgggatgatgccggcgccgatgatggcagccacgcattcgccggccgcctcgacctccgcaaagccgaccatcagcgcccgcgccgtctccggcttctgcaggatgcgcaccgtgatctcggtgatgacgccgagcagtccttccgagccggtgatgatgcccatcagatcgtagccggcgttctcggccgacttgccgccgatgcgcaggatctcgcccgacatcagcacgatctcgcagcccagcacgttgttggtggtcatgccgtatttcaggcaatgcacgccgccggaattctccgcgacgttgccgccgatcgagcaggcgatctgcgacgacggatcgggcgcataatagaagccggcatgggcgaccgcctggctgatcgccagattggtgacgccgggctcggtgacgacaacgcggttgtcgaagtcgatctcgcggatccgcttgaacttgccgaggcccagcagcacgccgtcggcgagcggcagcgcaccgccggacagcgaggtgcccgaaccgcgcggcaccaccttgatgccctgcccctggcagtatttgaggacttttgcgacctgctcggtggtatcgggcagcaccacgaccatcggcggctgccgataggcagtcaggccgtcggattcataggccagcatctcggcggcgctgtcgatcacgccctcgcccggaacgatggcgcgcaaggcagccacgatctcggcgcggcgcgcaagcacggcctggtcggccgccggcatcatgatggacatcggtgttccctcggcgggcttttgccctttgccgatttgttacgacaaatcaatcagctctgcacctgtttcagtcgacttgtttcagtcgaccggccgaaggtcggattgccctgcccggcaatgccgagttctctctcgggcaagcaggcggccgcgaaacctgtcaaagtttcgtggcttgtcctgcccaagccggacatgccacaaaagatcactacctcccgggacgaaacgaagagaaccccatgaacctgaagaccttgagcgcgctggcggtcgtcacatcgctggccaccgcatcctccgcgctggcgcaggatgccgccgccggcaagacctcgttcaacaaatgcctcgcctgccacgcgatcggcgaaggcgccaagaacaaggtcggccctgagctcaacggcctcgacggccgccactccggcaccgcgccggactacaattattccgatgccaacaagaactccgggatcacctggaacaaggacaccttcctcgaatacattaaggatccgaaggccaagatcccgggcaccaagatggcgttcgccggcatcaagaacgagaccgaggccaacaatctgtgggcctatgtgtcgtcgttcgacaaggacggcaagcagaagcagtaatcggcggcatcggccgcgcgtctgccctggctaggggccggggcagacgccgctgcgatcagcgcggcaacaggttggtcttggcgagatcgaccacctcgtcgccgcggccgctcatcacggcgcgcagcacccacaggctgaagcctttgacctgttccagggtgatggtcggcggcatcgacaattcctgcgtcgcggtcacgacgtcgagcacggccgggccgtcatgcgcgagcacgtcgcggatcgcgccctcgagctcgccgggatcctccaccctgacgccgtgaatgcccatggcgcgggccatcgccgcgaaatccggattcttcaggtcgaccccggtctcgatgaagccggccgccttcatctccagcgcgacgaagccgagcacgctgttgttgaagatcacgaccttcaccggcagcttcgcttgcgtcagcgtgatcaaatcacccatcagcatggcaaagccgccgtcgccggacatcgacaccacttgccgcgcgggctgcgcggcctggacgccgatcgcatgcgccatcgcgttggccatcgagccgtggacccaggagccgaccagccggcggcggccgttcatctttaggtagcgcgcggcccagatcgtcggcgtgccgacgtcggcggtgaacaccgcatcctcgctggcctgctcgctgagcaggcgcgccagatattgcggatggatcggcttctggccgggcttgccgcgggccagatcgtcgagcccggcacgggcgtccttgtagtgcgcgaggctggagtcgagaaacttgcggtcggtcttcgggttgagcttgggcagcagcgcggcgatggtctcgccgacgtcgccgacgatgccgagatcgagcttgcagcggcggccgagattttccgggcggagatcgacctgggcgatgctgatgccggtcgggaagaactgcttgtaggggaaatcggtgcccagcatcagcagcacgtcgcagccatgcatcgcggcatagccggaggaaaagccgatgaagccggtcatgccgacatcgtagggattgtcgtattcgacatattccttgccgccgagcgcatgcacgatcgggctcttcagcgtctcggcgagcttgagcaggccgtcatgcgcgccggcgcagccgcggccgcagaacagcgtgacgcgcttggcgccattgagcagcgcggccagcgcgttcaattgggcgtcggccggacgcaccaccggcaccggcggcagcaggccggcattcggcgcgatatcgcgcttcggcgccggccgcatcgcgacgtcgcccggcagcaccagcaccgcgacgccgcgcttgccgaccgcggcacggatcgcattctccagcatgtagggcagttgtgccgggtccgacaccagttcgcagtaatggctgcattcgcggaacaggtcctgcggatgggtctcctggaaatagccgccgccgatctcggccgagggaatctgcgccgccagcgccaggaccggcgtacggctgcgatgtgcgtcgaacagcccgttgatgaggtgcagattgcccgggccgcaggagcccgcgcacaccgcgagatctccggtgatctgggattcggcggcggcggcgaacgccgcaacctcttcgtggcgcacatgcagccagtcgatcgtgccgcgcttgcgcagggcctcggtgaggccgttgaggctgtcgcccacgacaccgtagatgcgcttcacgccggtctgggcaagggtttcggcgatgaggtcggcgatgttgtcgatccgcatgagaggtgtcctttgatgaaaccggaaagccgcgcgtgacatgatgtttggcgccacacggcggcgcaagtcttgccagatcacattcgcgcggcgactacgtagcagctattgtgccgtcataatgtcccgcgtcatccggccggccatcgcctcgatctcggaggccaccaggtcgggcgcggcgtactgcaccatgtggccgacaccgggcaacacgatgagctttgcctgtggcgccgtcgcggcgagcaaccgcgaatggatgccggtcgtgaccgtcttgtcgacgtcgccggaaacgatcgatagcggcgccttgatctccgcatagcgcggcgcctgctcgacgacggcggccttcagcgtgacgaggtcgcgcgcgtttgcgatgaattcgcgcgggcgcagcaacagcaatgtcgcgctgtcgcggacgaaatcgtcaggcatcggctgcggggcgaacacaccgctcgcgcccgaactggcgacgaggaggcccagcggcagcgtgatcgtgtgggccagcaacggcccgatcagcggcgtcgagatcacatcgttatagcggcctgcgccgccccgccagggataggcgaccggggcgagcagtacgaggcccgcgacgcggtccggatgatcgagcgcgatgcgcaacgcgagcgcgccggcccaggaatgtgccaccacgatcgcccggtcgacgccgagcctggtcagcgtctccacgatcatccggccctggatcgccggcgttgaatcctcaacgcgctcgcgcgtgctccagccgtgccccggccgatcgatcaggatcacccggcgcgtcttggcaatgcgctcgccgaggggctgcatcgcgcggagattggagcttgcgccatgcagcatcacgatcggcggccccgcggcatcgcgcgggccgagctcgaccacatgcagccgcgcgccggccacatcgatcatgcggccctgcggcggaaaggcgcgctggatcagcaccacgccgatctgcgtcgccagggccagcgccagccctgcggtcgccagcgcgatgatcgcgatcaacatcgaggggatccagaggcgcttgggtaccagaaggacgggtattcgaagggttttcgccacccggaagttacggggtggccgacgtcaggtttcgcccggtaccggattggggccctgcccgggcatgctctggttcggaaagccaattgtcgattttccggctcacgggcaggcacggagttgtccacaatgcgcccagcctgtggatagcgggttcatacctgcgtcattagtaatttcatagattgaaggtggcaatttcgccatcagacgcgaggcttcatccagaaccgggacgctaccggaacacttcttggcttatccacgaggttcacaggaacccgcgtccgcacgacgagttcaacgggaagtaatcggaggagtaccatgatttccgaccctagcgatgcggccatcgaccagatcgtggcgagttgcaatggtgacctgcgcggcgccctgaaggcgctgttgctcgtgaatgagcacctggaggcggagcttcagcaattctatgctgccgtcgcccaggacaatgcgtcccgcggcaagttcctgcactagtctcctgcgccggaccgtatcgcgagcaagcatcaagctcgcgagtaacgtgcctctcgggtccgttgcaatcaaccgcacgccatcagatgtcgcggccttcgaccttctcggtcagctgcttgacgatctgcggcaccttctcgagatagggatcgacagccagcgccttgcggaaggcgtccagcgcgcgcttgtcgtcgcccatgtcctgcatgatcataccgacacccgccagcgcgccgaaatgccgaggctcacgggtcagtacctgctgcagatcccccagcgaacggacataatcgttcttcaggtagtagatcgtcgcacgccggttccaagcctcgacataatcaggccgcagtttgatcaccgcgtccagcagcttcaaagcgacatcgacattctgggcgtcgagcgcagccttggcgcgcaccatcaatagcgcggcggtatcgctcggagtttgcagccacagcgcccagatccgcgcctcgacgtggcgggcgctgtcttcatcgggcgcggccttcagggcgccgaacaggaaatccagcccgcgggtgcggtcggccggaaccttcggcagcttggtcggcgcctccggcagtttcttctgggccttcggcggcgggatcacccgcggatcgtcctgcgcggcggccgcgacaggcatggccagaagcgcggcgatcaggatcgccagccggcggttggtggggccaaaaacgtttaatcccatcgccgaagtctagacgcacaaagccgcactgcaaagcagcgcggcgtcaaagacctgtgaaagagacgaattgggaccggcgcaacacgccggtccgcgcgcaatcaaccctggcgcgccttgaatcggcgctggaccttgttgatcacgtagacgcggcccttgcggcggaccagacggttgttgcgatggcggccgcgcagcgacttcagcgagttacggaccttcatgggacaatcctgttacttcgaaaggcccgtgttggaggccgtacctgatcaatgccaatagttggcaaaatgggatttaccccgacaagcggcctgccgcgcgggacggccgggttctaagccatcggactgttaaatgtcaaccgagatgggccgattttcggccctatcccggcctggagcccacgtccgccactcggccatgccattgagatcgcttcggaaacggcgggcacaacgattgtggcgccgcggcccgtgccgccggctgaccctgacgccggctacacgaccggcgaatcgtgcttgcgggccgggcccggacccatctttacggacttttccggccgaaccggatcagtccgcaaccgcccgcccatcaaccagaccgcttgcgaaaatcgttatatcatataattattttccatcaccaacaaacacgccgccgggaatccgcatgcccaagctcaaactgcccgacatcgaaaaggtcaccgcgatcgacatccatacccacgccgaagagccgtgcggcatgcatggcgacgacggctatgacgatttccaggcgcagatggccgactatttcaaatcgccgcacaagcatccgccgaccgtgccggagaccgccgcctactaccggtcgaagaacatcgccgcggtgatcttcccggtcgatgccgaacgcgagaccggcttccgccgctacaagaacgaggagatgctggagattgcctccgaccatctcgacgtgctgatcccgttcgtctcgatcgatccgcacaagggcaagctcggcgtccgcgaggcgcgcaagctgatcgaggactacggcgtccgcggcttcaaattccacccgaccatgcagggcttctacgccaacgaccgtatggcctatccgctctatgaggcgatcaatgacggcggcgcgatcgcgctgttccacaccggccagaccggcgtcggctccggcatgccgggcgggatggggatgcggctgaaatattccaacccgatgtacatggacgacgtcgcggcggattttcccgacctcaagatcatcctcgcgcatccctccttcccctggcaggaagaggcgctgtcggtcgcgacccacaagccgaacgtctatatcgacctgtccggctggtcgccgaaatatttcccgccgatcctggtgcgctacatcaactcgatcctgcaggacaagatgctgttcggctccgactggcccgtcatcacgccggaccgttggctcgccgattttgcaaaactcgatatccgcgaggagatccgccccaaagtcctgaaggccaatgcgcgcaggattttgggtatataaggcggtccctgcaccgcgccctcggcgtcccgatcgcgcggcggtcgggacgaaggggtaacgacaatgagcatcaaggcaatcgtcttcgacgcctatggcacgctctacgacgtgcagtcggtcgccgatgtcaccgaggatgcgttccccggctatggcgacatcatcacccaaatctggcgcatcaagcagctcgaatattcctggctgcgctcgctgatgcggcgctaccaggactttgccacggcgacgcgcgactcgctcgcctacacgctgcgctgcctcggcctgcaatatgacgaagcgaccttctcccgcatcatcgacaagtatcagcatctggcgctgtatccggatgccctcgccgcgctcgaggcgatgaaggacaagaagctcgcgatcctctccaacggcagccccgacatgctgaacgcgctggtgcgcaattcagggctcgaccgcctgctcgatgcgaccatcagcgtcgatgcccacaaggtgttcaagccggcgccggaggcctacaccctgatcgaggaggtgttgaatgtgccgccggcggaggtcttgttcatttcgtccaatccgtgggacgcttgcggtgccaaggcgtttggactcagtgtcgcctggatcgagcgggtgacgccggaatcgatggcgctggcctgtgtcgagagcgagacggtcgccccattgacgatgttttgggcgttgcgtacccagatggacgagctcggcgtcgtgcccgatcaccggatccacggtctctccgaacttcctgccctggtgtctgcaaggtcctaatagaatgagcctcgagtctgtgcgcgccttcttcgccgagaaagcgcccgatatctccgtgatcgaatccgccgtgagctccgcgaccgtcgcgctggccgcggaggcctatggcgtcgagccggcgcggatcgccaagacgctgagcctgcgggtcggcgatcgcgtggtgctgatcgtcgccgccgggacgtcgcggatggacaacaagaaggtgaaggcagctttcggcggcaagccgaagatgctcggcgtcgacgaagtcgctgacattaccggccacgaggtcggcggcgtctgcccgttcggcctgaagacgccgctgccggtctattgcgatgtctcgctgaaggcattcgacgtcgtggtgccggccgcgggctcgacccacagcgcggtgcggatcacgcccgacaggatggcggagctgaccgcggctgaatgggtcgatgtctgcgaagtaaggccttaggggttagtcctcatcatcgggcgcgggccgcggcggtgcggccggagccggctggatcggctgcggcgtgcgcggccgttgctgcatctccggatgctgcaatgcgcgcccctgggtttgcggctgctgcgcgctggcattggactcgaatacagcgcgacagccgctcgagagttgcggcgtgttctgccgcaggcaggcgacgatccggttggtgtcgggaatctggtcgccacagagccgccacacatccggcgtgcacgccatctgctgttcccaggttccgcgatactcctgcgacgacgcaggcgccgcagcgccaaggccgccgatcgcgatcgccatgctcagaacaatccgctgcgtctgcatgcccggtgcccttgttcgatttgagttcgatctgatccgcgcacgcgcggggttccgcgcggcgatttgcttcaggctggcaaatgaatgcggccaaggatcgttgcaaggaacgacgttgcggacaactaaatgtgaaggccaacgggttgaggttcccgattcgaccttaccgaccttcttcaccgccgcgatcaagcgcgctgtcgtctgcaacgaattttgagatcttccgcgcagccacatgcttgcgaacgagctgcggcgtcgaaggcctcgatcaccttcgacgctgctacgacatcggccgtcgctagcggcagatcctagtgcttgcgcgacgccttgcgtgtctttgcgatcgaccgcttcctggttgcgccgtgcttggtcgcggtcttcttgctggcggctgcgcggcggaccggagtagccgcagccggacgcttgcgcgccacagccttcttggctgttctcctcgccgtattcctggccgtgtttttggcagccttcttggctgccttcttcgcggctgacgggcgcgcaggtcgcgccgacgtcgcattccggcgccgcgctccgccgccaccgaccggcacgatgtgatcgtcggcatccagcgtgagctgctggagcggatacgccggcaggaagctcggatcgttgtagagcttgctcaggctgccctggtcgaacttgccgccctgcccgcgatcttcgcccgcaccggcgcgccaggccgcttcccagactctcgcaagcgtcttggcaccgtcctgcatgcaggccgccgtggcatccttcagcttcgaccacatcgcgtcgacctggccgctgcccatatgggaattgaacaggttgacgatcgtcatcggcggcagccgcttcacggtgcgctgcatcagcgcgaccacggcgaccgcagcgtcgcggccggtgggcgttgcacccggagcaatctccgcgacatcggcggttttggcgtcggggatcatcttgatgagatccttgccgtgacggccgatcatcgtggtctcgtacacgctgtggaccttggcgtgcttcttgtcgttcggatcgagaccgtggtggaactgcgagatgtgcagcggctggcaggcatcgccgatgtagtgcgcaacgatgcccgcggcgcagacgaattccagcttcttgttggcggcggcatactcgaccatctcgtcgaagatctgccagacccggaacggcagcgcgccgcgccggtcctcgccgatcccgtcgtaatagtcgttccagaccttcggatcgacgttgcgcgtcgattcggcgcagaggtcgagcagcgtcttgccgtccttgcccggcttgtccatgtcggcgaaatggttgctctcgtcggtgtgccgggtgaagcgccagaccaggtcggcgacatcggccagcggcgcgaacgtgccgtgctgatacggcttgaggtcggcaagcagcttgtcgtcgaggccgatattgtcggaattggcgtccatcatggccgcgagcttgggcagctttgcagcgatcaaaccagtcgcgtaggcgccgatcttgacgtgtccccattcgccccaatactcggtgtggccggcgttccagtcgccgatcagttcgacatcgagctcgcggcacagcgtcgacatgcagatgccgagcgcgacctgcatcgggaccttaccgcccgatccgaacaattcctggccgccccattcgagcgccaggggattgaggatgcgcgcgccgctcgcatttttcggcgcatcgtgatcgtcgagaaaccacaccgtgccggaatcgccgggatagttgttgagcggcgtgtcgccatcacgcgggccgatcacgaaatcgctgacatattccaggccgccgacggtcttgtagcgatagaacaggccaaggatcttgcccttcatcacgccgctgattgcgccgaacgcaatcagcggctggtcgatgatgtcgaggcggaaggtgccgacgttgagatcgacgacgtcgccgacctggccgacgccgtagatctgcgcggtccagcccttgacgtcgtcgacacggatcaatccggcatcgagattggccaccacgcgcgagccgggccagccgggatagacctcgcagaaggcgcgcttgccgagctgcagcgtgtcgctgacgccgagacgccggtcggtgttcttgaaaccggcgaagatctcgcgtccggccgcgccgaccacgtggcggttggagagggcaaacacggtctcgccattggtgacgagacagccgatcgagccgcgatggatcttgccctggatcatggtctggaccggaaagccgccgccgaccagatcgctcttgaacaccggcggatcgacgacgccggggctgcgctcgttcggatcgaccttgacgacacaggtcggcacgacacgaccgtcaggcaaatacaggaacggcggcaccagctggtcctgcttctccggatggttcttcagctcggagcgcttcatccagtcccgcacgaagacgaggatgcagggccacgaccagtccttgaccgacgaattgaacagcgtgcgcggtccgagcgcctgcggcttggaatggtgccgccgttccgtcgcgttacggtcgctgtcccggatcagatagcggccgatcgccgtcgcatagaccgattgcagatgggccagatgaacgtgataggcctcgcgggcatcgagcaggtccttcaccgacaatgacgtgaaatcgtgcttggtcagatcaatcatctggctcctccgaaaatgctctttgcggcaacaccggttcaggacgcagaaatagacgatcgcgtcgggtcacgatcatgggttagttcacagaacttatacaatttaaaagggatgacacgaatgtgacgggtcgtgcggccttcagcctgcgcgcgacttgatgattccgctgtgcgccgccctctacttccgctgagcgcggccctttgcaaaatgcttggcgaggaaatccgcgagcacttcgacgcgggcgggccgcgggccgccgggcggggtgacgagatgcaccgcgccctcgggctgcttccagcctttcaggatcacctcgacctcgccacgtgcgatcgcgtcgccgacgatgaaatcgggcagatcggcgataccgaggccggcgagcagcgcgggtatcacggcttcgccgttgttgacgcgcaactggccggccggacggacgcttgcctgctcgcccgccgcgttggtgtattgccagacgccctgggtcgagagataggcgtaaccgaaacatttgtgctcggcgagatgcatcggatgggtcggccgcccgtagcgcttcaggtaggagggcgcggccaccgtgtagcgcggcatgccgcacagccgccgcgcgatcagcgaggaatccggcagccgcgcaatgcgcagtccggcatcgaagccctcgccgatcaggtcgacggtcgcgtcgctcagatgcaggtcgatcgcgacctccggataggcctccatgaattccggcagcagcggcgccaccgtcttgatgccgaagctcatcggcaccgcgagcctcaccaggccacgcggcgtggtcgattgcgccagcgcctcgttctccgcggcctcgccgtcggcaagcagccgtgccgcgcgctccgacaatttctggccggcatcggtcagcgccagccgccgcgaggtgcggttgaacagccgcgcgccgagccgctcctcaagcctggagaccgccttcgacaccgtcgccttggacagcgacagctcggtcgcggcggccgcaaacgaccgcaattccacgacttttgcgaagatcgcgagcgcctcgaagtccggcagtttcgacatggcagcggccccgatcattcaatttggaaacaatgagtttcaatagtttctatttctataccacagccgggggcatatccaaggggccaacgagatcgaaaccaacgcatcgaacggagcaaaccatgatcgaactgaaaccattcgcaaagctgggcggcgccgaccacggctggctgaaggccaagcaccacttctcgtttgcgagctactacgatcccgccaatgtcagccacggcgcgctgcgggtgtggaacgacgacgagatcgcgcccaattccggcttcccggcgcatccgcacgccaacatggagatcatcacctatgttcgcgaaggcgcgatcacgcatcaggactcgctcggcaacaagggacgcaccgaagccggcgacgtgcaggtgatgagcgcaggcagcggcatccgtcactccgaatacaatctggagccgtcgaagaccaagatcttccagatctggatcgagccgacgacgcaaggcggtcagccgacctggggatcgaagccgttcccgaaggcgaaccgctccggcaagctcgtcaccatcgcctccggtatcgaaggcgacgatgatgcgctgccgatccgggccaatgcgcgggtgctcgccaccacgctgaaggccggcgaaagcgccgaatacgccgccgacaaggcccgtcacctttatctggtgccggcggccggcagcatcgaggtcaacggcgtgcgcgtcaatgcgcgcgacggagccgcgatccgcgatgaagccactctgaagatcaccgcgcttgaggatgccgagctcgtcctggtcgacgcggcataatcactctcaccctgcatgcgcggacagacgtccgcgcatgctccccctccgaaacatctcccactagcaacccaaaggaggccatcatggccaaggtcctcgttctctattactccgcttacggtcacatcgaagcaatggcgaatgccgttgcggaaggcgcacgcgaagccggcgctaccgtcgacatcaagcgcgtgcccgagctggtgcccgccgaagtcgccaaggcgtcgtattacaagctcgaccaggccgcgccgatcgccaagattgacgacctcgccaattacgatgcgatcatcgtcggcaccggcacccggttcggccgcatggcttcgcagatggccaacttcctcgaccaggccggcgggctctgggccaggggcgcgctgaacggcaaggtcggcggcgccttcacctcgagcgcgacccagcatggcggccaggagaccacgctgttctcgatcatcaccaacctgctgcatttcggcatgaccgtggtcggcctcaactacggctttgccggacagatgaagctcgacgaggtcaccggcggcgcgccctatggcgccacgacgatcaccggcggcgacggcagccgccagccgagcgagaatgaactcgccggcgcacgctatcagggccgcgcgatcgcggaggctgccaggaaacttcacggctgagcttcacggctaagctttaccgttgggtttcgcacccggctgaatgatcatgcaatggggcggcactccctggcgattgccgccctgactgttttgctggacgcggcggttcccgggatcatttgcgccattttcgtgatatgccgcagggcctcctgtcggcacagccctgaggtttgcgatgaccaacacacagaagaccagctggcctgacctgccaatcgcggcgtggcgcgacagctgcgcgatgctgcagctcttcacccagatcgccggcaagatccggctgacgaagtcgccctggctcaatcactcctggcacgtcacgctctacgtcacggcgcgcgggctgacgacctcgccgatccccgacggcgaccgcacgttccagatcgacttcgatttcatcgatcacacgctccgcatctcgaccagcgacggcaccgagcggcaattcgcgctggccggtcaatcggtcgcgagcttccacgcggcgatcatgaccaatctgaaagacctcggaatcgacgtcgccattgacgagataccgaacgaagtcgccgacccgatcccgttttcgaaggatacgcagcacgcatcgtatgacgcggatgcggtgcgcaggtttcaccaaatcctggtgaactgcgatcgcgtattcaagcaattccggaccggctttctcggcaaggcgagcccggtgcatttcttctggggcagctttgatcttgcggtgacgcgcttctccggccgcagggcaccgcagcatcccggcggcgtgccgcatctgcccgacgcggtggcgcacgaggcctattcgcacgaggtcagcagcgccggcttctggccgggcggcggcgcgatcgattatcccgcattctattcctacgcctacccggaacccgcgggctatcgcagcatgccggtgcgacccgaggctgcattcttcagcgaggcactgggcgaattcatcctgccctacgacgcggtgcggctggccgcagacccggaccagacgctgctcgagttcctgcaatcgagctatgaggcagcagccatcaacgcgaactgggaccgtgccgcgctggaatgcgcgccggggccggccgggcatcgtcagagcggcctgaagcgcgatgagagcagcggcctagtcgtcctcgcgcgacggcgtcgccttgcccagcgcctgcttcagccgcgtcgacagctttggataatgacgcagcgccagcacggcgcggtcgcgcagcgcgtaaggctgcccgcgccagctcagggcggcaccaagatcgaccagcggcgtgcgctgcggtccgaaccgccgcttgtagctgtaattgccgatcgagaaatcgaactcgcgcacgccgtccttgtgcagcgctgcgatggtgcggtcgatgatcaaccggcccggcgaacatgccgcccatttctcgcccgcattgctgatccggagcatgacgtaacgcgagccgatgcggataccgagcagcgtcgccaccacttcatcccgcgtcgcaagcgcggtcatgaccgcaaagccccgaccggcgccttcgcggacgaggtcgcgatagaacgcggcgcagtccgcattgccgagcgcgtaattgagcccgagactattcagccgcgtgccctgctgcacttcggtgacggacagcaggtccagcgcctcgtcggtatccgcggcgaccctgaagacggcggaccgctcacgcgtgaacacgcgccagctccgccccaactccttgcgaaccttgcggctcaactcgtgacgccaggcgttgtggtcatcgccgatggtcaacagattgccgttgacgaccgacggtccgatgccgtcgagcagcgccagcggattggatcgcgtcgcgagcctgaccggcatcttgcgaaaacgaatgagatcggccccgccatgcgaattgcgcagcgcggcctgcagatcgcgccagaactgccatgcggcgacctcgtcgcgcggcgccgccgggccgagcaatggcgcgttgaaatcggtgaggttgaggtcggcgaattcgacgatgccgaggcccccctgccggcggcggatcagcggcagcagcgcagcccgctcgccggtcgcggcatcgctgacgacggcgatcagcggctcgacgccgtcggtcgacgcgaacgcccggtaccacgacgcataccattgcggatgctggaacgcggtgagcggctcgaacgcgccccagcgggcggcggcctgcgcccaatcgaaaaccagttcgacgcgatagccgaccgcgtacgaagcgacctgcgctccgaatttctcaaccgctgtcgtcaacactgtcattccagcacccgcaaccggcaagttcgcttacgctgccaccaacgccgccttgggcaggtcgatgatcttgccgagatcgctctcgtcgaggcggaagtcgatcgcacgccgcacagcgcattcgtgcttcacccacctgccggcgcgcagcagcttctgcatcacctgcttggcgaagaagaccggaccgcggatgctccggctgcgcggcgcgtagccgaagcgatgacgcagcatgccgttggcgagatgcaggatctgggcacggcggatgtcgtcgttgacatacgagatcgccatcgagatgttgaccgtgtcgaggttctcgacgcggtgtggcgcattgagcggccagctcagcatctgtcccggctcgagatcgatcacctgcgcatgccagtcgtaccaaggctcgtaggggatatcgacctcgacgccgaacagcgcaatgttctcgagatgctcgggccggataaacggctgcgtgttgggatagatgtagacgcgcttgcggccggcgatctggaccagaccctgccccggcagatcggcgtggtaatagacctgcgcatcgggcgacgaaatcaggatgtcggcctgatgggtcggcgcgtcgaacccgggaaccttggccgcgatctcgccgaacattcgctcgatcatgtcgcggtagcggcggtcgatcgcggtgacgttgcgcaggttcagccacaggccgccgcgcgaaatcgcctcgatcacctgatggccgcgcagcttgccgatctcgccctcgcgccagacgcggctcgatcccttggcgccggtcgtgaccaggctgtaatgctcgcgcggatgatgctcgatcagcttggcgagatcgtccatcgagaacgccggctgcttgtgaatggtgtgctcgagccggatcggttgacggctccagagcctggaatggttgtcatcccaattggtgaagatcttgcccgtcgtcatgctcgcgctcctggcggctgcgccgtttcgcttcatccgatgtcccgttccgggacgagccggcagctcttgagcagggattggcaagaacggtgccgccgcgtgcgcgcgcggggttaccgaacctaatgtctcgccgatatggctaaccgcgacgtctccggaccccgtctcgccaagccccgctgagcacgatgagtgaaaagccccgatagcgcgcgctgtttctcggcgcagggcaattcacgcgcctgctgcaggagacgatcgagaagctcgaacccggcgcgtgcgcggcgttaaccctgacccggaccgccgacaacgtggcgtgcaatttcccgatcgtggcctggaagcgcgtgatcgcgcggccgctgctcgcgctgctgcttgcccggctgcgcggcagcaaggttgtcttgatccagcacgaatgggccggcctcaacggcatccggcggctgacttatatcccggcgctgtggctcgccaacaccaagcccggtcgcgtcgcgaccgggctcctctcggccttgtttcgtcagagcggcttgatctgcaccttgcggaacttgaccacgcccgaaccgtattgaagcgcgatgtagccgctggcgtgcttggaatcctgcgcgtcgacggtcttctggccgttcagcgtcacgacgaaatgcggtccctgcgccgtgatctcgtagacgttccacttgccggccgccttcggcatcggatcgactttgccgacatcgacgatcgcaccggtgccgtaggtcgggtccggccgcttgtcgaagatgttaacctcgtagcagaccttggaatcgatcaccttgttgccttcgcagcggatgaacacgccgctgttggcgtcctcgtcggtccagaactcggcccggatctggaagtccttgtactgcgtcttgctgacgagataggagagatccttgccgtcgagcttgtcggcgaccagcgcgccgtccttcatggcccaattggccttgccgacctcgtcccagtcgcccttcttggaactgtcgagcagcgtgacccagccgtcgtcccccgatgcggtggtagagaattgcagcgcgcccgcgccgatcacgagtcccgccgcaagcaacgacagatgcttcttcaaggttatcctcccgtcttttggttggcgcgcaacctatcattgtctgcagcggcgtaaatgcgtttttgatgttgcaactgcgttgtgtcacggaccgatgccgcaattttgaggtcagacatgcgtgggcacgacttgcccggcgcaagcgggcgcgattagcatcatgcgacatacgggcgcagcagttgcccgagccaattgatctgggagcatacgatgacggcgtcgaaccggtcctggcgatacctgatgatcccgctggtctttgccggcatgctgagcgtgagcttcgcggccgagctcaatccggccgccgtcacctacaagctgccggaccagattccctggagcccggtcgacgcgcgcggcgcgcagaatgccgtcgtggtcggggatccctcgaagcccggcttctacatggtctacaccaaatggaccaagggcaatcacttcagccgtccgcacttccaccccaacgatcgctacatcgtcgtgctgaagggcacctggtgggtgggctcgggtccgaagttcgatcccgatcacggtaccgtggcgatgccggccggaagcttcgtcacccatttcggcaagcaggtgcactgggacggcgccaaggacgaggatgccgtgctgctgatcatgggcgaaggtccggcgaccgcgaccgaagtggaggagaagtagccgacagccgcgttgcgcggggtcgcggcaatgctatcatcgcgaccctgtggaagggcctctgatgcatcccgctgccaagctgcaatttgcccgcatcgccgacgagttcgcgcgctggcgcgcaatcccggagccggaacggccgccggcgccggcgtggtggtggggaccggcgttcgagctgcgcgacgccgccggcccgctgccatccaaccagtgccacaaactccgcctgcctgagggcgcgagctttgccgacgggactcgcgtgctgcgccggacgctggccggccagaccgtgttgccctggccctacgatttctcgcgcaaggtcgcatccaccgattccgacgtccgcgacctgccgatacagccgtcagacgacagcgcgtttccgccctagatccgacccggcctcgtcgatcgcctcaccgtccagcgacggctgcaacggcggcgacgtcagcaccggcgatgccttcaacagctcggcgagatcgcgcggcggcagcggccggctgaacaggaagccctgcatctcatcgcaggcatgcgcgcgcaggaactcccgctgctcggaggtctcgacgccttcggccacgatcgtcatgccgagcgccttgcccatcgagatgatcgcctgcgcgatcgcgacgtcctcggaatcatccggcaggtcgcgcacgaaggaacgatcgatcttgatggtgtcgatcgggaactgcttcatcagcgacatcgacgaatagccggtgccgaaatcgtcgatcgcgaggcgaatgccgcggttctggatcgcatccagcacccggaccgcgcgcgtcacgttgcgcatcaccatgctctcggtaacctcgagctgcagcagcgccggcgacatgccgctcgccgccagcgcctcgtcgatgtcgtcgagcagatgcgggtcgccgaactgccgcggcgacaggttgaccgccatggtcaccgccttgaggccgcggtgctgccacgccatgttctgtgcgcaggcttccttcagcacccagcggccgatcggcacgatcagcccgatctcctcggcgagcggaatgaactgccccggcgacaccttgccgagctcgggatgggtccagcgcagcagcgcttcgacgccgctgatctcaccgctcgccatgtcgaccttgggctgatagtcgagcgagaactgctcgcgctccagcgcgcggcgcagcgcactctccatggtcaggcgctcgatcgactgcgccctgacctcgttggagaagaagcgaaagccgttcttgccgtcttccttcgcgagatacatcgccatgtcggcgttcttggtcagcgtctgcacgtcggagccatcggtcggatacatcgcgatcccgatcgaggctgtagtatggcattcgtgcccgctgagctgcatcggctggctgagtgcgaccagaagatcgccggcgatgcgctcgacgtcgccccgctcggcggtctcctccaggatcaccacgaactcgtcgccgccgagccgcgcgaccacgtcgctcgcgcgcaacgacccgcgcagccgttcggcgatcgccaccaacagcatgtcgccggcgtcgtgcccgagcgagtcgttgatcaccttgaagcggtcgagatcgatgaacagcaccgcgagctgccggcgatgccgatccgccgtcgaaatcgcgtgacgcagcatctcgttgaacgtctcgcggttcggcagattggtcaggctgtcgtgcgaggcaaggtattcgatccgctcctcggccttgtgcttctcgtcggcgcgatcgaagctctccagcgcgaacgccagattgtcggcgagccgctgcagcagctcggcaaactccggcgtgaacgtgtccttctcggtcgcgacgaagatcatgacgccgaccgcccgcccgctgacggtcagcgggaacgaggcgccggacttggttccgtcgaggcgggcccgttcgtggaaagcggtggtctcggtatcggcaaaatagtcgttgatgatgcaggccttgcccgaccggaatgccctgccgcaggcgccgcggccctccgggtgcgcctcgctgatcgagagcgtcacctggctcgctccgccggctgccgggcctgcgatggcgacgatccgcagatagtcgctgccgggctgcgccagcgcgatggtggtcgaggtgaatttgccgccggtcgcggccgcctcgcagaccagctgatagagctcggcgcgggacttcgcccgcatgatcgcctcattggtcgcgctcagcgccgcgaacatccgcgacagccgctccttctgctcgtcggcccgcgccttttcgtcggcccggtcgaaattggcgagcgcgaacgacacgttctcggcgagccgctgcagcagcgccatcatctccgggctgaaggtgccgaattcgctggagagaaacaccagtgcgccgatcgcctcgccgtccttgagcagcggcagcgccgcgccggacttgctgccgctgtcgcgaacgatcggatagacatgcgattcggggccgaagtcgctgagataatcgttgctgatgcagggccggcgggtgcggatcgcaaccccggtcagcgtctgtccttccggacgcgtcgcgtcggccgacaactggacctcgcgggcccggacccggtcgggcccggaagccgccacgttatccaagaaggcctcgccgggacgcaccaggcggatcgtggccgagatgaactggccgccgaccgccgccgcatcgcaaaccagatcgaacagctcgctgcgggatttcgcccgcatgatcgcctcgttggtcgcgctcagcgccgcgaacatccgccgcagccgttccttctgctcctcggtgcgcgccttctcgtcggcgcgatcgaagctgccgagagcataggagacgttgtcggcgagccgttgcaggagctcggcaaattcggccgagaaggtgttgcgcttggcggagatgaacagcatcacgccgaccggctcgtcgtcgacgatcagcggaaatgcggcgcccgatcgcgcgtcctcgcggtcgatgatttcgcggaacgggctgtcggccacgtcgcccatgaaatcgttgttgatgcaggcgcggcgggaacgtaacgctctgccgcagacgccgcacccttccggccgcgcctcgctgcgtgagacgttgaggcggcgtgcgttctcggcggtcggacccgcgaccgccatcatctccatgaaatcgtcaccgggtttcgcgatcaggatgctggtggaattgaacccgccgccatgcgcggccgcggcgcagaccaactcgaacatctcgagccgcgagcgcgcgcgcatgatcgcctcgttggtcgcgctcagcgccgcgaacatccgcgacagccgctcgcgctcggcatcggccttggccttctcggtggcacggccgaaattgtcgagcgcaaccgagacattttcggcgatccccgccagcagcgcgatgatctcttcgtcacgcgcccaggaattgccggtgaagaagatcaggacgccgatgctcttgccgaaccgggtgagcggcagcgcaacgcaggccatcagaccactgccgcgcaccggcgcctgcgactggctcgtcgatatcggaatgtcgtgctcgacgcacggccgctgggttcggaacgcctcgccgcagatgcccttgccgtagacattgtccggatcggtcgagaaacgcgtctgcgtgatcaggtcgatcgcctcgccggtgccggcgacgggctcgagccagtgcgtatcgggctcggcgagcagcaccaccgtggcgaaggatttgccgctgaacaccgccgcgtcgcaaaccctctggtagagatcgtgctcagtcttggcgcgaaggatggcttcgttggtggcgctgatggcaccgaacatgcggttgagccggcgcatcgcccgctcaccgctcttgcgcgacgcctcatggtcgaaattgtcgagcgcaaaggacacgttcgcggccatgcgctccagcagcgacacgatctccgcgccgagcgagtcgacctcgcggcgcgtcaccatgaagacgccgacgctgcgcccgttgcagaccagcgggatggcggccgccgcaccgacaccggcagccgcgacaccgctgcgccaggccgtcgaacgggcatcgttgacgtagtcgttgctgacgcaggccgcctgctcgcggaacgcgcggccggcgacgccctctccttccggagtgttggcgagcgcggagatcctgatgctgcgcagacgcgcgacatcgtcgccgcaaccggctgcgaatctcagcagaccggtatccggctcaagcaaaaacacggtcgcggccaggaagctcccgctcgagaacgcggcttcgcagacctttccgtacagttcttctggtgatttcgcgtacaggatcgcttcgttggtggcattcaacgccgcgaatgtacgcccgatgctcgactgcacgattcctgaaggccccgcggccacccccttcaatccggggcggaacattgcccgcgagaggcctaagtgatggttagtgtatccggcaagttgtgagacaaagtaaacggctgacgaacgccggaggcggtttcccgggatattacggacgctggtgtgccagcctgaggcggaggcttgcggggagtggattgccgccctgccggcgccggccgggcagccaaattccgcaccgcgaccgcgcccgttccacccggtgaaatccggacccggagcaccctgcttgcggtatggcggatcggattttctgcgcttgctcgcacctcggcgctttgacagcatgacgccgacaacagcaagcaagacccgcgcatcacgcgggccgaccgcgaggaaaatcccatgccgatcgtccaggccgaccgtctcacgcgcatcggcgcggcgctgctgaagggcgccggcgcatcggaggaggaggcaagcgcagtcgcctccggctgcgtcaacgccaacctcgccggccatgactcccacggcgtgatcgcgatcccgacctatatcgaccgcatcaaggccggccatatcgtccccggcgcgaaatggaccgtggtgcaggagacgccgaccacgaccgtgatcgacggtcattggggttttggcttccacgtcaacgccaaggcgatggagatgaccatcaacaaggcgaagaccgccaatgtcgcggcctgcaccgtgttccggcaaagccatgtcgggcggctggcgcactatccgctgatggcgatgcgcgagggcatgatcgggatcgcggccgccgattccggccgctcgccgaagcatgtcgcgccgttcggcggccgcgaggcgcggctcggcaccaacccgctctcgatcgcggtgccgtccgatctcgaggcgccgttctatctggacatggcgacctcggcggtcgccgccggcaagatccagctcgcagtggcgcgcggcgagccaatcccgaagggctggatcatcgatgccgaggggcgcgacaccaccgaccccagggattatcgcaagggcggtgcgctgctgccgctcggcggcagcgaaggctacaagggaagcggccttgccgcgatggtcgaggtgctgtgcggcctgttgaccgggctcggcttcggcgtcgagccgaccggccggcacaatgacggttgcttcatggctgtctttaacgtcgccgcgttccgcccgctcaaggatttcagacgcgaggtcgccgacttcgcccgctatttgaagtcgacgccgccctcggaaggcagccgcggcgtgttctatccgggcgagatcgaacatctgcgcgaagtcgagcggcgcaagaacggcatcgagatcgaggacgcgacctgggacaagctgaaggcgctcgccgccgactacaagctgaccgaccagctcgatcttcgctgaaccatccgagcacaggagaacgacatgacacggcaaatggcgctggttggctttttgcaggcgcagaactgcaccaacctgccaggctcctggcgccaccccgagtcgcgcgatgactcgatgtccgcggactactaccaggaaatcgcgcgcatcctggagcgcggcaaattccacatggcgttcttcgacgatcgcctggcgatgcccgaccgctacggcaacgatcacgcccacaccgtcgaatacggcatccgctgcgtgaagatggacccgatcgtggtgctgaccgcgatgggcatggtcaccaccaagctcggcctcgcctcgaccgcgtccaccacctatttcgagccgttcgacgtcgcccgccgctttgccacgctcgatttgatgacaggtggccgcgccgcctggaatgtggtgacgtcggtcaatgacggcgaagcgctcaacatgggccgcgagcagcatctcgagcacgatcaccgctacgaccgcgccgacgagttcatggaggtggtgctcggccattgggacgcctgggaagacggctcgctggtgatcgacaagacgagcggccgcttcgccgatccgagcaaggtgaagcggctcgaccacaagggaccgttcttcacctcgcgcgggccattcacggtgccgcgctcggcacagggccatccggtcgtgatccaggccggcgcctccggccgcggccagcgcttcgccggacgctggggcgaggtgatcttcaccgcggcgcgcaaccttgccaacgccaagcagggctatgacgcgatccggggcgaagccgccaaggccggccgcgatcccgaccagatattcctctgcaacctgatcacgccggtcaccggcgcgaccaaggccgaggccgaggaccggatggcggtgatccagaagctgccgctcgagatcgacgcgctgtcgctgctcgccgaaggcctcaacttcgatttcggcgccaaggggatcgacgaaccgctgaccacagatgagttgcagggcatgcaaggcatgctcggcatccgcgacggcgtgctgcgcacctccggcaagaccaatccctcgacccgcgacttcatcacgttctccggccgcggccaggtgcaggacgcgatggtcggcggcccgaaggagatcgccgaccggctggaggagatgttcacaggccgcggctgtgacggcttcgtcgtcgcggcaagctatgtgccgggctcctatgccgacttcgtcgaccacgtggtgcccgaactgcagaagcgcgggctgttccacaaggactacgccggcacgacgctgcgcgagaatctcgggctcaagcgcccggccgcgggcgcctggaagatccgcgcgcaggctgcggaatagagggacatcatcatgcgctggctgaaattcactgccgcgggcaacaccgcaagcactccttcttggggcctcgtcgagggcgacaccgtcaccaccgtcgacggcgatccattcggcgaatggagcaagacggcgaagacccacaccctgaaggacgtcaagatcgagctgccgctgatcccgcgcaccttctactgcgtcgggctgaactatctgaagcacctcaaggaagccgccgacaaggccggtacggtgccgaacgtgcccgatcgtcccgagatcggctaccgcgcgcagaacgcgctgatcgcccacgacgagaacgtcgtgatcccggcgagcgcgactgagaagatccattacgagggcgagctcgtcgtcgtgatcggcaagacggcaaaacacctcaccgaagccaatgcgatggactgcgtgttcggctacaccatcggcaacgacgtctccgagcgcagctggcagaaggccgaccgcgggctgtggcggtccaagaacgccgacaccttcaagccgatgggcccgtggatcgagaccgatgtcgatctcgaccgcatggaaaccgcgatccgcgtcaacggcaaggagaccggccgcttccgcaccaacgacatgatcttcggcatcgtgcccttcctggtcgagctttcgaaatacttcacgctgtcgcccggcgacgtgatctggatgggcaccgacggcgcctcgccggatttgaaggacggcgacgtggtcgagatcgacatcaccggcatcgggacgctgcggaacaggttcgtgaaggagaaggtgtgaggcggttggtctcgccggcgcgcctcatcatcggtgtcgtcctggcgaaagccagaacccataaccacaggtcgagttgctgaagcatgctgtggccacgacgtcgtgctataatccgcattcgtggcaatgggtcccggccttcgccctagggcatgcacacatctagttgggtggggattcccgaat

SEQ ID NO: 48 - DNA, 44581 bp, Bradyrhizobium enterica
  misc_feature (11994)..(12018): n is a, c, g, or t
tgcggattccgctcgatgtcgcccagcattccgagatgatctcgcccaccattccgatttgaagtcgcccacccattccgagatgatgtcgcccaccattccgggatgatgtcgcccgggtgacgaggcctcttctggctcccataggtcaaccctttcggctttgcgaagggggaccctggatgccgacggagaggcttgcgatgcgccgtgtgcgcgatgtgatcaggatgaaggcggccggtctgccgagccgcgagattgcgcgacgggtaggagcggcgccctcgacggtgcggctggcgatccggcggttcgaggccgcgggtctgacctggccgttgcccgacgagctcacggacgcggccctggaactccgcctgttcgccaagaccggcaatggcaaccggcagggtcaccgccgcatcgccgaacctgattggacgaccgtgcaccgcgagctcaagcgcaagcacgtgacgctgtcgatcctgtgggaggagtacatcgccgccgaacccgacggataccggtactcgcgcttctgtgagctttaccgcgcctgggagggccgcctgtcggtgacgatgcgccaggcgcacgcagccggcgacaagctgttcgtcgactatgccggcgacggcgtgccggtggtggtcgatcgtctcaccggtgagcgcagaatggcgcagatcttcgtcgccgtgctcggcgcctcgagctttacctacgcgcaggcgacgtggacgcaggggctcgccgactggatcagcgctcatgttggcgccttcgcggcgatcggcggcataccggcgctgctggtgcctgacaacaccaaggtcgcggtcatcaaggcgagcctgtacgacccgcagatcaatcggacctatgcggagatggcggcgcattacggcaccgccatattgccggcccggccgcgcaagccgcgcgacaaggccaaggtcgagcaagccgtcctgatcgtcgagcgctggctgctcggccgcctgcgtcatcgcaccttctacagcctggccgaggtcaatgcggcgatcggcgagctgctcaccaggctcaacgaggagcggccgatccggcggctcggcgtgacgcgccgccggctgcttgaggaggtcgatcggccggcgctcaagccattgccggcgagcccctacgtactcgccgaatggcggatccgccgcgtcagcctcgattaccacgtcgaggtggagaagcattactacagcgtcccgcatcgctttgtgcgcgccgaggtcgaggtgcggttcactgcccgcaccgtagagatcttccacaagggcgagcggatcgccgcgcatcagcgcatgagcggtaatcacaaacacaccaccgtgccggagcacatggcctccagccatcggcgctacgccggctggaccatcgcgcgcatccgacaggacgctgccgcgatcgggccggcgaccagcgctttgtgcgacctcattctcgacgagcgctcgcaccccgagcaaggcttccgcgcctgcctcggcatcctcaggctcgccggctcctatgggcgcggacggctggacgccgcggctgcgcgggcgatcgacatcggcgcgcgcacctacggctcggtcaaatcgatcctcgccaacaatctcgatcggcgtcccgctcatcagcgctccgcggacgatgcgccgatcctgcatgccaacatccgcggaccgcgctactacaactaggagaccatcccttgctcacccatccgaccctcgaccgcctcaacgccctcggcctccacggcatggccaatgccttcgtcgatatcgaagcaaccggcgaggccgcaagcctcggtcacgccgaatggctcgcgctgctgctcgaacgtgaagcatcactgcgccacgataagcggctcgccacccgcctgcgctatgcgaagctgcgtcagcaagcgtgcgtcgaggacatcgactaccgcaccccgcgcggcctcgaccgcccgctgttcgccaagcttgtcgagggccgctggatcgatgaccatgccaacctgctgatctgcggcccggccggcgtcggcaagagctggctcgcctcggcgctcggccacaaggcctgccgtgacaatcgctccgtgctctatcaacgtgttccgcggctgttcgatgacctcgctctcgcgcgcggcgacggtcgccatccgcgcctattgcgcgggctcggccgtgtcgatctgctgatcctcgatgactgggggctcgagccgctcgacgctggtgcccgtcacgacctcctggaaatcctcgaagatcgctatggtcatcgttccaccatcgtcaccagccagctccccgtggaccagtggcatgtgctcattggagatcctacctatgccgacgccgtgctcgatcgcctcgtccacaatgcccatcggctcgaccttactggcgagagcctgcgccgaacccggcaatccgcccgaaagacctgagcccgtgacgctgtggacatgccgctgcgcttggacaacgccaaggcgttgcccacatgcccacagcaaacgcaacagaaacacaacaagctcaagccgcgattccagttgaccgtgcggcttgcccaatgccagagaacctcagcagctagaacgcctcgcccccgggcgagatcaaatcggagaggtgggcgacatcgtctcggaatccccgggcgacttcatatcggtacacccgggcgacttcgtcggaatccgcacctgcatcttccggcatcgacgccagcgctcttaacgagcaggtaaagtccgcactgctgatggcctctgctcgtaggaagatcgttggacagcagcaagcggaagctgaagctgatgcttcgccaatggtccatggtgttggcggtctggacgcggtgcgtaaccctgcgatgggcaagagggccagcgagcttatcagcgccgccaacgctctgaagaagctccgtgaggtccctgaagccgacacgagcgaggctccgaccggtccagccatggagagccggtccaacagtgcggagccgttcgcgctgcctgagagcccctactggcatctggacgctgccgaagcggcggacagcatcctggaggacgccaaggctggacagaaatctatccgcaacgagcaagcgtatcacgctggcaccgttcgaaggctcaaggctgaggaggatatctaccgccgcatctcagacagcatggagagcgtcagggagcgcggtgccttccacaagtacctcagcgcactttggggctctgacacccccgaagtcgtcatgaaggtccgcgatcagatgatgacggagttcccacagtacggggtgaccatcctgaagcatctccctgacgacgtcattaaggggctgtggagcaccaagcccgcgagaaagtaaggcggggcgtacaccccgctcctctcgtttcctgctcaatccaacatcaagcaccaatcagcgcaccaacgctctcggaagcagcgctgcaatcaagaacctaagaaatccaacccggaaatatggccctagagacattcaacttcgtagatagcctctccccgaccaacccagctccaaccgacagcgtcaccaacggtgccgaccacatgaggggcatcaagctcaccctgaagcagaccttcccaggcgcgacaggcccccttacgacggccaagggcggccatctatccattgatgatggtaccgctacggctccagccttcaccttcaccagcgagccctcgttgggcttctaccgttccgccgcaggcaccatcgcgtgctcagggactttccttggcgggaagttcatcggtgagattttcgactacgctggtgccaatccgcctcctggctgcttggcttgcgacggccaagcgctgtctcgtaccacctacgccgatctcttcagcatcataggcacgacttggggcgctggcgatggaagcaccacgtttaatcttccaggcctaatggctcgcttccgccgtcatcgtgacaacagcacgctttctggagccgttggtaacaagcagaaccccacgaacctcacgcacacgcacggtgtctctggcacgaccggctccgagagcaatgaccactcgcactatgtctcgggctacacagggtccatgaaccagaacgccacgcacacgcacaattcgaacgcggcggcgaacggtggcggctccgggactggtggcggcgccttcgccctcaacgctccgggcgcagctacgatcagtgcggttaacacggaccatcagcattacttcgctgcacagagcggcggcatcagtgcgaaccacgttcacgccttctcggtgacttcgcaagcgtccggcgatgccaacgaagcacgcccctattccgcaacggtcctaacctgcatcagagtgcaataagcatcccgaaacgcttcgagcttcttcaagcttcgttagacgcgaagagccaagatcatcgcaactattccctaggaggtcgttcgggcggtctggcgaccctcagggctgctgccttttggtggaagcagccttaaggcactcatccgcatggcaacgcgacaggcggcttggctcatctcgggtccggccgcctccgtaccttcttcagccagtatttcgcgtaccggacgtgcaaaacatgacacctttagaatccacgagcgctaggtacacagttggaggaaatggacctcccttcaatcgtccaataattgcatcgtaatagctatcgcaggagtcaaccttttcggaagggatgttcaaatatatacgaagatcggacttgtcttcaggactttgaactactcgaacgatggtctttgcttgttcgattccaccccacagcgcgggtggcaattccggaaagtgcttagcatctaactcgccccttgaagcgccgctctttggaatcagaaggctgatctgcaccgtctcgccaccgatgacaacatctgaaagaaccctcgcgtggtagcgcaacgtgaatttaccagatttgtcggaggacaatcgaattagaaaatgatccgtggcgcctggctttatctcctgcgacacgggcacagatgcgacatatccgctttttcctgaaggcaagaacaagtcataagtcgcacttggtggggctggagcgcccggtccgggattgaaccgtgaaacaagactcctgaaatgaagcgtaattcgcgctttgttgccagctgctgtgtaggtgagcgtgcctctaaggcaaatcagaggctcttcttgtagatccttcgggacaaacctttccacgtcgacattcactctgtcatcaacatcttgcagggcgatcggaatgtttgccgtcattgcgggactagcaccattgcaagcatcttgcacaaggccaaatcgccaattgaaaacgatatcgcgcgggtcaacctcgggtttcttccagtcgactatttcaagggcaggatctagcatctttccccagccctcattgacgatttgcagatgaccaatgttgtagaagttctcgtggatgacgggaatgggtgtaaggtcaacctcagcagcaacgacctcaaagaggatttctgaaaccagcagagttgattgcgaattattcgctatctttatagagaggctgggatactcccacttaaatggctcgtaccaatattggattccgaccacctcttgatttgcagcaactttgtcgagatacggcattgatggtcgaatgtctttggttccgtcggcaagtcgcgtagcaacatatcgtagacgatattcttcacgccggtcgatttctcgcgtcgcaggctctgcgaacaaatcaatagtcgaagatgtttttgccctcaggttttcgggcgccagcacataggcaactatgccgatcattgtgaggcaaaaacaaagcgcaagaaacgctaagaaatagtaggtgtggattcgactcttaagccattgttccggtgtaaatccgcttggagggtcgatgttacccatctcagcacgtagcgctgatagtcgttgatccgacgggatcttttcgagggcatcgagcaggttcttatttcgctgaaccctccaagcgatcaatagccaagccaagacgaccgtaacgtatccaatgaatgcaaacggactagttgcagccgtaggtaacgctttgagaagtccttcaatttccacaatcgcacccaataaggaaatatatgatcttcctaaaatagcatttggtagtatgcacaacttggaacgaaccggaaagcagaaagaagaatccgagtgctcctcaggaggccgcattgagtcaccagcaggcatccctaattgtgggtctcgtgccggttttgccctccaaagcgggcagatcacccaaaatcagcaccgccctgggccgtcagcgcaagttaccgtgacattcacgttctgaggctggttggcgtcgatgctctgcgacgacctccccataccctcaagggcctcagaaaccctaaggatgatgactgagggtgccgtacggaatgctgctcaggcttgtagcgggactcactggtgagctttcagggctggaggctgggtagtagcctgaagggctcaaaacgactccatggaatcctcagaggctcctgaagccatgtcgtctcagatcaaataaacacacccctgaaacctctaaagaggatggtgaagagcttgagggatgcattagccccttgaagcctcaccagatcgcaataccgccgaccaaggccaccaacggcactcacgagccctcgtgccttcagtcgtcaacccaaaacctcaaggtcagtaactcatgactaccgttatcggtatgcacgagcagtatgctctcgtgccaccgctggagttcgtgtccgccatgaacgatcactggacacagacgctcaacatgccgtcctcggcggccttacgctctctttgggagagcatgggcagcgtctttgaatggtcaattgtagataacatcagtgaacgtgatgcgcgctggaaggtccttcagccccctaccgggtccggtaagacccagggggcgtgtctgtactcggcaatgcaggcgaagcgcaatcgagacgagcaaggcaaactcaagcctgttggtgtgctcctcgtgacccgtctgattaagcaggccaatgaccttgctgcacaggtcaacatgatggctggtgcggagctcgcggttgctcaccattccagtagcggaacggatgccaacgatatcggccactttgacgtgcttgtggtgacgcaccaagcgttcatcaacgccgctgagagccttggcggtgcctcatggtcacgcctcgttaactggcagggaggccagcgccttctcactatcgtggatgaggcgttagccaatgtggtcgaggagaccaaggtcacgctggagaaccttcagttcgtacttggttgcgtgccctttgacgtagcaaaggcctaccccgatcaagtcagggtcattgaagcgctcaaggatgcgctagtgtgtcaggcccaagccgaagcggccaacgacggcactgcgaagctcatgtggaaagatggcggggccagtgaagcattgggcgctcccctagccgccatgaagcccttgagagaggccatgcgcaaggtgaagtacgatcgacggatcagggagggcaacacgaagcgaaacatcaccaagctggtggatgacacactcataagcgcccaggctctaacggatcgatgggcttactatgctcgcgttggcaaggatcactcgctcaactcctccacactgacggtctcctatgctgtgcccggtgccgtggtgttggatgcgacggcaagccagaacttcctgtgggagcttttccaaggcagagcgcgaatcgaacccgtctgtgcgggtactcgcaactaccggaacgtgacgctgcacgtcgcgagggctaagggcgtcggcaagacgaaaatggagaagacgtttgcaacccgctatgcacgcctactggagacccttgaagctcagttaggcgctgacaggtccgtgtttgtatgcgtccacaaggactacgagcacgctgcggagaggttcaagcaccccttcaagcgtatcggcttcggccattggggagcagtagacggacgcaatgattggaaggactacgacacggcggtgctgttcggcctgccatatcgcgacctgatatggcctaccaacgtgttctttgctcttcagggggtgcaggacgatgcttggttgaagtctccaacgtggaacggatacacgaacgtccgccgactgatgcagcagcgtcaaatgtcggtggagattatccaggccatcaatcgcatccgatgccgcaaggtagttgaccagcatggagggtgtgatccggctgacgtgttcattgtgcttccagccgacaacatgggtgacgccatcctgaccgatattctggcagacatgccgggtatcgacgtggtgccgtggtcattcgagatggatgggccgaaggtgcagcggcctcgtgagggtagctcccaccaaaccttgctgacgctcatgcgcaatgctgaccccggtgacagcattcctctgagcaccatacagcgcgagttggcgttgaagcctgctgggttctcaaagctccgtgcggtgctccgtgacggcactcatgccaccagcagggctctcatggagcttcgtgtggaatatgtctcaggcaaaggacgaggggctaagagcttccttgtgaagcaccaagctgcctaacggaagacttgagccggtgaagctcctcttagcgagggctttgccggttcttttcggtctaaccacgtcatgcattgatggtgtgccacttcacataataatgcacacttcgctgtgcatcgtagtgtcgtggtgaccattatcgccttgcctggagcgcgcttctcgaatgccgcccaagtaagggcttttccggctcttttcggtcaaacaacggcatcataggcgactagccccacgcccaattacattcagaggtgcacttaatcctatcgggcaagagggaaggcggcacggaaaaccccgaggaccccatgccgtccgtagcctttcagcggctatttgatggtcgactgttggcagtcagcgcttggcccgtgggctcttggcgctcttgcgcttcttcggagcctgttgctcctgcgcataggcttggtggacctcaaagaacggcaccccaaagcgctcggccaacttctccactgacccaccgacttgattggccatggtgtcgagttcctggctgagcttggaggctgtctgcatcaagccgagcaacgccgcgaggtcggctagttgctgcttggaggggattgaaaccggggtggttgagctaggtgggtagagattcttggccattcggtaagctcctgatttcacgatggaaatgggctttccaataaactggctggggaacctggattcgaaccaagacaaacagagtcagagtctgttgtgctaccgttacaccattccccaagaattgtccgtggtatcaacagcttagctggatgactggacatctcggtgcagcgggttcgcctgccaaatcagcgcccgcgcgagagcgaccttctacccgcttggtcccacgcttggcaagcattgatggcgaaggatcggcgtaaaatcacggtcagtacagcccgcccgtcccagaccgcatcacggcccgatccgcgtccgccgggatgggctgctgcgtcccatcgatcacatcggtgccggcgaccagcgtcggatcatagaacggcggcgcctggcccggcttgaaggcttcgagcaccacgccccggttctgaccaggcgtggcgcgcaggccggtcttggcatcgaccgtgaccagccggatgccgaccggctgcttgaacggggtggcgggcttgtcggccagcgcgagcttcaggaagtcgcgcgcgatcggcgccgcggtgtggccggcctgcgcgttgcggccgagcgagcgcggcttgtcgtagccgacatagagaccgaccacgaggtccggcgagaagccgacgaaccagaggtccttggcctcgttcgacgtgccggtcttgccggcgagcggcttgccgacctccttcagcgcggtgccggtaccggcctgaatcacgccctccatcagcgaagtgatctggtaggcggtcatcgcgtcgagcacccgctcgcggcggtcgaccagctgcggctcgggctggctcttccagccttccggcgcgtcgcagccgcggcattcgcgctgatcgtgccggaagatggtgtggccgtagcggtcctggatgcggtcgatcagggtcggcttcacgcggacgccgccattggcgatcatcgaataggccgttgccatccgcatcaccgtggtctcgccggcgccgagcgcataggcgagatagttcggcagctcgtcatagacgccaaagcgttttgcatattcgccgatgacaggcatgccgatttcctgcgcgaggcgcacggtcacggtgttgagcgacaggcggagcgcgttgcgcagcgtgacctggccctgatacttgccggtggagaagttctccggccgccagatgttgccctgtccctgatcgatctcgatcggcccgtcgatcatcatggtcgatccggtatagccgttgtcgagcgccgtcgaatagacgatcggcttgaaggtcgagccgggctgccggtaggcctgggtcgcgcggttgaactggctctggtcgaacgagaagccgccgaccatcgccagcacacggccggtgtgcgggtccatcgccaccatcgcgcccgacagttcggggatctggcgcagccggtactggccctcgacggccttgccgtccttgctgaacagcggatcggcatagatcacgtcgccgggctgcagcacctgcgccaccgaggtcggcgtcctgcccttgtacgggccggacaacagcctcgcccacttcacgccttccagcgtgacgatgccggtctcgcgctgcttgctgatggcgccgccgagctcgcggccgggctggaagccgatccgcgccgactggtcgttgctctccagcaccaccgccatccgccacggcgagatgtccgagagcgacttgatctcggcgagcggcacgccccagtcgctggcgaggtcgagcttctggatcgcgccgcgatagccctgctgctcgtcatagttcacgagcccggccaccatggccttgcgcgccatcacctggaccttggggtcgagcgtggtgcgcaccgacaggccgccctcataaagcttcttctcgccatagcgctcgaagatgtcgcgacggacctcttccgagaaatattcgccggcgaaggtgtgcgcgccattgctgcggttggtgacggcgagcgggtccttgcgcgccttgtcggcatcggccgcggtgatccagccgttctcctgcagacgatcgatcacgtagttgcgccgctcgatggcgcgcgcacggttgcgcaccggatgcaggctggccggcatcttcggcagcgccgcgagataggccgcctccgcaaccgtcaattcgttcaccgacttgtcgaaatagaccagcgaggcggccgcgatgccgtaggcgccgaggccgaggtagatttcgttgagatagagctcgaggatcttgtccttggaataggcccgctcgattcgcatcgccagcagggcttccttgatcttgcgggtgaacgacacctcgttggtcagcaggaagttcttggcgacctgctgggtgatcgtggaggccccctgcgggcggcggttggaaccgaagttctggacataggagacgccggcgcgcgccatgccggtgtagtcgatgccgccgtgctcgtagaagttcttgtcctcggctgcgaggaacgcgttgatcacgagtttcggcaccgcctggatcggcagatagagccggnnnnnnnnnnnnnnnnnnnnnnnnngaataggcgcgctcgatgcgcatcgccagcagggccggtgtagtcgatgccgccgtgctcgtagaagttcttgtcctcggctgcgaggaacgcgttgatcacgagtttcggcaccgcctggatcggcagatagagccggcgctccttggcgaactcgcccaacagcgacccatccgccgcgtgcacgcgggtcatcaccggcggctcgtagttctggagctgcgaatagtcgggcaggtccttggagaaatgccagaacagccctgcgaccgcggccagaccggccaggaacatgatggttcccgcggtgaacaggaacccgaagaaccgcaacagaaatttcatcgaccagattttccgtggcgaatacgtcgctcgttctgagtgcgctgcgtgccacttaggctgcccggtatatcggtcgctccaacgacctgcaattcaacacgggagaattaaagcgggccaggcgtcaaacttatgccatagagggccgctcgcacacgcggccaaatcagcggaccttgccgccctcgcggtactccggaggctgcatcgatcccggcaccgggcgctgctcgattcgagcctgtctcgtccgacctgcgcggccccccccgatcgcggcgcttgcgccgagcgcacgctgcgaaagaaaagcgccggcccagcccgtcgcccgcactacccggctgccgttccgggcaccgggtcatcagaaaccggtggacagtgccggcgagcccatccgattaaccacccattaactataactaccgcaggttgtcgatctacacgcgactcgcgaggggctgacttgcatggcactgcgcggattcaagcggccttttacggccgacccgaatgtccttggatttccgaaaccacccacatcggcgatgggcaccgaggccttggacctcgtctatcaggccgcggatctgttccgcagcatcgaggacagggcccgcgccggcgaagcccgcgctgaggccgccgaacaggcgcagctcgaaatcatcgccgccaccgagcgcaagctgagggacgcgtcccgggcactcgaggaggcgcgacggcgtatcgagtcccagcaggagcagctcgatgcggccgaatatcgtgcccaggccgccgaggccgaggcacgcgaagccaagcaatcgctggccctggtcgaggatgcgatccgccggcgcctgctcttgaccagcggtcatgacgacggcaggccaagcgccgtcgcctgaggcaagttcgatcggggcggcagccctgcccggccaccgccgcgcgattgcccaacggcaatcagtagccgccggccagtcccgaattgcggcgcggatcgttcgccccatagaagcggttactgccgaccggcttgccgtccagcgacggcgctccgatgatgatcaccgcgagatggttggccggctgcggcggcccgaacttgtgacccatgccttccaggatttttcgcgtatccggagacagcgtgaagtcctcgagattggtcgcctccggaagccattgctggtggaagcgcggcatgtccacggcctcctgcgcgttcatgccgtagtcaatggcgttgatcattgtcagcagcaccgccgtgataatgcggctgccgcccggagtgcccaccaccatgaccggcttgccgtccctcatgacgatggtcgggctcatcgaggacagcggcctcttgcccgggacgatcgaattggcctcaccctgcaccagaccgtacaaattcggcacaccgatcttggcagtgaagtcgtccatctcgtcgttcagcagcacgccggtcttggccgcggtcaccttggcgccgaaccaatcgttgagggtgtaggtgaccgacaccgcgttgccgtccttgtcggcgatcgaatagtgcgtggtgttgctgccttcgtgcggcggcacgcccggcttgatgtccttggacacgccggccttggccgggtcgatcacggcgcgaaccttcgcggcgtaggtcttgtcgagcaggcgctcgagcggattcttcacgaagtcggggtcgccgaggtagctgttgcgatcgacgtaagcatggcgcatcgcctcgatctggtaatgcaccgcctgcgcggaatggtagccaagctccttcagcggatagccctcgaggatgttcagcacctcacagatcacgacgccacccgagcttggcggcggcgccgagaccacgtggtagccgcgataatcgcattcgaccggcgcgagctcgcgaaccttgtaattgtcgagatcttcctgggtgagcaggcccttgccggcctggttcgaggcgacgatcgctgcccccacccaacccctgtagaagccgtcggtaccgcgcttgctgatctcgcgcagcgtctcggcgagctcgtgctgcgccagccgctcgcccacctggaacggcttgccgttgttgagaaagatcgcggccgacgccggatcgtcctcaaaatccttggtcgcggtctggaacatgctgacgtcaccctgatccagcacgaagccgtcctcggcgagttgcagggccggcgcaatcacgtccgcgcgcttcatcgtgccgtatttctcgcgcgcatattccatgccggccaccgagcccggcacgccgacggcgagatgtcccttggtcgacagcccggcgatgacgttgccgtccttgtcgagatacatgttggcggtggcccccttcggcgccgtctcccggaaatcgaggaaggtcttgcggccgtcggccagctggatggtcatgaacccgccaccaccgagattgccggcggcgggatagaccacggccagcgcgtaaccgacggcaaccgccgcgtcgaccgcgttgccgccgcgcttcaacacttcgatgccaacctccgtcgcgagatgctgcgccgagaccaccatgccgttctcggcggcgaccggggcaaccgatgccgcgcgagcgggagcagcggcgatgacgccgatcgaaaccaccgcggcgacgatcctccgcgcgcgcaacgttgaattttgcatggaagcctcccgggacctacgccgactctcgcggccttatgatgcgaccttggcgcgcgaacctagcaggccgctcgcgtgcacactataggcccgcgctggcctcaccgcccacccgcagccggctgtggcgtctgccataggccgcatagatcaccagtccgatcgcaagccacaccgcgagccgtatccaggtgtcgagcggcaggccgaacatcaggaacagcgaggttcccgcggcagccggcgccaccagccagatcgccggcgccttgaacgggcgcggcaactccggatcgcggacgcgcagcaccagcgttccgatcgacaccacggtgaatgcgaacagcgtgccgatcgagacgagctcgccgaccagcccgatcggcagcagcccgccgagaatggccgcgacggtgccggcgaagatggtcgagacatagggggtctggaagcgcggatggatcttcgcagcaaagcccggcaacaacccgtcatgcgccatggcgcggaagatccgcggctgcgccagcagcatgatgaggatcaccgacgtcagcccgaacaggatgccgagcttgatgaagggaccgagccagccgatgccgacagcatcgatgccgaccgcgatcggatccggcacgctgagccggtcatacggcacgatgccggtcagcacgaatccaaccgcaacatagagcgcagcgcagatcacgagcgagccgaggatgccgatcggcatgtcgcgctccggccgcttcgcctcctgcgccgcggtcgagatcgcatcgaagccgatataggcgaagaaaaccaccgccgcgccgcggaccacgccagaccagccgaatacgcccggaccggcattcggcgggatcagcgcgccgtcgggattgctcgccgtcacccagttcgccagcgagaccgaggacgccgcagtggcgagaaacaatgcgatcacgacaagcttcaccacgacaacgaatccggtgaagcgcgcggactcgcgaatgccgaccaccagcagcgtggtgacgaaagcaatgattgccatcgccgggatgttgatgaccgacccggtcgacgaccaggtgccggtgttgacgtcgtaggcgagcggcgccgaggtgaattgctgcggcaggttgatgccgaaatcgcgcatgaagctgacgaaatagccggaccacccgaccgagaccgcgatcgcaccgacggcatattcgaggatcaggtcccagccgatgatccaggcgatcaattcgccgagcgtggcatatgcgtaagtataggcgctgccgcagatcggtacggtcgacgacatctcggcgtagcacaatccggcgaacgcgcaggcgacggcgccaagcatgaaggagagcgtaaccgcgggaccggcattcgcagcagccgcgtgccccgtcagcacgaagatgccggcaccgatgatgccgccgatgccaagcgaaaccagttgcagcgccgaaagcgaacgcttgaaaaccggcgtctccgcgtcgccgtcggcgcgcgccgcctcccgcaacagctcggaggtcgattttcgatcccagaagccggccagggtctctgtcacgtcaaatagccctccgccgcccgggtccggcgggacccgacacgatcggcggaactataacgcgctcacggcaccgtcgttcgcatgcgaggcagcagccggcacgcttatccactgccaagcgtggtgcggcgccctattggcagcgatggcggcgaccatcgcgtccgaggaaagtgccggacgccggatcgaatgaacggtagcgcgtgcaagaggaggcaacgggcggctccgcgggcatggcgccataggcgttcgccgggttgccgccgtgttgcgcggcccgctgggcttcaccccatggcgtcagggcgcccccgttcagcgcgctgcgtccggggtattgtgactcgagcagggccggctcggaaatctgggcaatgacaggcgagaacgtcattcctgcgagcaatatggcggctgcaaccgacctcaatcgggacatgcgaccactcccatcgatcaatcaaaacatgtcgaaggccggccgagccgccccaagccgatatggtggcggcgccttgccgggcacaggggccaccgcctcacgatgctgcgagccggccgtggctcgcagctcagcgcacgtcgggccgcgggtcggacacgaacccatcgcggttcggcatcttgacggcggcgagcgacttggcgtcgagcacggcattggcggggacgacgccgttgaggctgaggatgtaggcggagaccgcgtagacgtcctcattgctcagcgactgcggcgcattctgcggcatcgcacggcgaatgtagtcgaacaacgtcgaggcatacggccagtagctgccgacggtgcggatcggttttgggctggccagcgtgccctgtccaccgaccagacggtcgccgacactgccctgcccgttgtcgccgtggcaagccgcacattgctcggcgaacacggtgcggccgcgctcgacacttccgctgccgggcggcaggttggagccgtcgcggccgatatcgatgttccagccggcgatctcggcaggcgttgccggacgtccgatgccaaagcgctcctcggcctgcgcagcagccgcgagcatcgcaagcgcgccgaccagcagcgcgggactgagcttacgcctggccattggtcacctcgccatttgcgtcgatgcgccagggccagatcgcgttgttgtggtagaatgagttgaggccccgcaccgccaccaattccgccagcgtcggctgcacgtagccggtctcgtcgatggcgcggctctggatcaccgctggtgtgccgtcccagtgccagggcaagcggaagcgcgtgagcgcgcgcgtcaggaccggttcctggagctccgcctgctgccagctcttgccctcgtcgagcgaaatctcgacgctcttgaccttgccgtgaccgctccaggcgatcccggtgatctcatgaaaacccttcgtggtcagcttctgcccgccggatggccgcgtgatgatcgacttggcttccatatagaaggtgaattcacgcgacgtgccgtcgggcatcgggtcggtgtatttcgaggtctcctcgcgcgaataggccggctcggccgtgaccttgagccggcgcagccacttcacattcatgttgccctcgaagccgggcagcaagaggcgcagcggatagccctgctggggacgcagccgctcgccgttctggctgtagaccagcatggcgtcgtcgaggcacttctcgatcgggatcgagcgcgtcagcgcggcgacatcggcgccttcggcgacgatccacttggcgccggcctgcaggccggcctcatccagcaccgtcttcagcggcacgccggtccattccgcgcagctcaagaggccgacgaggtcggacgccgtcttcccgtagggcttggtgtagaccgggttgccggagcattcgaggaaatggatgcgcgactgcgacggaaagcggcggatgtcctccatcgtgaacaccagcgggcgctcgaccatgccgtgcagcatcagccggtgttcggccggatcgatggtcggcacgccgccgtggtgacgctcatagaacaggccgttcggcgtaatgatgccgtcgagctcctgcaacggcgtccggcccgaggcggagatatattgtggcagcgtcttcgagatgttcttgacgacgcctttctcgtgaaccgagggcgtgccgtaaggctggcttcccatcgcctcgccgggcgctttcatccattccggcacgttgggcggaagattctttccctgttcggcaagcgcaggagaaccggcaactcccgccattgcggagcctccggccagtgccgcacccgcctgaaggaatcgcctgcgagacgcctctcgcacgcgcttgtccgtcgtgtgttcgctcatcgacgttttcctctgacgttacgagggacagcctaacaccaaacgcgacgagcgaggcaatagcccggcacgcagagctgcatcgacggcgcgcgacgacagacaaccgcttcgagcgagcggatgcggggacgagcagcattggtgaccagggcggggacatcgatggagatcgaccgcgcgtggcgaccgatgctcagcggcctctgcctgcgcagccgctcacatccgttcgccgggcaatcgactggcttgcttcacccaggcggtgaattgggcctcgtcgagctcgtcgttctcgtgaatgtcgagatagcgcgtatgctgctgcttcgactcgcccggcggcacgggacgcagcgacgagccgcggaaaaaagccaccttgatgtagcgcgtgaagacatggatgccgagaaaccagccttcgcctgcgatgccgtaaagcggcgaattccacttcaccgccttgtgcacgccggggatcgtgcgcacgatgagcgcgtcaagcctgcgcccgacctcgctcttccaccccggcatcgccgcgatataggcctgcacgggcgcgtcaccaacgcccttcgcgatctgcggattgccgcctgcgagcaggcgcggctttgcagccccacgcgtcgctggcaccttctttgctttcttcgccgatttcctgggcgtcttgccaaccatggtgcctgctcccaccggctcacgcatcgcgtgcgacgcagcgcgcgccctctcgacccggatcatatgaccgcgcgtccaaattgtcgtcagtgaccgtgcgtgtcgatcaccggcggcgtgccgtgggtgtggaacgactcgatcgtcttcaacccccacgcctgacccttcttgcgctcctcctcggtccacacgatcggcttccagtccggcgcgaggatcaggcgggctccggcattggcgacctcgacacggttgccgccgggctcatagacatagaggaagaaggtctgctggatcgcgtgcttgtgcggcccggtctcgatatgcaccccgtgctcgaggaaaatatccgcggcgcgcaggatctcctcgcggctgtccagggcatacgtaacatgatggaagcggccgcgcttgccgtagtggtcgcgcgtataggcgaagtcgtagctcttgttcgacatcgtcatccacatcgccgcttcggtgccgtcgttgagcacgatctgctcggtggtgcggcatccgaggtaggtctcgaagaacaggcgattggccttgatgtcgaccgcgaggcagttgagatggtcgagccggcggacgttgacaccgcgcgccggaaaacgctgcgcctggttcttcaacgcaggctttagcccggccggtgcctcgtaccattccgtctcgtaatagagctcgatgacgtggccatcgggatcgcggcagcggaaggccggtccctgccccatgtcgccgtcgatccagccgatgtcgaagcccgagcctttcagcgcggcgacgcggcgctcgagcgcctgcggactgcgggtccggaacgccatgtgttccatgccagaggttttcgatgcagtcagcttcagcgaatagcgctcataatcgtcccagccgcgcagatagaccgagtcgccttttcggccgctgaccgtcatgcccatgacatcgacgaagaacgtcaagctctcgtccggtttcggcgtcagcagctccatgtgcccgagatgagcaagatcgaagatcggttccggctgcatgggacggtctcctcacacgaggccaccgacgtcgctccgctcgggttcgcgccggcgcatcgatttgtactagtgtacaaaggattaggtcccgtcaacaaattaagttggcgccgacaatcgcggcccgcgttgcgcgccggcatccgtatctagcccttggccgccatcaccggcgtcgcgccgccgcgcggccgggacatggtcgccgacacggtcagcgcgacggcgagcgcgcacaccatgcagagcttcatccgcgccgtgcggcgatcggtcatcggcaggacgaagaagaacgcgattgccagaacgagaagcgcattcacgagatagtacatggccgagccctcttgttgcggttcgacaagatggcgggcacccgcgcggcattccgtggccgcaatcacatagtgaagctgcggtcaggccaccgagacggccttctcgcgatgcgcggacagcagcctgcggatttcgacatccggcaccggccggctgaacaggtagccctgcatctcggtgcagccgagaatgcgaagcatgttgcgttgctgctcggtctcgacaccttccgcggtcgtcgtcatgtcgctcgcggcggcaatgttcacgacggcctggacgatcgtggacgacgcgccggttccggcaagatccttgatgaaggcgcggtcgatcttgatcttgtcgaacggaaagcgctgcagatagctcagcgacgaatagccggtgccgaaatcgtcgagcgcgatgcgcacgccgagctcgcgcagctgatgcaggatatcgagtgcggcatcgtcgtcgcggatcagcacggcctcggtgatctcgagctcgagccgcgcgggcgcgagtcccgacgccgccagcgcggcggcgacgttgagcgccagcgtctggctcttgaactggatcggcgacacgttgaccgcaacatggatatgatccggccagttcacggcttcccggcacgcggtgttgagcacccagtgcccgagatcgttgatcaggccggtatcctcggcgaccgggacgaagtccgcgggcgagatggtcccgcgctcgggatggcgccagcgcagcagcgcctcgcagcagctgaccctgccgtcctcgaggtgaagcagcggctgatagtgcagctcgaagctgccgtcgacgatggcctggcgcagctccagctccagactgcgccgcgccttggcgcgcgcgtccatgccggcctcgaagaaccggtaggtgcggcggccgtcgctcttcgcgccatagagcgcgaggtcggcgttgcgcagcaattgatcgaggtcgagcccatcggtaggcgcaaccgcgatgccgatgctggcgtcggtcgtgatcaggtgcccgctgcaatcgatcggctggcgaatgctctggtagatcgcggccagcagctgcatggtctgggtctgatcacggaccgcggtctggatcacggcaaactcgtcgccgccgagccgcgctgcgacatcggtttccccgaggcaggagcgcagacgatcggcgatggccctgagcagttcgtcgccgatctgatggccgagcgcgtcgttgacggccttgaactcgtcgatatcgatatacatgaccgcgagctggtcatccggcctgatcgctctcagcgcctgctcgaggcgctggcgaaacagcacacgattgggcagatcggtgagcgcatcatagtgcgccatgtaggcgatcttgttctcggtgcgcgtccgttcggtgacatcctcgatggtcgccacccacccgccccccggcagcggcttgttgacgatctcgatcgcgcgcccgcccggcgcctcggtcagctgacgggtcgccttgccgagcttcacagtgcggatgatggcgttgcagaactcgtcgacgtcgccgtcgaacgagccggtctcctgccggtgcgcgatcagccgctgcatggtgcagcccggcttcgccacatcgggcgaaagcccgaacatatcgatgtagggccggttgcagatgataatgcgcgccgatgcatcgtagagcacgagcccctgcggaatgttgttcacggcggtcatgagattgcgacgctcggtggcgagccgctcgtccgagatctgatgtcgcttcagcagcaggaagacgatcacggccatgatcgcaaacgccgccatcagcaggccctcgcgttcgctccactgcgcggtcgcgcttccgagcaggctgccgacgagcaggccggcacagaacgccagccccttggtcgagccgacatcggcattccctgaattgcggtgttcgatgcgcacgctgatctctcccgggcgcggcatcgttacgcagcacaaatggaaaggtcgttacaagtcgcagttagcaatcggttacacgatacctggagccacgacgcagcacttcgcgccgaacctccgtaaacctacggagccgccgatgcactcctccgacatggtgaatgccgcattaacggatgaatcgtgaaacaagcgcggctgtgccggaaagcgacgatttcgccgccggtgcgcccgaccgcgcacaatctcacggcacgatagaaacaaatcgtcaccgggaaggtgtagatttagccgatgccgaaccccagcgatttaacggtttttccaatcccgggcgggcatattggtccggacatttggatttcgagaacgagccaggctgcaactgtgacacctttcggacgtgtgatctctgtgcgcggctcgcaggctcgggtggggctgctggcgggcggccagatgcaactttcagaaatgcgcgcgaccgtcggccggttcgtcagcatccgctgtgcgagctcggtcatcgtcgccatgatcaccgaggtgacctgcgagaacctgccggcgtccgacgaatacatggcgaccgcctcggtcgatttgctcggcgaaatcctcggcggcgaccgtccgaaattccagcgcggcgtcacccactatccgaccatcggcgacagcaccgacctgatcaccaaccaggagctgcgtacggtttatgcgccgagcggctcggaccagataaatgtcggcacgttgcagcaggatcgttcggtcatcgcctatgtcgacgtcgaggaaatgctctccaagcacttcgcggtgctcggctcgaccggcgtcggcaaatcgaccggcgtgtcgctgctgctcaacgaaatcctgaagtcgcggccgaatttgcgcatcttcctgctcgacgtccacaacgaatacggccgctgcttcggcgagcgcgcgcaggtgctcaatccgcgtaacctgaagctgccgttctggctgttcaacttcgaggagatcgtcgacgtgctgttcggcggccggcccggcgtgcccgaagagctcgacatcctcgccgaagtgatcccgatggcgaaggggatctacacccagtaccagaactccgaccgggttggtctcgggctgaagcgcgtcgacccgaagcaggtcggctacaccgtcgatacgccggtgccctatcgcctcgtcgacctgatctcgctgatcgacgagcgcatgggcaagctcgagaaccgctcctcgcgcatcatctatcacaaactgatctcgcgcatcgacgcggtgcgcaacgatccgcgctacgccttcatgttcgacaatgccaatgtcggcggcgataccatggccgaggtgatcagccatctgttccgcctgcccgccaacggcaagccgatgaccatcatgcagctcgccggcttcccggccgaggtcgtcgattccgtggtgtcggtgttgtgccgcatggcattcgacttcgggctgtggagcgatggcgtctcgccgatgctgttcgtctgcgaggaagcgcaccgctatgcctccgcggaccgcaatatcggcttcgggccgacccgcaaggcggtgtcgcgcatcgccaaggaaggccgtaaatacggcgtctatctcggcctgatcacccagcgtccggccgaactcgacgccaccatcatctcccaatgcaacacgctgttcacgatgcggcttgccaacgaccgcgaccaggcgctgctgcgctcggcggtgtcggacgccgccgccaatctgctgtcgttcgtgccctcgctcggcacccgcgaagtgctggcgttcggcgaaggcgtcgcgctgccgacccggctgcgcttcaaggaggtgccgccgcaccagctgccgcgcggcgaggccaccatcgcgacggtgccgtcggtcgccgccggccatgacatgcatttcgtgagcgccgtgctggagcgctggcgaggcgccacctcgcatcgcgacagcccgagcggcgatgccaacttcaatgctccgccgcaggcgccgcgcaccatggcgcccgccgaggcgccgatgctgcagccgtcgctgggcctcgatccggatcgcttctcgctgctaaagaagccgctgcgctagcatcattccgtcagggcgccgatgcgtcttgcgcctaacccgtcatcctctatggtttcccgtgacgccgcatccatgcggcatgccggaaccacctcatgacgcagccgaccgcaaatcgctttccgacgcccgctctcgacaagctccccgaagatatccgcgcccgcatcctggcggtgcaggaaaaatccggcttcgtgccgaacgtattcctcactctggcctacaggcccgacgagtttcgcgccttctttgcctatcacgatgcgctgatggaaaaggactccggcctctccaaggccgagcgcgagatgatcgtggtcgcaaccagcgccgccaaccagtgccaatattgcgtgatcgcccacggcgcgatcctgcgcatccgcgccaagagcccggagatcgccgaccagatcgcgatcaactaccgcaaggccgacatcacgccgcggcagcgcggcatgctcgatttcgccatgaaggtgagccgcgccgccgaggaggtctcggaggcggacttcgccgcgctcgccgcccatggcttcagcgacgacgacgtgtgggacatcgccgcggtcgcagcgttcttcgcgctctccaaccggcttgccaacgtcaccggcatgcggccgaaccccgagttctacatgctcggccggcaaccgaagtagagggcgccttggcagactggagcgagatcatcctgcgcctcggcgcggccacccttgccggctgcgcgatcgggctcgaccgcgacctgcgcggcaagccgatcggcctgaagacgctcggcctcgtcagcctctcgaccgccacggtggtgctgctggccctgcacgccgtccagcccggacaatttaccgatgcggtcagccgcgtgatccagggcgtgctgaccggcgtcggcttcctcggcgccggcgtgatcgtgcgtcagggcgaccgctctcaggtccacggcctgaccagtgccgcgtgcgcgttcttcgccgcatgcgtcgggatcgtctgcggcgccgggcactggccgatcgccctcaccgcgcttgcgctggcattcctgttgctgacattcggcaggcggaccgagcggtggctgcaccacgcgctcggcggcaaggactatccgcacaattcggaggccgtgccgcctcagtcgtcggaggccggcccgcaccagcccggcaaatagaccgcgtccttgccgcggccgagcgccagacctttctccagcgccttggcgaaattgttctccaccgtcttgcgcgggatatggcggcgcaggaaatcggcccacaggaattcgctgaacggcgtcgtgtccttggcgaaaccgccggcccggcgcatctcgccggcgaggctgcggaacggatcgtccttgaggtccttgatcgatttcggaatgtcgcggaagtggcagcgctcgcccttcgaattgtatggatagacccagcgcttgttgtccatcacgccccagaacacgtcgcgctcgaccatcgtcaggtcaccgatcacggtgaccaggatgtccttgacgccctcctcgtgcagcgcccgcgccatgtgatggtgatcgaccacgtagtagcgatcgtcgggcccatggacgaccgggatcatgtgcttgcccagcagttcggcgcgtttcttgtccgagctgtgctcgcgccagcgcttccgcttctccttcacctcctgcatgccgaccgtcatctgggtcggtcgcagcgacaggatcgggaccggtttgacgtaaggctcgcgcgtatgggccatgaattgtactccagtttgaccggcactccggaatgggttccattatgacatgatgtcacaggcaggcgaaagagccggttcggcgggatggctttgagagcaagcgaacgcgcgaaggcacgcacggtccgactcggcaaccgcgaggtcgtgaccgaggggctggagctcagtttctgggcggacatcagccatcgctgcatgacggcatcctggcccgcctttattggcggtgcagcattggtgttcatcaccttcaacgccgtgttcgcgctgttctactggctcggcgatcatccgatcgccaacgtgcctgacggccaatatatcgactacctctatttcagcatcgaaacactctcgaccgccggctacggcgacatgcacccgcagacccattacgggcacttcatcgccgccatcgagctgttcaccggcatcttttcgatgtcgctgatgaccgggctgatcttcgcccgcttctcgcggccgagtgcgcgcctgctgttcgccgacaacccggtgatctcggatcatgagggcgagcggacgctgatgatccgtttggccaacgagcggcacaacatcatcgccaacgccaccgcgcggctatggttgttcaagaacgacctcagcaaggaaggcatggcctatcgccggttcttcgagctgccgctcgcgcgcagcgagagcccggccctggcactgagctggaccctgtttcatgtgatcgacaaggacagtccgctgtacggcctcaacgcggaagacctggaagccatcaacgcggggctgggtctcatcgtatcgggctatgacgacgttgcagcgcaaaccgtgcacgcgcgaaaatcctacgagcattccgacatccgcttcgggcatcgctatgccgagatcctgcgcgccaccgacgacggccgtctcaagatcgactacagccggttccacgagaccatcgaagcatgaataccacctctgcgggtatcaagattttaggtgtgaaacgcgccgaacatgctacacatgagggcgacgcgaccggactgacagcagtgaagacgcagcggccaatttcctcggatgacgagcacgtggtgctcaaattccggccgcgcacctcggcgcagccgcccggcaagcgcgcggacccgatccgatcgacccgcccggcttccgtcgctcctgtttccgtcgccaacgacctctcccgctacgagaagccgcgcgaggagccggatgatttccgccagcgcatgctcgccaacatcgccgcctttgccttcaccgtggcgctcaccgcgatcggcatctggcttgccatgagcatcgccgatttgcgcaagacccaggattgcgtgctgatgggccgccgggattgcgccaagattacggtgatgccgcgcagctaggcgggccggaaccgtgcccaaaaaccgtcctcgcgcggccggccaagctccattgaactaacggccctgctccgatatacgggcacacgactcctggcagcagcaatagggcattccggggcaacgcgcccgcctcctccgagccgacccggaattaccttcaatatatcaaaggcttaatgatgtcctccacattcgagcagatcgccaacattatcgcggagacctgcgacatcccgcgcgatacgatcaagccggagagccacgcgatcgacgacctcgggatcgacagcctcgacttcctggacatcgcctttgctatcgacaaggccttcgggatcaagatgccgctcgagaagtggacccaggaggtcaacgacggcaaggccacgacggagcagtacttcgtgttgcagaatctcgccgaccgcatcgacgagctggttgcggccaagaacgcgggcacgggctcagcctcgtaatcacccgtcatgcagcttgagacttttcagctgatcgatcggatcgtcgacctcaacctcgacgcaaggaccattgtcgtcgaggcggatgtcccgcccgacagccattcggtgttcgcggggcatttcccgggctatccgatcatgcccggcgtgctgctcaccgaagcgatggcgcagagctcgggctggctgatcctcggtctgaccaaattcgagcgcatgcccttccttgccatggtcaaggaagccaagatgcgcggcttcgtcagccccggctcgaccctgacgatcgacgccaagatcgagcatgaaggttcaggcttcaccgtgacctcggcgaaggtccgcgtcggcaaggagctcaaatgcaatgccgagctgaccttccgtcatatccccttccccagcccgcacttgcgcgtgcacatggatgccatggccagcaagatcgggtttccgcagcaggcgatgagtaatggctgaaaaggaagtctggatcaccggcgtcggcctgctctcctcgctcggcgagggactggatgcacattgggaggcgctaggcgccaagcgcgtcaatgccgacgagaagcgcctcgcgccatacgtgatccatccgatcgcccccgtcagcttcgacgcccagatcccgaagaagggcgatcagcgtcagatggaaatgtggcagcgcatcggcacctatgccgccggcctggcgctcgactccgccggcgtcaaaggcaatcaggaaatcctgtcgcggatggacatgatcatcgcagccggcggcggcgagcgtgacctcaatgtcgacctggcgatcatgaacgccgatgcgcagggcaagctgccgcccgccctgctcaacgaaaaactgatgaacgagctgcgcccgacgctgttcctggcgcagctctccaatctgctcgccggcaacatcgcgatcgttcacggcgtgtgcgggacatcgcgcaccttcatgggcgaggaggcctcgagcatcgacgccgcgcggatcgcggtcgcgcggatcggcgccgggcagagcgacatcgcgctggtcggtgccgcgcataacggcgatcgcggcgacctcttgatgctctattcgttcggcgacttcgccctcaaggatcaatacgccccggtctgggcccgcaggaaccatccgggcttcgccatcggctcggccggcgcattcctggtgatggagtcgcgcgagcacgccgaggcgcgcggcgccaagccgtacgccaagctgaccaaggtggtcgccgaccttgccaagcgcaagcagcccggcgcagtgacgcaatcgctgcgggcgatgtggccgcagctcggcgtcagcaacgacaacgccatgctgatcacgggtgcgaccggcgctgagcctgcgaccagcgaggagcgcgcgttcctgggtcagcatcccggccttgcggtgcgcgccaccggaacgacgtttgggcacacgatggaggcccagttcccgctcgggctcgcgctggccgccctgtcgatctcgcgcggcgcgctctacccggccaacgacccgaccgggctggaggttgaaaagaccgaagcgccaacccagattgtcgtattgggggtcggccactggcagggcgaaggcatggcgctggtcgaggccgtcaggtagagcatgctccggaaaagtgcgacgcggttttccggaaatatcatgctcaaatgaacaattgaggcgcgatgactctcattgcgctttcagtccggcgcaagcaccgacggggacaccatgacagcaccacgcgataaattcggccgaccgatcgttgtcgtgaccggcatgggaatcgtgacgtcgctcggcggcggcaagaccgacaattggaagcgcctcaccgcaggtgagtccggcatcaagaccgtgacacgcttcccgctcgacagcatgaagacgacgatggccggcgccgtcgatttcgtcaccgtcgaccccttctcctcgaccagcctgtcgcagcgtctggccgagatcgcggctgaagaggcactggagcagtccggcatcggcagcaagggcgacttccccggcccgctgttcctggcggtcgcgccgatcgagaccgaatggccgcagcggctcgaggtcgcgcgcgacgttccgaccaaggactttggcatcatcgaatatctggcgacctgcagcggcggcaagtttgcgcacttccaccgtcgcttcaccttcggctcggtcgcgctcagcctcgccgagaccttcggcaccaaggggtcgccgatctcgctctcgacggcctgcgcctccggcgcgaccgcgatccagctcggcgtcgaggcgatccgccgcggcgaaaccgatgcgacgctgtgcatcgccaccgacggctcggtcaatcccgaagccatggtgcggttctcgttgctctcggccctctcgacccagaacgacccgccgcaggccgcctccaagccgttctcgaagaaccgcgacggtttcgtgatggccgaaggcgccggcgcgctggtgctggagagctacgatgccgcgatcgcccgcggcgcgcgcatcctgggcgtcgtcgccggctgcggcgagctgaccgattcattccaccgcacccgctcggcgcccgacggcaagccggcgatcggctgcgtgcgcaagacgcttgccgacgcgggcatggagcctgagcagatcgaccacatcaacgcgcacggcacctcgacgccggaaaacgacaagatggaatatcttgccacttcggcagtgttcggcgaacacaccaaaaacattccggtgtcgtcgaacaagtcgatggtcggccacaccatctccgccgccggtgcggtcgaggcgatcttctcgctgctcacgctcgagcatcagcggatcccgccgacgatcaattacgaggtgccggatcccgcgatcccgttcgacgtggtcggcaacaaggcgcgcgatgccaaggtgaccgccgtgatgtcgaactcgttcgggttcggcgggcagaacgcctcgctgatcctgacgcgcgagccggcgtaacgccctcgcctcatcagatgaaacgcctgctccttcgcaccagggcgcacctgcgcgacgccgcaaagcctgtggccaacgttgccattggcgcgctgacgaccggcctcttgcgcaccacgcgctatttcgatccggagaagaccgcaaagttcttcggccacgcggcgcatttcatcggccggcggctgcgcgaggatcgcatcggccgcgagaacctcacggccgccttcccggagaagtcgccgcaggaaatcgaggagatcctgaccggcgtctggcacaacctcggacgcatcggcgccgaattcgcgcatatcgaccgcatctgggaccatgatccccggaatcccgacaagccaggccgcgtcgaattctcggcgcgcagcaagcagttgttcgaccaactgcgcgatgacggtaaaccggcactgttcttcgccgcgcatctcggaaactgggagctctcgcctattgctgccgccgcgcacggcctcgacgccaccatcctgttcaggcggccgaacatcgaagccgccgaccgcgccatcgagcgcatccgcgccgtcaatttgggcacgctggtcccggccggccgcgacgccccgctcaagctggcgcaggcgctgaagaacggccagcatgtcgcgatgctggtcgaccagtatctgaccaacggcgttcccgtcaccttcttcggccgcaagaccaccgcgaatccgctgttggcgcggctgcgccgccagatcgactgcccgatccacggcacgcggatcatccgcctgcccgacggccgcttccgcggcgaggtcaccgaagaagtcaaaccggtgttcgatgcatccggtcagatcgacatccagggcacgatgcaggcgatcaccgacatcgtcgagggctgggtccgcgaatatccggatcaatggctctggctgcaccggcgctggcggtaacgccctcgcattggaacgcgcgaaggcgcgtcacttcccggtcttcacgcgcgtccacagccggttgatgattcgctgcgtcgccggatcgcgtgccgtgatcacgaacaacttcttctgcatcgcctcgtcgggatagatgttcctgtcgttgaagatcttcggatcgatcagcttctggctcgccagattgccgttggcgtaggacaggaagttcgaattcttcgccgcgacctctggacgatagaggtagttgatcagctcataggcctccgcgacgttcttggcatctgcggggatcgcgagattgtcgaagaacatctgcgcgccctctttcgggatcgtgtagccgatctcgacgccggacttggcttccgcggcccgactgcgcgcctgcatgatgtcgccggaccatccgaccacgaagcagatctcgcctgaggctaatgcgctgagatattcggacgaatggaatttgcgcacatagggccggatcttggtaacgagatcggcggccttctcgaggtcagcctgcttggtcgaattcgggtcgaggccgagatagctcagcgccgccggcaggatgtcgtcggcggagtccagcatgtggatgccgcaatccttgaacttggcgaggttctccggcttgaacaccatgtcccagctgtcgatcttcgcgtcaggcccgaggatcttctccgccatcttgacgttgtagccgatgccggtggtgccccacatgtagttggcgccgtagttgttgccgggatcgtaggtcgcgagctgcccggtcacgacaggccacgcattggcgaggttcggcagcttcgacttgtcgagcttgaggaacaccttcgcagtgatctggcgctgcaggaagtagccggtcggcaccacgacgtcgtagcccgacttgcccgctagcagtcgcgtctccagcgtctcgttggcgtcgaacgtatcgtagaccaccttgatgccggtttccctcgtgaagtcctcgaggacttcaggcgccatgtagttcgaccagttgtagaagttgaccgtgcgctcctccgcactggcggacgccgcgaacaacagagccgaggcgatcgtaccgacgaggccgacgagacgacggttctgcttctgcattctggtctacctcttgcgacgatgaacggcgtcggacaaccgctcaagcgcggtgtcgagtgtcgaatccttcttggcgaaacagaaccgcaccaccgacgtcaccgcatcctgctcgtaaaacgccgacaccggaatagccgcgaccttgtaatcccttacaattctccagcagaattccgcatcggtctcgttgagcccgagcggcgacagatcgacggtgaggaagtaggtcccctgcgacttcagcaccggaaagccgatgcgctcgagtcctttggtgagacggtcgcggctccgcgccatgtccttgcgcatgtcgaggaaatagtcgtccggcttgccgaggccgtacgccaccgccgcctgcagattgggcgccgtcgtgaaggtgaggaactggtgtaccttcgcagcgacgcgcagcagcggcggcgcggcgcagacgaagccgatcttccatccggtcagcgagaagatcttgccggcgctgccgaccttgatggtgcgatcgcgcatgcccggaatcgtgatcagcgggatgtgctcgcggccgtcgaacacgacgtgctcccagacctcgtcgcagatcgcgacgacgtcgaactcctggcagtaccgcgccagcagttcgaggtcctcgcgaggatagaccaccgccgccgggttgagcggattgttgaacagcaccgccttggtcttgtggttgaagacgctgcgcagcatctcctcgttcagccgccactccggcggctcgagccgcagcaggcgcggaatgccgccggcctggcggatgatcggcagataggaatcgtagaccggctggaagcacaccacctcgtctcctggctcgaccaaggagaggatcgaggaggtcagcgcctcggtgccccccgaggtgaccatcacctcggtcatcggatcgagcttgagcccgtgccaatggccgtaatgcgatgcgatcgcctgacggagctcggggatgcccatcatcgacggatactggttgtagccgttgatggacgcgtccgcggcggcccggcggatgtcctccggtccgggatcgtcaggaaagccctggccgagattgatggcgttgttgtcgcgcgcagcctgcgacatcgcctcgaagatggtgacgggaaggtccgcgaagaccttgttcatggaggtcatgtcggggatcagccgcccgttttggtcggcaggcccgccgccttccagccgatgatgccgcccgccagatgcttgtcatagggcagacctgcagcctgggcagccagcgaggcggtcaccgagcgcttgccggagcggcatgcgaacaccacctgcttgccttgcggatcgggaatcgccgccggatcgaacgtcgacagcggcaccacggcgccatcgggataggcctcgacggcaacctcattgggctcgcggacgtcgaccaggagatagcggccctccgctatgcccttcgacacctcgtccggaaacaaatcttccaccttgtggtccgccacggaaatatcctcccgactatccgattggcgagcgtcgcgcggctcgccggtccgggccgcaaactcgccccttgcgtcgagaaaatcaagcgcccgaaacgggttagatgtcgcgcggaaatgccgggtcgtgccccctagatcgtgacttgcgtaccgacctcgaccacccgcccggtcgggatctggaaatagtcggtggcgtcgttcgaggaccggctcagcgcgatgaacagatgatcctgccagcttggcatgcccgaatgcgccgccggcttcagggcacggcgggacaggaagaacgaggtcgacatgatgtcgaactgccagccgagcttgcgggcgatcgccagcgtcttcggcacgttgggttgctccatgaagccgaatttcagcgtcaccttggagaaggtttcggtcagctgctccatccgcacccgctcggacggatcgatgcgcggcgtcggcgcggtctcgatggtgaggatgacgttcttctcgtgcagcaccttgtagtgcttgaggctgtgcatcagcgcggtcggcgcgctgacgggatcgctggtcaggaacaccgcggtgccggacacgcgctgcggcggccgcttctcgagcatcgcgacgagatcggcgagcggaaattcaagcttgcgcgacttctcgaacaacagccggctgccgcgccgccaggtgtacatcaccacgatcatcgccccgccgagcgccagcggtacccaaccgccctcgaacaccttgagcaggttggcggccaggaaggtgatgtcgaggaagaggaacggcgcaaccagcgcggcggcggcgatcggtgaccatttccagacccgccagatcaccacgaagcccatcatcgccgtcaccaccatggtgccggtcaccgagatgccgtaggccgacgccagcgcgctcgacgagcggaacatcagcaccagcacgatgaccgcgatgaacaggaagcggttgatgcgcggcatgtagatctggccggaatgcgcttccgaggtgtggcggatttcgaaccgcggcaacaggccgagctggatcgcctggcgggtcagcgaataggcgccggtgatgaccgcctggctcgcgatcacggtcgccatggtcgcgagcgcaaccatcgggatcagcgcccaatccgggaacatcaggaagaacggattctcgatccccttgggatcgccgatcaagagcgcaccctgcccgagatagttgagcgccagcgacgggagcacgatgaacagccaagcggtctggatcgggcgtttgccgaaatggccgaggtcggcatagagcgcctccgcaccggtcaccgcgaggaacacggcaccgagcgtgatgaaaccgatcacgccgtgatgcagcatgaacgacaccgcaaggatcgggttgagcgcgtggagcacctcgggatgccgcacgatctgcggcagcgccgcgatcgcgatcacggcgaaccagacgcacatcaccgggccgaagaaggccgcgacgcgtgcggtgccgcgcgactgcaccgcgaacagggcgaccaggatcacgaccgtgagcgggacgacatagggatcgaatgtcgaggtgacgagcttgatgccttcgattgcggacagcaccgagagcgccggcgtgatcacggcatcgccgtagaacagcgcgccgctgatgatgccgagcagcacgatggcagcgccccctctagtggccgcgcgctgcgccagcgccatcagcgccagcgtcccgccctcgccattattgtcggcgcgcaggaggatcacgacgtatttcagcgtcaccaccacgaccagcgcccacaggatcagcgacaccacgccgagcaccgcatgaatcgtcacaccgccctcgccgccggccgccgcgacgacggcttcgcgcagcgcgtacagcgggctggtgccgatgtcgccatagacgacgccgatgctgccgagcatcagcgccttgaaggtggcggttgaatgcgcctcgccatggccatttgccgcgggcgtttccgccgcggtgatcgcactctcggatgacatgggaagctgcgcctctgtcttttgccgcaccgcacaatgcccggatgcaggcctatactcccggcaggaatgcataggttagcacggattcaggcctccactatgcgtatcacgcatagatcacggcttttcaacgccggaattcgctgtttgctcaaatagttacctgggtaccgacttcaaccacccggccggtcgggatctggaaatagtcggtcgcatcgttggcggagcggctcatcgcgatgaacaggtggtcctgccactgcggcatgccggactgcgccgacggcttcagcgaacggcgcgacacgaagaaggaggtcgacatgatgtcgaactgccagccgagcttgcgcgcgaccgcgagcgccttcggtacgttcggcgattccatgtagccgaagcgcagccgcaccgcggtgaacttgtcgctgaccttctccatgttgacgcgctcggaaatgtcgacgcgcggcgtcggcgcggtctcgatggtcaggatcacgttgtgctcgtgcagcaccttgttgtgcttgagattgtgcagcagcgcggtcggcacgaagctggggtcgctggtcaggaacaccgcggtgcccttgacgatatgcggcggccgcttctccagactgtggatcaggtcgcgcagcggcacctcgatgcgccgggtcttggcgatcaggatcgcagcgccccggcgccaggtccagatcatcgtcgccatcacgacgccgaacaatagcggcacccaggcgccctcgaacagcttcagcagattggcgctgaagaaggtcatgtcgacgatcacgaacggcaggatcaaagccgcggccgacgccacgcgccagttccacagcttccagatcacgatgaagcccatgatgccgtcggcgaccatcgtggtcgagaccgcgatcccgtaggccgaggcgagcccgctcgaggtgcggaacagcagcaccagcagcagcacgccgatcagcagcagccggttgacgcgcggcagatagatctgcccggcatgggtctccgaggtgtagcggacctcgaagcgcggcagcagcccgagctgcaccgcttggctgatcagcgaataggcgccggtgatgaccgcctggctcgcgatcaccgtcgccgcagtggcaagcccgaccagcggcagcagcagcacctccggcaccatgcggtagaacgagttctcgatcgcggcgggatcggacagcaccagcgcgccctgcccgaaatagttcagcaacagcgagggcagcacgaagaacagccagccggactggatcggcttgcggccgaaatgcccgagatcggcgtacagcgcctcgccgccggtcacagcgaggaacaccgcgcccagcgtcaccaggccgacggtgccgtgggtcagcaggaactggagcgcgtaatagggattgatcgccgccagcaccgagggctcgtccatgatgtgggccagccccatcgtcgcgagcgaggcgaaccacagcaccatcacaggtccgaacgcggaggcgacgcgggcggtgccggtgcgctgcaccgagaacaacacgaccaggatcaggatcgtcagcggcaccacatagtgctcgagatgcggcgtggcgagcttgaggccttcgaccgccgacagcaccgagatcgccggcgtgatcatggaatcgccgatgaacatcgaggcgccgaccacaccgagcgcgagcagcggccagctgcgccgcccgatcgcgcgctgaccgagcgccatcagcgagagcgtgccgccttcgccgttgttgtcggcgcgtagcaacagcagcacgtatttggcggtgacgacggtgaacagcgcccacaggatcaggctgagcacccccaacaccatgatgcgggtgaccggctggccgtgcgcggcgccaccgaccgcctcgcggaatgcatagagcggcgaagttccgatgtcgccgaacaccaccccgatgctgcccagcgtcagagcccagaagctggaggtggctctgccgcgcccctcctgggcctcggtggatgagacgctgacagccatagcgaggttggaacgcccggtcggttgattttgatccgcgcggctatcgacgcttccgtaccgcctgtcaaccaaccaacacggctagcttgacggtagcatcgtatttgcggctacggcttcagatccggcggcagtggcggattttcccgcatcaacgtgatggtcacgcgacggttcgccggcagcgtcggatcgtcgggaaacagcggctggccgtctgccttgccggaaaccgcgaagacgtgcgacggcggcaggccttcccgctccaggatctgccgcaccgcgttggcgcggtcggcggacaggtcgaaggcgtcgtaatcgctgcgcgccggcacgaagcctgcggctgtatgccccacgatcgcgacccgcagcggcgtcgccttcaacggcgcggcaagcttctggatcagccggcgggtgcgctcatacggctccctggaaccgtcggcgaacatcgagcggccgtcctgatcgacgatctcgaggttgaggccctccttggtctcctcgaacatgatgttcttggagatctcggtcagctccggcatgtcctgcagcgcctgccgcaacgaagcggaggcgagcgcgaattcgcggtcgatcttcagccgcgcgccgttgagctggctgcgctccttttcgtccggcgtcggattggccgaggaatcttccggcgagatgtgctcgacattcttcagcttcggccgggtcggcaggccgtcggactcgacgatgccggagtagcgcacagtggtctgcacgccgaaggcgtcgcgcatcgagcccgcgacgatcttcagcttgttgttgtccatggtcgagaacgcgacgagcatcacgaagaagctcatcatcaggcccatcaggtccgcgaaggtcacgaaccagccgtgacctccaccgtgagcgtcgccgcgttttttcttggccattgtcgcgtttttttccggctgcgtttcccgaaagcgccggccgatcaggccggaaccggctcgccttcctcgtggcgatgcttctccggcagataggccagcagcatctcgcgcaccagcgccgggctcttggaatcgcggatcatcaggatgccgtcgatgatcagcgtgcggttggtctcctcgtcgagcagcttgccgtgcagcttgtcggcgatcggcaggcagaacaggttggcgaccagcgcgccgtacagcgtcgcgagcaacgcggtcgccatgaacgggccgagcttggaggggtcggtcatgttggcgaacatctgcaccatgccgatcagcgtgccgatcatgccgaacgcgggcgcgcagtcgccgatcgcgcgatagatcttgctgccctcgtcgaggtgcatcaggaaattgtcgcggtcgcgttccagattgtcgcggatgaattcgagatcgtagccgtcggcgacatagcggatgcccttggcgaggaacggctcgtcggtctcgaccttttccaggccgaccgggccctgcttgcgggcgatctcggcgatgcgggcgagctcctcgacgaggtcgcgcgccgacagccggctcatcgtgaaggcgaacttggcgccgagcggcagaccatgcagcatcacgccgagcggaaagcggatcatcgtcgccgcgatcgaaccgccgaagatgatgatcatggcatgctcggaaatgaacatgtgcaggtcgccgcccatgaacatcatcaccgcgatgacgatgatgccggccagcagcccggcgcctgtcatgatatccatgaaaaactccaacgcgaacgcaacccgcctgtcctggacggcgcgcagccccggggcgggccgcgtggaaaaaccctaacgttaatgcgcttaaggacgcgttaccgaatttggtagggataacaacgggtaaacgccggcaatttcgcgatgtcgttgaagatgttggctttctgcccggaccgccgccgcgccatgcgcaaaaggcctccccgtagaacaacggacatgagatagcttctgccagaggaaaccaaccagcgagcaggacaggatgaaggcggtcgtcgtcgagcaatatgcacccatcgatcggatcgggctgaaggagatcgcaacccctgaccccgccgccggacagatccgagtccgggtccacgccgcgagcatcggcttcgtcgatgggctgaaggtcgagggccgctaccagaccaaggatgccctgcccttcacacccggcgctgaattcgcaggcgtggtcgatgcggtcgcgagcgatgtcaccggtatcgcgccgggcatgcgggtgatgggcgcggcgcgctcgggcgcgctggccgaacacatcgtggtgccgcccgccgccgtcgagatcatgccggacggattgtcgatggaagccgcggctgccttccgcaccaactatctcacagcattgtatgcgctcgccgagcgcggcgcgctcaaagccggcgagcagctgctggtgctgggcgccgccggcggcaccggtgtcgccgcgatccaggtcggcaagctgctcggcgcgcgcgtcgtcgccgcggcctcgaccgaggagaagcgcaacttcgccgcaagcttcggcgccgacgccgtggtcgactacaccaagcccgaatggcgcgacgcgctgaaggacgcaaccggcggccatggccccgacgtgatcttcgatccggtcggcggcgaggtctcgctgcaggcgttccgctcgatcgcctggaatgggcgccatgtcgtggtcggctttgccgccggccagatccccgctctgccgttcaatctgccgctcctgaaaggcggtatccttatcggcgtcgacgccgcccagatcgcgcgccgtgagcccgaagcgcaggcgcgcgtgatgacgcaattgtcggcgtggctgaacgagggccgattgccccccgttgtcggcaaggtgttcgcgttcgacgatttccgcgcggcattcacgacgatgcagacccgtgccgcgctcggcaagatggtggtgcggatcggctagacgaaccacggcaggcattgcgtctggtcagtcgaacgatgagagaaacgcatcctgcccgctcaaggccaactcctcgaggcgcgcagcaagctggccgcggatttgccgcttcaccgtacgaaatcccggctgagcggcaaggctccttgccgcagcgatcgatccggcttgcaggtctgcccccgcgcaaaccgcatcaatgatccgctgatcgaggcactggcgcgtgtcgagcacggcgctcgtcagcgtcagacggcgcaacaattccggcgaaagctcatggcgcatcacttcgaggggccccaccgggaacgggatgccggcctgcgcctcggtcatgccgagctttgcggccgcgctgtcgaccgcgagacgatagtcgcatcccagcatgagcacgaagccgccgcctagcgcatggccattgactgccgccacgacgggaacaggaatcgccagcaggcgcgcgagcatgcgcgtgatcgcgcgcaccatggcatggcgctgctcgcgcgcgtagcgcgcaaatgcccgcgtatcgacccccgccgagaacacctgaccggcgccggtgagcactacgccgttcgccgggccgtccgcggcagccgcggcaaatgcctgctcaagcgacgcgatcgcgtcgagatcgagcgcgttgaccggcggccgatcgatggtcaagagcagcgtttcgccggtccttgatgtgacgacagtcatttcatctccgattggccatcatgacttatgatagactatcatgggaaagctcacgcgaccgaacgtcgagtagaaagggagacacatgcagctgcttcgaacaccggacgagcgcttcgccgaacttcccggatttgccttcgcgccgcgctacgtggagatcggcgcgctgcgtatgcactatctcgacgagggaccgaagaccgccccggtggcgctctgtctgcacggccagccgacctgggcctacctctatcgcaacatgatcccggcgtttctggccgcgggcttgcgcgtcctggcgccggacttgttcggcttcggccgctccgacaagcccgtcgacgaagacgtctacaccttcgatttccatcgatcctcggtgatgtccttgatcgaggcgctcgacctgcgccgcgtcatgctggtgtgccaggattggggagggctgatcggactaacgataccgatggacatggcggatcgcttcgatcgactgctggtgatgaatacgatgctcggcaccggcgacgcgccgctcggcgagggctttcttgcgtggcgggccttctccaatcgcagcccggacatggacatcgcggcgttgatgcagcgcgcagtccccggtctcgcagacaagcaggccgccgcctatgccgccccctatccggaccagcggtacaaggccggcgtccgacgctttcccaacctggtgccggaccggcccgatgccggcggcgcggcgctgtcccggcgcgcgcgggacttctggtcgcagcagtggagcggacagagcttcatggcggtcggtatgaaggacccggtgctcgggccgccggtgatgaacgggctgcggcaggtgatccgaaactgtccgccgccgctcgaactgcccgatgccggacatttcgtgcaggaagctggcgaagtcatcgtcgtggaggcgctgaagagctttggtccgatgcgctgaagcgcacaaatatccgcgttctcgcgacatgatttgcccgaggttttgctcgtcgtttcgccctcaattgagcagagggcgcagggaaagccgggtgccgatcgcacccatgggccccgagcaaatgggtagaagctcgg

SEQ ID NO: 49 - DNA, 43903 bp, Bradyrhizobium enterica
aatacttccacgccgcagccgctggatggtccctcagagatctgtgcatgccctagggccttcgccgggacgacgttggggaagcgaattgcctaattcaccttcttcttcgcaggtgccttcgccgcagcggcgcgtcccagcgtcgcctcgcggcccgcgctcaggatctcgtcggacatctcgccattgcccgcgatccgcgacatcacgatggtgcccatcatagtggccagcgccgccatcgcctgcttgcgcgcggtcttgcgcggcacgtcctggatctggtcggcgatcatgtcgatcatctggtcgagcttgagcgcgaaggccttgcgggtcttcgggctttcgcgggcgatctcggcgccgagcgccggcaccgcgcagccctggccggggtcgtcgcgatgggtcgccgacagatagccgtcgacaatggtcgaaagccgcttctccggcgctacctcagcggtgaccttgcgccagcgctcggtggcgcggtccatcgcatagttgaacgcctcgatcaccagcgcctcgcgcgagtcgaaatgcgcgtagaagccgccatgggtcagcccggcgtccttcatcaggtcggcgacgccgatgccgtgggcgcccttctcacgcagccgcgtcgcggccttcttcacgattcgcgcgtgggtctcctgcttgtgttctttcgaatagcgcatgccgatctcttggaatgtttctaatcatataatagcagttttgcgccgggaatgctgcagttatttcgcgttatcagccgctttgggttccccgccgagcatcgagaatgtcgcagtcgcgtgcaccgcaagactgcccctgccgtcgcggacgaagccctcggtgtagctggtctggcggccgagcttgatcaccttgccctcggccgagatggttcccgagcggaccgagagcgggcgcagataggtcagcttgaggtcgagcgtgaccgaggtctggcccgccggcagcacggtggagatcgcacagcccatcgcggtgtcgagcagcgccgcggcggtcgccccgtgcagcaggccgatggtgttttccaggctctcatgcggctcgagctccatcacgatccacccctcctcgactacggccacgcggaagccgatcagcctggccatcggcggcggcggtaacacgccgtcgcggatcgcacgcatcgcctcgatgccggacatcggcatcgccgcctttgccaccggcccaggcgcctgccattccaccacgcgcgtgcgcgtcaactcgggggaatgaaggtctgatgtctcgccggcggtcatgttggctccttttatatgacgtgtataattctatatatctgcgttcgccagcgcaacagccaccgatgcttgacagggacctgctttgtccgggacatggcgcgatcaattcctgcgccggaaccattccatggacatgctcaatccccactgcggcatcgaccgcgacagcagaggcgtcgtccgcctcaccatctgcaacgccggcaagctgaacatcgtgagctcagccgtgaccaacggcgtgcgcgaaggtttcgagcatctggccgccgaccacagcatccgcgcggtgatcctggccggcgaaagcgagcgcagcatgatcggcggcgccgacatcaaggagatggcgacgctcgatcagaagtccgccgaaggcttcatcagccgcctgcgcgacctctgcgaggccgtgcggaagtttccggcgcctgtcatcgcccgcctgcccggctggtgcctcggtggcgggctcgaggtcgcggccgcctgcgacgtccgcgtcgcggcgcatgacgcgatgttcggcatgcccgaggtcagggtcggcatcccctcggtgattcatgcggcgctgctgccgcggctgatcggctggggccgcgcccgctggctgatgatgaccgccgagaacatcgacgccccgaccgcgctgtcctggggtctcatcgacacagtggcaaaacccggcggtctcgatgaggccgtcgagcacaccgtgaaagcgctgctggaatgcggccccgaagcgctgcgcatccagaaggacctgctgcggcagtgggaagagctgccgctgaccgagtccgtgaacctcagcgtcggcgtgttcggaaagtctttcctgaccggcgagccgcagcggctgctgcaggggtttctcgatcgcaagaaatagcaaataggaagacgcggatcgagccgtccaaacttcgatccgcgtccttgtcagtctggatttccgcgcgcctcagtcctcggactcgacgaagggcggcatgaagtagccgggtcggacgccaagctggaaccggccgatcgaccggtagtcaccgagattgttgctcggctgcggcgtgttgtagccggcgaacacgatcgtcacggtccgctcgtcggtcagcaccgcctgcggatcgtagacccggccgctgaagaagttcgaggtgtagccctcgcccggcggtacgaagggcgcgacttgcgcggccgtcagcgcatctgcgccatgaacgttcacgagcggcgcattcagcggatacggccgcgggccggcgggatcgacgaccttgtcggtggacaggatcggattgtcgaagccgttgaccacgtgccacttcaggagatcgccggcgccgcgaaccggattgtcggtttcggcgtagccgatgaagtggaagccatcggagtcgttgtccaggcagtttccggcgccgaagaacatgccgaagcgcccgtcgtgaatgcgcaggatgctgccgctgccgagccagcgaatgccgttcagcgcaaccgtggtctggtcgttgaggccggtcgccgggccggcgtcggtgaagttcacgccatcagtcgtcgttgcaacacgaatcgtgatcacgtcatggttggccttccgcggcttcttgttgacgaggttggtcagcgcgaaggccggcgttgacgggcacacctggttggccgggaagcccttgtcgccgggggtgaggttcttggagacgtagacgacggcggtcttctcgcccatgtgcacggcgccgagaatcgcgtcgggatcgatcaggccggtggtcgcacccgccgtagcctcgagcttgggatagccgccggacccaagcgggctgacaaatccgagttccggaagtccgaacagcgagaagtcctcgccgcgatgcagcggatggaccacgagctgatcgctgtcgatgtgaccatcggcgcggttgagatgatagacgcgttgcttgcccttcacggacagcacgaaggcgtggccaagcccgttgtcgccggcatttgcgctcgacgagccgtacgccgtcttcacgccgttgacgttgacgttctggttgtccggatcggtcgcatcccacgggcagtaggggttgagcgccagcgccttgcccctgaactgccaggtcgcgccccaatccgtcgagatcgcagcgaccgtcgcctcctgttcattgcgcgggcgatagtcgaacaggccttcaaggaccgcgccgcgacggcgaacgaacggaaaatagtacggctgcatcacgctcttgccgtgattgatcgtggtctcgccgttcgccgagcaatagccggcataaggcgtcccatagagggccggattgtagggcggcgtgagcgtgcccggcggcacgatgccggaagcgtcgtgatgaaaatgatgtccggactgatgcagcgtccacggtccgtgttcgatcacggattgtgtcaggctgtccggaacgtatgagagcgtggagccggcatgggcggacgatgcggccgcaagcaggacaccggcagcggcagtgccaaagagcaagcgcgtcatggagctgagccttttttgtcgggggaggagcaattcgatagatcaggcaatgcggagagcaccccgcggaaaatgccgggcggtgcaagccggtcctaacaccgggcgtcaacagatatgtgacgccgggatctcctccacagctaacgctggtggactctggtcttcgaaaagcagtctagtagagttgatcgggcgcgccttcgcgcgacctgttggctccaacccgggctacgcgtctgacagactgttgaccgcaagctctggctgactagtctaacctcctccacgagacggctgtttcagatcgagaacgtcgatcgaagcgcgcaggtgtcgcaaaacaagcaatcgcttcggggacaaacgcacgggtcagaactcaagagcagcaggaggacatatggtccaaaagcgcgacgttcccggtatccgcccctatgatgctcccgccggcggatggggcgccctcaaggcaaccgccgaggcggttcgcacccagatggatctggtcgaggcgccgatcacgctgctgcggaccaacaagcccgatggcttcgactgcccgggctgcgcctggcccgacaaggagcacacctccaccttccagttctgcgagaacggcgccaaggccgtgacctgggaggcgaccagcaagcgcgtcacgccggagttctttgccgcgcacaccgtgaccgaactgctcggctggaccgatttccatctggagaacgagggccgcctgacccagcccctcgcctatgacgccgcaagcgacacctaccagccgatcagctgggagaacgccttcgcgcggatcggcgagagcctgcgcgcgctgccggatcccaacatggccgagttctacacctccggccgcgcctccaacgaggctgccttcctgttccagatcttcgcgcgcgaatacggcagcaacaattttccggactgctccaacatgtgccacgaggcgaccagcgtcgggctgccgcaatcgatcggcatcggcaagggcacggtgtcgctggacgatttcgaccattgcgagctgatcatcgcgatgggccacaaccccggcaccaaccatccgcgcatgatgggcaccttgtgggaggtgtcgcgccgcggcgtgccgatcatcgtgttcaatcccttgcgcgaacgcgcgctggagcgcttcgccgatccgcaggacccgatcgagatggcgacgctcggctcgacgcggatcgcctcgacctactaccagccgaaggtcggggccgacgccgcggtgctgaagggcgtcatgaaggcactgatcgagaaggatgacgcgacgaaagacgtgctcgaccacgccttcatcgccgagcacaccaacggcttcgaggcgttcgcggccgacctgcgtgcgacgccctgggaggcgatcgagaccgtctccggcttcagccgcgcgcagctcggtgaggtcgcggtcgcgtatgcaaaatccaacgccaccatcgtcacctacggcatgggcatcacccagcacatgcgcggcaccgacaatgtgcagcagatcgcaaacctgctgctcttgaagggcaattacggcaagccgggcgccggcatctgcccgctgcgcggccactccaacgtgcagggcaaccgcaccgtcggcatcaccgagaagcccaacatcccgatgttcgagggcatcgagcgcaccttcggcttcaagccgccgcgccatcacggccatgacgcggtcgccgcgatggaggcgatcgacgacggtcgatcgaaggtgttggtctgcctcggcggcaattttgccatcgctttgcccgacccggaacgctgcacggccgcgatgcgcaagcttgagcttgccgtgcatcttggcaccaagctgaatcgctcgcatcttctggtcggcaagcagtcgatcatcctgccggtgctgggccgcaccgagcgcgacatccaggcctcgggcccgcaggtcgtcacggtcgaggattcgatgtcgatggtacacgcctcgcgcggcaagctcaccccggcctccgaagatctgctgtcggaatcggcgatcattgccggcatcgcgatggcgaccctgccggcgaccaaggtgccgtgggccgagctgatcgccgactacgaccgcatccgcgacgccatcgagggcgtcttccctgacttcaaggattacaacgcgcgcatccgcactcccggcggcttccgcctgccgctgccgccgaccgagcgcaaatggaccacgccgtcaggcaaggccgaattcctgatcttcgacgacctcgaagaggatccggtgctggcggacaagtcagtcctcaagctcgccaccatccgcagccacgaccagtacaacaccacgatctacggcctgaacgaccgctatcgcggcgtgttcggccggcgcgacgtgctgttcgcgaacgaggccgacctctccgcgcgcggcctcgcccatggcgatctcgtcgagatcgagaccgcgctgccctcgggcgcgccacggcgcttgaccttgaccgcgatcgtctacgacatcgcccgcggctcggtcgccgcctattatccagaagccaacggcctggtgccgctcgactaccaggacaaggagagcggcacgccgtcgtacaagtcggtgccggttcacattcgccgggccgcgcaggcagcgtgagcggctccgcgccggatcgccgttcgctccatccgggctacaaatgccaagcgctctttggtgtttgggggtggcctgcgcgcggcaagaacgtcacgcaaagggcgagaatcgttagaacaaagctcacccagatgatgtacttgacgatgtctttaccagtgatcatcgcttcacttcgtgagctatcttgtagcccgcatgagcgcagcgacatgcggaactaattccccggaatcgcttcgcttcatccctcacctcgcattcgccggcgcatgcaccggccagagatcggcccgccagtgcacggcgatcgccagcatcgcgatgaagccggcggcggcgagcagcgtgccggtcgcggtgtagccgatcagatcgatcaggctgccggccgcgagcaggccgagcggcaggccgtaaatcaccatcatgcgcacgcccatgacgcggccgcgcagatgtgcgctggcattgcgcatcagcatcaccgcggccgagatcatcgacatgctctgcgcgatgccggcgagcaccaggcacgccatcgccaccggcatggtgcggagctcgacgaacaccagcagcatcgcgtaccaggcgagcgtcgcgccgatcagcagccgcgcgatgcgcacgccgccggccatgctgagcgtgatcgagccgatcagcgagccgaccgcaaagctcgcggagagatagccgaggccggtctggtcggtgtggaagatgtcgcgcgcgacatagggcaacagaccgttggtcagcggaaacgcggtgaggttggcgaggaaggcgacgcagagcgcggcgcgcatgcccgggccgctccaggcatatacgatgccctccttgaggtcgcgcagcagtttcgagcccggcaggtcgatatcggactgatcgacagcgccgtgcgacttcggccggctcatgcacagcatcaggatggcggcaatgaaatagaaaccggcgatcccgacatagacatagccgatgcctagtgcggcgaacaatcccgccccggtcaaggcgccggcgatgcgtgccgagtcctgcgtggtgcgcgccaggctgatggcgccgaccagttgctcgggcggcatgatgtcggcaagcagcgcgccgcgcacgccgaggtccgacgggcggatcagccccatgatcgcgacgatgatcatgacgttcaccggcgccaggtgcccggtcagcgccagcgtcatgatggttccggccagcgccgtataggcaaagcgcatcacggcaaggagatcgcgatgccccatccgatcgccgatcatgccgacgacgggcgccaccagcgtgccgacatattgcagcgaggccagcacggtcagcagcagcaccgagccggtctcgaccatgatgtaccagccgagcaccagcgtctcgacctcgaacgcccaggaagtgagcagatcggacggccattggaagcgatagctgcggatgcgaaacggtgcgagcgcggaggtccgcgtggtcccgctcacgacgcgatgacgcgtgtcacggcgtgtcctgcccttttcttggttcttctgggtcttgattgcggatgttgattctcttgggaaaattccctgttccggaacgtaacgccgacggtgtccgtgtcaatcgaagccgccgcatgcggccatgcgcggtggtagcggcgtgttgcactgcccaccggcacgcgctgccggagcatccgtctgctccgccccgtgcgatgatgtgctacaatgcctgtccgagaccgcggaggacaccatgacggccttcgaagttttcgcgatctacgtgacgccctttgtgatcatcgggatcgcaatccggctagcgatgaagcgttatgccgtcgatctgcccgacatgcagaagcaggcaggctccgcgccgaagcggcgattcttgctcggcgcctggcggtcggattagggcatgaagtcgagcgcttgaggcccccgctccgatttacaaggttccagccacggcgtagcgctgcatccttgaacctgttttggatcgcccctgaggaggaagtgacagcgtgcctggcccggaaagccttccaatcgatcagatctacgttcccttgaagaaaaggaagaccctcaggcttgaggtcgttcaagagatagcggccagcattctggaaattgggcaacaagttccgatcctcgttcggccggatgagagccggctcgtcttgctcgagggattgcatcggctcgaggcctgcaaggcgctgggcgagaccacgattatcggcgtgctgggttcggcagaggctgctcaccacaaggcgctgctatccgacacggctgaaaccgaggcagagcgggacaagatggcgcggttgaagaagctgcgcctcgaaaaggaagctgcggatagatcgaccgcatccgcggctgcaaccatgaaaactgaatcgatcgagcttcggtcgacgcgttccggcaacattggacgaagcccgtcccgcgatccagcaccgaaaacgaaaaccctgtcggaatggctcacgcagcaaaagcgcgacggtggccgctattgatggccggcccgtatgtgccggccacgctccggcgcctaggcgcccctgcgctcatttaggcagcccagcccaccgcagcgcgcccttcgcagtgacgacgcgtggaggcaatcttattacctcctacacccgtcaccgggcgatccagtacgccgcggcctctcggctcaagcacaaccgtctctggaatactggatcacccgccttcgctttcgcgggtgatgacaccacctgttcgacatcttgaatcgagaaccatccacatcgtcgtcccggcgaaggccgggacccatcaccaccaatgcgaattgccgtgcgaccctggggccgcagcccactccacaacacagccctgtgattatgggtcctggctttcgccaggacgacagcggagatcggggtgaaaaatccccgcatcaattcatgcgaacacgacattttgtcatgggagccgcagttgcattttttgcatcgcattatatgataaacataatctgatcagattccgcgcattgaacggagttccgccatggcatccagcgccgatcccgtcgtcatcctttccgccgcccgtaccccgctcggccgcttcatgggcgagctcacgccgctcgccgcccacaagctcggctcgcatgtgatcggagcggcgctggagcgcgcaaagctcgcgcccgagcggatcgacgaggttttcatgggcaatgtgctgcccgccggccagggtcaggcgcctgcccgccaagccgcgcgcggcgccaggcttcccgatgccgccggcgccaccaccgtcaacaaggtctgcggctcgggcatgaaggcgaccatgctggcccatgacatcatcaaggcgggctctgccgagatcgtgctgtccggcggcatggagagcatgagcaacgcgccgtatctgttgcagaaggcccgcggcggctatcgcgccggccacgatcgcatcatcgaccacatgatgatggacgggctcgaggacgcctatgagaccggccgctcgatgggcgatttcggcgaggccactgcggaagcctaccagttcacccgcgccgaccaggacacctacgcgatggagacgctgagccgcgcccgcaaggcggtcgagagcggcgccttcaaggccgagatcgcgccgatcacgctcagcgagaaggccggtccgcgcatcatcgccaatgacgagcacccgctgaaggtcgatccggccaaaatccctggccttaagccggcgttccgcgctaacggcaccatcacgccggcggcctcctcggccaatgccgacggcgctgcggcgctgatcctggcgaaacgctcgcttgccgaccgcgacggcctgcccgtgctggccgagatcaagggccacgccacccacagcgatgaaccgcagtggttcacgaccgcgccgatcccggcgatcagaaaactgctcgacaagatcggctggagcgtcggcgatgtcgacctgttcgagatcaacgaggcgttcgcggtggtcgcgatggcggcgcagcgcgacctcagaattccgcgcgaccggttgaacatcaatggcggcgcctgcgcgctcggccatccgatcggcgccaccggcgcgcggctgatcgtgacgctgctgcacgcgctggaggcgcagaacctgaagcgcggcgtcgctgcgctgtgcatcggcggcggcgaagccaccgcgatcgcggtcgagcgggtgacgcactgaagcgacagcatccgtcattgcgaggagcgatagcgacgaagcaatccgtgcgtccgcgcatgcggatcgatggattgcttcgctttgctcgcaatgacgcggcgaggccgttcgtgcctatgtccgaaaacgagggaacttcgccattttagacatagccgcgctgtgccatattgcgcatcacgaatagaccctcattgcatttgatccggaccacaatgatctcgaactggctcgcttccgctctcgcccgccgcaacatccattatggctgggtgatggtcgccgtgaccttcctcgccgcgctgatctcggccggcaccgtcggcgcgcccggcgtcttcatcgtgcccctgcagaaggagttcggctggtccaccgcggaaatctcctcggcgctgtcgatccgcttcatcctgttcgggctgatggcgccgttcgccgccgcgctgatgaaccgctacggcctgcgcaacgtgacgttggcagcgcagctgatcgtggtctccggcctcgtcacctcgctggcgatgacgcaggtctggcagctcatcctgctgtggggcgtggtgatcgggatcggcaccggcatgacggcgctggtgctcggcgcaaccattgccacgcgctggttcgtggcgcggcggggcctcgtgatcggcatgctcaccgcgagcgtcgcgaccgggcagctcgccttcctgccgctgctcgccaccatcacggagcgctatggctggcgcgtcgcgcttggattcgtctgcgtcatgctcggcgtcgccgccttcgcggtgctgatgctgatgcgcgaccggccgagcgacgtcggcctgcgcccgttcggcgacaacggcaccgcgcccctccccgcgccgccgccggccaatgcgccgatcatggcggccgcgctcggcacgctgcgcgagtcctcgaaatcgtcggtgttctggatcctgttcgcgacgttcttcgtctgcggcgcctcgaccaacggcctggtccaggttcacctgatcccgatgtgtctcgatttcggcatcccgcaggtgcaggccgcgagcctgctcgccgcgatgggcatcttcgatttcttcggcaccatcatctcgggctggctgtcggaccgctacgacaaccgctatctgctgttctggtattacggcctgcgcggcctgtcgctgctgtacctgccgtactccgatttcaccttctacggcctgtcgctgttcgcgatgttctacgggctcgactggatcgcaaccgtgccgccgacggtgcgcctcaccgcgcagcggttcggcgccgagcgcgccaacctggtgttcggctggatcttcgccggccaccagctcggcgccggcgcggccgcattcggcgccggcgtatcgcgcacggtctattccagctatctgccggcgttcttcatcgccggcgcgctatgcgtctgcgctgcgctgatcacgctggcgatcgcgcggccgcaaccgaagccggcggccgagccgaagccggccgctgcctgatgcgggcgcggcgcgcttactccgcagcgaggccggtcggcgcggccgcctcggcggcttccttgttgtagtcgtgcacgacgcggccgaacggcagcgtcaggtcggcgatatagtgatgcgcgccgatgacgcgcttgaccgggaaatccgcgaccggcgcgttgacatgcggcacgagatgcagccggcccggcccgatccaggagcccttgacgacgatgtcggtcaggttgatcgcgaccagctgacagatttcgagatgaccatcgacgcccgggatcatcttcagattaacttgcgtcttcgacagcgtggcgcgggtgacgtcgccgttgcccgccatgctctcgtgcttgtagcccatcgtgcccatcgcgacgagctggccggcatattccagcgtgccggtcagcgtgtccttgacgatctcgagctttggatgggcgtatttcttcggaaaaccccagatctcgcgaccggccgcgatcggcggatcatcgtcgagatacatctggcagacgaagttgacctcttcgccatgcagtcgcgcggggatcacgagaccggactcggtgtagctgccgaagccggagctgtcgggcatcttgatccattcgtagtgcacgatcgactgttcgatcggctccagcggctcaggcaggccggcacggatcaattccggatcggtctcataggtgatgacgaggaattcgcgatcgatgaagcggtaagggccagcgggatagctcggaccggcagccggcatcgacggaagcttgagcagatcttccctgcgcatcgcatgaccccctgtttgcaaacattgcgtgaaagctaatggccgagattgacagcgatatgagggatttccgtcaggtgcgtgacctctgttacgccagcgtgacctcggttgcgcatacctgagcacgtctcgctgcggagcccgttgctaaccatgcaggcaggcatggcggatgcgccgcgcgcgggcgcctcatctgtcatcagggcgtcatcgccgccctgaattctcgccgcgaattctttggagtttctgatatggacgcgcgtacccctcattacgacgatatcgatcacgcgacgccgggctggcgtcccgaaggatgcgatcgcgtggcgctggttctgcagggcggcggcgcgctgggtgcctatcaggccggcgtctaccaggcgctgcacgaatgcaacatcgagcccgactgggtctgcggcgtgtcgatcggcgcgatcaactcggcgatcatcgccggcaaccctcctgcgaagcggctggagcggctgcacacgttctgggaccgcatcaccagccgcaagatctggcactatacgccggacggcgacatcttccgcaaggcgcgcaatcttaccagctcatggatgacgacgacgctcggacagcccggcttcttcaccccgcatcagaccaatccgtggctcagcccggccggtgcgcgcaccgcgaccagctattacgacaccacgccgttgcgggaatcgctgctcgagctggtcgacttcgaccgcatcaattccaagaagatgcgctttgcggtcggcgcggtgaacgtgctgtccggcaatttcatctatttcgacaatgcccatgacgagatcatccccgagcacatcatggcgagcggcgcgttgccgccggcactgccgatggtgaaggtcggcaccgatcatttctgggatggtggcatcgtctccaacacgccgctgcagcatctgctcgaccaggaggacaatgccaattcgctggtgttccaggtcgacctgttctcggcgcgcggcgcgctgccgcgcgacatccaggacgtgatggcccgccacaaggacatcatgtattcgtcgcgcacccgctacaacaccgacgtctaccgcaagacctacaatctgcgcaccgccctgcacaatgcgttatcgaagatccccgacgaccatttgtcggaagaagagcgccagctcaagaaggcgaatagccggttgccgggaatcacgctgctgcaactgatctatcagcagaaggcctatgagggcgacgccaaggaccacgagttttcgggcacctcgatgcgcgagcactgggccagcggacacgaggacaccaagcgctcgctgaagcggcgcgactggatcaagatgcccgagaacggcatgggcatcgtgatccacgacgtgcatcgcgagagcgagtaggaagcggccctatggtcgcgtcgacatgttgctcggcgggccggccttgcggatcggctcggcgaggcgcgcgaactcacagagcagcgaacgcgtcttgcgcgggtcgatcacctcctcgacccagaacttctcggccgagcggaacggcgagcgcagcttgttgaggcggtcctcgatctcgcgcagcttggcggcgggatcggcggccgcgtcgatctcggcacgataggccgcctcgatgccgccctcgagcggcagcgagccccagtaggccgatggccaggcatagcgcatcgagaaccggttggccggctgatgcaccacgccggcaacaccaaaggcgttgcggatgatgatggtgcaccacggcacggtgctctggttgaccgcggccatcgcccgcacgccgtggcggatggtggcggatttctccgcctccagcccgatcatgaagccggggcagtccatcagatagaccacaggcagatggaaggtctcggcgaagtcgacccagcgaaccaccttctgacacgcgtccgaagtccacgagccgccgtagtggaacggatcgctggcgagcagcagcaccgccctgccctcgatccgcgccaggccggtgatgacaggccggccgaaattggcggcgacctcgaagaacgagcccttgtcgaccacggcctcgatgatcggccgcatcttgtagacctgccggcggttgcgcggcacggctgtcagcagcgactcctcggcgcgctccggatcgtcggtacagggaatggtcggcggcagatcgtagaccgacgccggcagataggacaggaagcgccgcgcatagtcgaacgcctcctcctcggtctcgacggcctggtcgatcgcgccggcccgggtctggatgtcggcgccgccgagctcctgcttggtcaggtcctgaccgagccgcttcaccaccggcgggccggcaacgaacatcgcggagttcttggtcatgacagagtagtgcgtggccgcaaggcgcgcggcacccaggcccgcgaccgagccgaggccgagaccgaccaccggcacccgagccagattggcggtcgtgtaccagtaccagcgcgtaccgccgacaccgccgggcagattggcggcgcccctggtttcgatcgtcttcaccgaaccgccgccgcccgagccttcgatcacgcggacgatcggcaggcggaagtcatgcgccatctcctccgccatcagcggcttggcggagatcgatgcatcggccgagccgccgcgcacggtgaaatcgtcgccgaccaccaccacggtgcggccgtcgaccctggcgcggccgaacacgcagttcgccggcgtcaggtgcttgagctcgttgctctcgtcgtattcggcgatgccggagatggcaccgacttcgtggaagctgttctggtcgacgagcttgtcgatgcgctcacgaaccgtgagccggccctggtcgcgctgccgcttgaccttgtcaacgcctcccatctcccgcgcgaacgcttcgcgccgggcgaggtcgtcgagttccggcttccagttcattcattgcctccgtcttgatgattttgttgttgttatgggtggtcaccggaagcgccttgcgctcgatccgattgctgaagatgtcgccgtcggcgccttcgagcaggctgccgagcgcggcggcgaggtcgaccatctgcggcgcgacctcgcgatgcagccgcgcctcgtcatacatcgccgacaacaggccgatcgtggcgaccacataggtctggtattgcggcgaccacagcggcaccgcgacgccgttgatgtgcgggctccacaggccgcaggcgacgacgtagccgtgctcctgcagatgccggcgattggccgcgatgcgcggcgtcagcatcttggcgctctcgggcagttcgccttccatctctgcgatcagcgcatcaccgaccgcgggatcgagcgccgcggtataggcatggccggcggcggtggttgccatcgagatgcggctgccggtggcttcgtgcagcccgagcgcattcgcggcgcgggcgaactccagatagaccagctgaaagcggtcggggatcacgaagcccaccgtgccgggcaactgatcggcgacatcctgcaaacgcagccggatcagattgcgaagctgcagccccttcatcatcgaggtgctcatcgcaaccgcgctcggtccgatgcgatatttctgatcacgcggcagatagacgagttgtcccatccgcgtcagggtgtgcgtcaagcgcgacaccgtcgaacgcggcaggccgcaacggttcgagatttcgagattgccgagccgggcttcatgcccctcgaaacaccgcagtacatcaaacgcgcgcgacaccacctggatgacatcgctatcgccagtctcgctggcgagcattccctgccggctaagccgttccgagcgccgtcccatcttgtttggctccattccgtcttgcggaataaaattccacttgcagatgaagctacctcaggcaatctgccgccacaacaaaaagccgttcgccggatgaaatttccgcaagacggtatcggagagtggaatgccagagatcaaggttgtgaccgaagttgccgggcgcgtttgcgcgcttcctgttgaagccggcaacagcatcggcaatggcgacgagattgcgttcgtcgaggcgatgaagatggagattccggtcacatcgacgacagcaggcaaaatcaagacgattctggtcaagatcgacgatgtcatcgccgaaggccaggcaatcgcgatcgtggagacttgacggcggcggtcccgccatcccgcgcggaccaaattcccaaatggcatatcctcgacggcggttcctccgggagtcgcagcggcgtcgcatgccgtttcgctttcgaaacattcctcgtcaaaaagtttcgtatgatgagacaaaatccgagcaaccgctcgttttgtgaacgtctgttcgaaaatcgacaaccgtcggttcgcggcggcccgggctattcacagctgacaccgacgcgcgctcggttgcgcgcgccttgattgcgttgcacaacagcaggcgatgaaacgatcgcctcctcccgtcaccgccagcaccgtcaactgggcccactcgcagccgccgctgctccggtttctgcacacttgttacgcagagttcctcaccgagaccggcggtgcggttgccgactacatcccggagctcggcaaggccgatcctgcccattttggcatcagcctggcgacgctcgacggccatgtatacgaggtcggcgacacccgcgtgcccttcaccatccagtcgatgtcgaagcccttcgtgttcgcgctggcgctcgacaccctgggcgccgagcgggtggagagcgtgatcggcgtcgaaccgtccggcgaccccttcaattcgatccggctcaatgccgacaaccatccgttcaatgcgatggtcaatgccggcgcgatcgcctgctccggcctgctccatgccgacaagggcgacggcgcgttcgactatatccgccacgcgctcggccgctttgccggccgcgagctcgacgtcgacgaggcggtctacgcctccgagagcgccaccggcgaccgcaaccgggcgatcggctatctcctgcgcaccaacagcgtgatcgccgagaacgtgcctgcggtgctcgacgtctatttccggcaatgcgccatcctcgtcaccgcgcgcgacaccgccgtgatggccgcgacgctcgccaaccgcggcatcaacccgctgaccggcgaacaggtggtgacgccctacgcgatcgcgcgcacgctgtcggtgatgacctcgtcgggcatgtacgacttcgccggcgaatggatctaccgcgtcggcatccccgccaagagcggcgtcggcggcggcatcctggcggcgctgccggcgcggctcggactcggcagctactcgccgaagctcgacaagcacggcaacagcgtacgcggcatcaaggtctgcaagacgctgtcggcgcattacgacctgcacatgctgaaccgcagcgacgacgcccgccacagcatcatcgccgactacaatatcggcaagaacccgtctcgccgggtgcggcggccgcaggaacaggagatcctggccaggcacttccaagaggtgcgcgtgatcgaactggtcggcacgctgtcgctctccaacgtcgactatgtctcgcgccgcctcgccggcagcccgcggccggagttcgtgatcttcgacctgcgccgcgtcaccgcgacgacgcgcgccggcgccaggctggtttcagaggccttccaggagctggccgagctcggcgtcaccgtgatcctgtccggcatcaagcgaacctcacgcgaatggaccacgatcagcgaatggaccaaccggctcggcaatatcagggatttctacctgctcgacaccgcgattgagtgggcggaagaccagatcgtctaccgctatggcggctcgatcgatttcctcgagaccacggagcttgccgagcagccgctgcttgccggattgagcgaagctgagatcgccgatctcgccttgctctgcgcggtcaggacctaccggccgaatgaaaagatcgtcaccgcgggcaccgaggcagcctcactgttctttctgcgcagcggcgtggtccacgtcaccctgcccgacggcattcggctcgcaacgctgaccgccggcatggcgttcggcgagatggcgctgctggagccgaagcgctcggccgacgtggtggccgacatgtcggcgaccgcctatgaagtgtcgattgcggatttcgagcgcttccgggagcagcatccgcgtgccggcgagcggatcatgcgcaacctcgcgcagatcctcgccgagcggctgatcgtggcgaacgcgaaggtcgatctgctgacgtcggggtaggtctttctgcttcctcgcaccgcccttgcggggagaggcgaagcaaggatcagctcaccacttccgttaccggctgcatgtcgatctcgaacgtctccaggaatttcgacgtcatgatgtagaaaccgaccgagagctgcagctcgatcaaggcggccggcgtcagcttcgccgcgatcgccttgaaggtcacgtcggtcggcttcttcagcttgacgatctcgtcggtgaaggcgagcgcggcgcgctgcacctcgtcgaagcaggtcgcggactgccagtcgtcgagcgctgcgttctgctcgtcggtcacgccgacattcttgccgatgcgcttgtgcgcgacgatctcgtaaggcgcctcgcagagaatgccggtgcgcgtgatggcaagctcgcgcacgatcggatcgagctcacccttgtgccggatcgcgccgccgagccggcagtactgctcaaagtagctcggcgagtgcgccatcatgcggaagatattggcgttgcggttcttgtcgaggatctcgcgggtgcgcgggcttgccttcgcgggatcggaatagtcgatacgggccatttcctaaccttgatcttgtcgtttctgtcgggttccgaaacagtaacgggcctccgtcgcaggagcaacacgcgcgagtcaaattgccgccgcattcaaagacaaccctgccacagtcgatattcgctgagtggggactcatcagagcgaatgctcgacgcggggtgttccgagtagaaaaatctggccgtcctgcgcgctcgcggcgcaacgatgagtcacgcccaagtctaggggaaaacgcatgaaggaagccaccaagagggcggcctcggaagcgcttgcgcaaatgctggcggtgacggcgatgctcgtcatcgccagcttgttgctttactggcgatagtatccgcaactggggggcgggagcgaaccaattcagcctggtttcgcgttctgactggatcgttcagcccctcatttcgtctttgcgaaatatggaaccagccgtcccgcgaacggcgtgaagcgcgccaaaaccttgtcgccgatggcgaggtcattgtcgccatgggccatcatgcgaaagccctcgtcggtatcgaccagcacgatgttgtagggcacatgcgcccgggtctccggcgtcgcggcccggcagaccagcgaggtcgcatacaccgtccctgccccgctcgcgcgatgctccctgagatcggacgagccgcaagccgcgcagaagctgcggcggaaatattgtcgcgcaccgcaggcgttgcaggtctgatagacgatggtttccgcacccttggtccagtcagcaatcggttcactcatcgcacgcgctccaggaacatgctgacatgcgacgacagcacgccgccgtccccgtgcagcagcgcgaccgaggcgtcccgcacctgacgattgtcggcgcgcccggtcatctgcagatgggtttcgacgagatgcgccatcgcgccgccgacgccgcaatggccgtagctgagcaggccgccatgggtgttgagcggcatctcgccgtccccgttgaaatagccggcacgcacccgcgccgccgcctcgccgcgtccggcgaggccgaggtcctccagcagcatcgcgagcgtgatcgtgaagctgtcgtagaccgcggcgtagcgcacgtccgaaatcgcaacgccagacgcggccttcgccttcgcgatcgaaatctcggcgccgagctcgctcagcgcgggcgcggccgtgacgtgctgatgggtgtgcgcctgggcgcagccgcggacgcggacccgccggtcgccggtcggctcgcggctgatcacgcaggcggcgccgccgtccgagaccggacagcagtcgagcagcttgagcggcatcgccaccggcttggaggccatcacgtcggcgaccgtgatcggctcgtggaactgggcgccgggatgggtcagcgcatgcttgcgcatcaagacggcgaactcggcaaggtcttcctgcgtgaggccatattcatgcatgtagcgcgtcgcgaccaggccgtaataggccgggatcgtcggccccagcgtgacctcgtagtcgggatgcccgacctgggccagcgcctggatcgaggcgtcgcggctctgcccggtcagccggttctcgccgccgaccaccagcacgtgcttcgccacgccggcatcgacgagttgatgcgccagcatggtcatggcaagcccggtggcgccgccgacctggacggcatgggcataggacgggcggatgccgaaatgctcggcgaatacggtcgccagcatgatgtgcggcgacaccgtggagtagccgcacaggatgccgtcgatctcggcgcgcttcagcccggcatccgcgatcgcaagctcggccgccttgctcatcaggtcgagcgaggacaggccctcatgcttgccgtaggaggtgaggccgacgccggtgacgaagctcattttgtctccaccctctccatcgtcattccggggcgacgcgaagcggcgagcccggaatccataaccaccatcgtgagtatggattccgggcccgcgctacgcgcgtcccggaatgacgagtggagaaattggttcatcatctcaatacgacttcggaaggccgagcaccttctcaccgatgaagctgaggatgagttgcgggctgatcggcgcgatgcgcgggatcagcgattcccgcaagtagcgctcgacgtggtactccttggcatagccgaagccgccatgggtcatcaccgcctgctcgcaggcgtggaagccggcttccgccgcgagatatttcgccgagttcgccgcggggccgcacggcaggttctggtcatactgccagccggcgcgcagcaccatcaaccaggccgcctcgagctccatccagcacttcgccagtggatgctggatcgcctggttcatgccgatcgggcggttgaacacgatgcggcccttggcgtagtccgacgcccgcttcagcgcgatctggccgagcccgaccgcttcggccgcgatcaggatgcgctcggggttcatgccgtgcaggatgtattcgaagccacgcccctcttcgccgatgcggtcctcgaccgggatctcgaaattctcgaagaacagctcgttggaatcgaccggcttgcggcccatcttctcgatctcgtgcacggtgacccgcttgcggtcgaaatcggtgtagaacaggctgaggccgtgggtcgggctgcgcacctcctccagcggcgtggtgcgggcgagcagcagaatcttgttggcgacctgcgcggtcgagatccacaccttctgaccgttgacgatgtatttgtcgccctgccgcacggcgcgggtcttgagctgcgtggtgttgaggccggtgttgggctcggtgacggcaaagcaggacttgtcgcggccgtcgatgatcggcggcagcatgcgctggcactgttccttggtgccgaacaccacgacaggattgagcccgaacacgttcatgtgcacggctgacgcgccggacatgcccgcgccagattcggagatcgtgcgcatcatgatcgcggcgtcggtaatgccgagcccggagccgccatactcctcgggtatgcagatgccgagccaaccggcatcggccagcgcacggtggaagtcggccggatagccgccctccttgtccttcttcagccaataggcttcgtcaaagcgcgagcagatttttgccaccgcgtcgcggatcgattcctggttggcggagagtgcgaagtccatctgtcgtgctcctatgcctgcgccgctctggcggcgccttcgcgcagcatcgccgcgatctcctcggtcgagaaacctgcctcctgcaggatctccacgctatgctcgccgagccgcggcgccaaccggctcggctccaccttggtctccgaccagcgtgccgacggcgtcatgctgcggatgcggccctcggtcggatgatcgatcacggggaagacaccggttgcgaccatatgcgggtcctcgagcaggctctcgagatcgtgcatcggcatcacaggcacgtcggcctgctcgaggattgcgttccattcggcggtggtcttggtctcaaggatgcgcgcgagctcggcgtagaccacgtcgatgttggtggcgcggccggcgaaggtcgcgaatttcgggtcgctgcgcagatcgtcgcggccggtcgccttaaagaagttctcccactgcttgtcgttgtagacgatgacgcagatgtagccgtccagcgtcttgtagggccgccggtccggcgagaggtggcgggcatagccgcccttgtcgagcggcggatcgtaagtaagcccccccatgtggtcgcccatgacgaagccggccatggtctcgaacatcggaatgtcgacgcgctggccttgcccggtgcggtcgcgatgcacgaggctcgcgcagatcgcgccgaccgcggtgagaccgacgatgcggtcgaccagcgcgttcggcacgtagcgcggcacgccgtccgaggtctgcgccatcagcgccggcagcgctgtggcgccctggatcagatcgtcataggcgggctttgcggcatacggcccgtcctggccgaagccgaacacgccggcatagatcagccgcggattgaccttggcgacgacgtcgtagtcgagctgcagccgcgccatcgcctgcgggcgcacgttgtagaccagcacgtcggccttcgcgatcagccgcagcacggcctcgcggcccgcgggcttcttcaggtcgaggcagaccgaacgcttgctgcggttggtattgaggaacaccgggcccatgccgggatgccgggtcggaccgatctgccgcgtcacgtcgccgtcgggcgattccaccttgatgacatcggcgccgtaatcgccgagcatctgcgtggcgtagggtcccatcagcacggtcgtcatgtcgacgaccttgataccctgcaatggtcccatcgtgctgctcgctccccggctgttctggattgaagcctagtaacgggaggtctttgccgagatcaagctgcgccgggcgtatgggcgtatgcgcggcggcggcgcgatgtctcgttaatccgtcctgcggactattgccccggcagcgcgtcgcgcgccttcaggagcctttccagctcctcattctgctgttcaagccgttcggcgatgcgctcctcgacttcggcgccggcagcgccggcggcctgttcgatcaactgccggatattgtcgcgcaggatcgcgatccggtcattcagttccgacagcgacagaaagctctcgtttcccatgggtgcagtctccgaagcctgttccaagcttagcgcgactggacgcatcggcctatccccccgcgacgccgcgccgggcgatttacgcctgcttggccatcatctcccgcagcgcggtcttcagcaccttgccgtaattgttcttcggcagggcatcgagatagacgtagcgtttcggccgcttgaagcgggcgatcgaggcaaggcagtgcgcgtcgagcctgccgtcgtcggcggtgacaccatcctccagcacgacgcaggcgacgacgatctcgccccattccggatccggcacgctgatcgccgagacttcgcggacgtcgggatgcgtcagcagcgcttcctcgacctcgcgcggatagatgttggtgccgccggagatgatgacgtccttggagcggtccgacagcgtcaggaagccgtcggcgtcgagccggccgacgtcgccggtgcgcagccagccgtccctcagcgtctcggcattggccttcgggttgttccagtagccgagcatcacggtcaaacccttgacctcgatctcgccggtctcgccggcgggcagcggcgtgccgtccttgtcggtgatgcggacggtgacgacgctctgcgcggtccccaccgacgccagccgttcgagatagcgcggatgatcgctggcgcgatgccagtcacgcgacagcgccgtgatggtcatcggcgactcgccctggccgtagatctgcacgaagcgcgggcccatcgtcgccatcgcatccctgatgtcgacggtgtacatcgggccgccgccatagatgatggtgcgcagcccttcgccgttctcgccgcgcttcctggcggcatcgaccagccggcgcaccatggtgggcgctgcaaacatcacgacattgtcgagctggcggccgaggttgagcacctcgtccggatcgaagccgccggtttcaggaacgacgtggcggccgcccatgcggacatgcgggaaattatagaggcctgcgccatgcgaaatcggcgcggcatagagcgaggcgtcgttcggcgtcgcttggtcaacgtcggcgagatagcacagcgacatcgcaagcagattgccgtggctgagcatcacgcccttggggcggcctgtcgtgcccgacgtatagaacagccaggcgagatcgttgctttcgcgcggcagcggcgcgggcgcgccctcgccccttcgcatcgccctgtacgcgtcgctgtcgaccgacagcagggtcatggcggcggggcaatcgtcccgggcttcggtcagtgcgtcgatcgtgtcatcggacacgaaagcaagcctcgcgccaccattgccgcagatccacgccgcctcgcggccgtgcagcttggcgttgatcgggatcgcgacggcgccgatccaccagatgccgtagaggcattcgagatattgcgtgcagttcgacgcaaacaacgcgacgcggtcgccggcggcaataccatgatcgtgcgccagcgccgccccgatcgaggcggcgcggcgggcgaaggtcgcgtaatcggcgtcgagatcgaagccggtcagcagcgccggcgcatcggggcgtgcccgcgccgtcgccgccagccattcggcaatgttcaagctacttggccggtcaagctacttggccggctcgaggatcgagacgtaattggcgaccgcagcaccgcccatgttgaagatgccgccgatttgcgggttcttgagctgcatgccctccggcgcctggccggcgagctgcatcgcgctcatcacatgcatcgaaacgccggtggcgccgatcggatggcccttggccttgaggccgccggatggattgaccggcagcttgccgtccttctgggtccaaccttccttgatggcgcgcgcaccctgccccttcggcgtcaggcccatcgcttcatattcgatcagttcggcgaccgtgaagcaatcgtgggtctcgacgaaggacagatcggagagttgcaggccggccttgtccagcgcgcgctgccacgcaacggtgcagccttcgaactgcaggatgtcgcgcttggacatcggcaggaaatcctgcgcatgcgcagtggcgcggatgttcaccgccttgcccatgctcctggcggtctcggcgtcggtcagcaccagcgcggcggcgccgtccgacaccagcgagcagtcggtgcgcttcaagggtccggcgacataggggttcttctcgctctcggcgcggcagaactcgaagccgaaatccttgcgcatctgcgcatagggattggcgacgccgttcttgtggttcttcgccgcgatcatcgccagcgcgtccgactggtcgccgtatttctggaaataggactgcgcgatcttgccgaacaccccggcgaaaccgccgaccgtatcgccgtcctcgggcagatacgacgccttcaacaggttcttgccaatctcagggcccggcgtcttggtcatctgctcgacgccgacgaccagcacgatcttggcggcacccgcctcgatggcgcgaatgccctggtgcacggcggccgaaccggtggcgcaggcgttctcgacccgcgtcgtcggcttgaagcgcagcgccggattggcctgcagcaccagcgaggccgtgaaatcctgcggcgagaagccggcgttgaaatggccgagcatgatctcgtcgacatcggatgcggcaatgccggcatcggccagcgcctcattggcgaccttgacgacgaggctttcgacggtctccacgtcgaacttgccgaatggcgtgtgcgcccaacccacaatgctggctgctgtcatggccgtatctccctgttcctgttcgggagttatgtagcgtatcttcagccggctttcagcgttttcatcgccttggcgcacatggcggttatgcccgcccagttgccggcgcggatatcggccgccgggcacagccaggagccgccgaccgcgagcacgttggcctcggcaagccaggtcgccgcattggcctcgccaatgccgccggtcgggcagaccctgacattcgggaatggaccggccaaggcccgcagtgccttgataccgccggcctgctcggccgggaagaatttgacgacgtcgaagccgtgcgccagcgcctgcatgagctcggacgcggtcgcgatccccggcgcgaacggcagccggctggcagccaccgccttcagcagctcgggcgtcgcgcccgggctgatgccgaatttggcgccgagcgcctcggcgcgcgccagatcaccggcattgaggatggtgccgatcccgaccaccgcgtcgggcacctcggcgatgatggctttggccgcatcggccgcgaccggcgtacgcagcgtcacctcgagcgtgcgcacgccgccggcgaccagcgccctggcgagcgggacggcgtcctcgacccgctcgatggtcagcaccgggatcacggtggcccggcggatcagctcggcgatctggtcctgcttcgatgtcgttgtcattgcgaggccttgcgggatggtgggggacgaggcgccttcttcggcggcatggcgtagcgtggaatgatcgcgccgggatagcacaccacgacaccggccagacgatgaccggcgcgcgccgcctctgcgggctcggcgccaccgagccgcgcagcaaggtaggctgcggcaaaactgtcgccggccgccgtggtgtcaaccaccggcttgatgagcggctccgccctcacctcggtcgtcccggtagcggagcgcacgatgcaggcgggctcggcaagcttgagcaccacctcggggctcgaaatgccggcgagcagcgccgtgttgctctcgccgggatagagcggtgcgaggtcttcggtcgacgccagcacgatatcggcggtgtcgaatgcgctgctgaagacgcttcgcgcgacgcccaggtccggccagccgcgggcgcggaaattggtgtcgaatgcgaaacgcgtgcccaggagccgcgcccgcttcagcgcagccatcagccgctcgcgcccgtcctcgcgcaggatcgagagcgtgatcgcggagagatagacgatatcgtaggtcgcgagcgagttcaggatgtcgtccgtctccggaaggtccatcagctcacgggcggcggcgctatcgcgccagtggaagaagcgccgctcgcccttgtcgtcggtctggatcagatagagcccgggcagcttgcctgccaatcgcgcgacatgcttggtgccgatgccttccgccgcccagccggcgatcatctcatcactgagcccgtcgtcgccgagcgccgtgatatagtcgatgtggacgccgagccgcgacagatagaccgcggtgttcagcgtgtcgccgccataggagcgcgaatacagcccgccgggctggccgcccgtcgcctgacgcagctcgatcatgcattcgccgatgctggcaaccctggtcatagcaagacccgtgcgcctgcggagctaagcagcaaacttgccgccgagctcgtcctcgatgtggatgcggatgatgtcgtcgaaggtcttctcggcggtggtgaagccgagcttcagcgcgcgctcggtggcgaaatcgcgcggccagccagagacgatgctgatgatggtcggatcgggcacccgcttgatccgcgcggtgacgttcttgccggccacccgctccagcgctgcgatctgctcgccgacggagacggacatcccgggcatgctgagattgcgccgcggtcccatcgcgttgaggtccatggtgccggcatggaccaggaatccgaccgccgatttcggcgaggcgtgccagtgccgaacgtcctcggacaccggcaggaccgcctcctcgcccgccagcggttcgcggatgatgttggagaagaagccggacgccgccttgttcggcttgcccgggcgcacgcagatcgtcggcaggcggatggatatcccgtcgagcagacccttgcgggtatagtcgttgatcaggagctcgcagatcgacttctgcgtgccatagctggtcagcggcgtgtgaaagaactcgtcgccgatcttctcagggaacggggcgccgaacaccgcgatcgaggaggtgaacaccagccgcggcttatagccgccgccgacggcgcggatcgcgtcgatcaggtagcgggtgccgtcgagattgatccggtagcccttgtcgaactccgcctccgcctcgcccgagacgatcgcggcgagatggaagatcacgtcggggcgctcggcgatcagcggcgcagcagcgccggcattagcgaagtcggatgcgacgacattgaccgggatcgcggcattcgcgggcttggccggcgcgaccacgtcctgcaaggtcatcttgctgatgtcctgcttgccgagacggccctcacgcagcaggcgttcggtgagcttgcgaccgaccatgccggcggcacccaggatcagaatgtgcacgacgcgtctccttttcttgttcttccacggtccagagtgggcgcgttattccttcacggcgcccgtcatggccgacacataatgctcaacgaagaacgcgtaaagaataaccagcggcaacgagccgaccagcgctccggccatcaacgagccccatttgtagatgtcgccatcgacgaactcgttgacgatcgcgaccggaaccgtcttgttcggtgtcgattgcaggaatgtcagcgcatagatgaactcgttccagcatagcgtgaacgagaatatgaaagcggagatcaggcccgggatcgccaacggcacgatgatcttgaccaggatctgccagcgcgacgcgccgtcgatcaatgcgcactcttccagctcataggggatggtcttgaagtaacccatcaggagccaggtcgagaacgggatcagcagcgtcggatagaccaggatcaacgacagcggcgaatcgaacagcccgtaggcctggatcaccgacgccagcgggatgaacaggatcgatggcggcaccagataagcgaagaagatcaggacaccaacggcctccgcacccttgaagcgcagccgcgtgatcgcgtaggccgacagcacgctggcgacgatggaaaggaaggtcgcgccgacagcgacatacatcgtgttccaaagccagcgcggatactgggtttcgaacagcagcttgctgatgtgcttgaaggtcggatggatcacccagaacgggttgaacttgtccatgtcgatgagctgctcgtccggcttgatcgacgtcagcaccatccaatagaacgggaacagcagcaccacgaggatgatgaacagcggcaaatagagcgtaacgaggcgtcgcggcagcgactccagatagttcatgccttcggtggcatcgccggtgttggtcacggccttcgattgcaaggttgaatcagtcattgctcgatccttgctgccatttgcggcgctgcattccgaaccaggagatggcgatggccgccaccaggaagggaatcatcgcggtggcgatcgcggcgccctcgccgagccgcccgctgatgatgccgcgttgatagctcagcgtcgccatcagatgcgtggcgttgaccgggccgccgcgggtcaatgcccagatcaactggaaatcggtgaaggtgaatagcaccgagaaggtcatcaccacggcgatgatcggggtcagcagcggataagtgatgaagcgaaagcgctgccagccggtggcaccgtcgagcgtggcggcctcataaagcgatggcgagaccgtctgcaggccggccagcagcgtgatcgcgacaaacggaacgccacgccagacgttggcgaagatcacgctcgcccgcgcccactccgtgtcgccgaggaagttgatgttgctgtggatcagtccgagcttgatcagcgaccaagagatgatcgagaactgcgaatcgtagatccaccagaacgcgatcgccgacagcacggtcggcacgatgaacgggatcagcacgatcgagcggatcaccgccttgaacggcatgtgccggttcaacagcagcgcgagatagagtccgatcgcgaatttgatggcgcttgcgatcagcgtgtaaagcagggtgttgaacaccgacagccagaagatcgagtcgtcccacagccactggtaattctcgacaccgataaaggctccggcgcgcccgatgcgctcgtcggtgaagctcatccagacgccaaggccgagaggataagccaggaacaggatcaggaatgccgccgtcggcagcatgaaccagaacgccgcccaattgcggtttcccttgagccgcgaccatgccgacggctcacccgttgcggcagcgcgcgccggcattgatgtctggacagtgctcattcgctctcaactccaaaccggacagcgacacccggccaatccagaccgggtgtcgcttccgtttgctgcaattccgatcaccggcgctttgcagcgccggccgtcgctcagcggaagatacgcttggccgcgcgctcggccgaagccatcgcggtcttcacatcctcgcgaccggtgcaatagttcgcaaacatgtcgaccacgacgaaatcggcgatcgcagccgcggcgttctcgctcatctgcgcctcgcctgccggggtcgacgcggtctgcgccacgctttgatacggcgtcgtcttcggatccgcggtccagaccgggttcttgtcgtagccgagcaggaagtgcgacaggtaaccctgcgccgcctcgatccacggattgaactgatccggctccagcataaaggccgtgaacgccttgcaggtctgcggatatttcgagaaactgaagatcaggatcgggaagccgagatgcaactcgcgcgtcttaccgtcgagcccggccggcagatgggcgtggttcatgtcctcggcgatctgcggattttccttcttcgccgtgacatagattgaaatgccgttgacggtcagatgcagctgcccggccaggaacgctttgttgttggagctgtcgttccatgacgcggtgcccggcacgaaattgtcgtaaaggcccttgacgtattcgagcgacttcgctgtctccggcgagttgacgacgaccttgttgtccttgtcgatcagcttgccgccatgcgcccagagcgcccagtgcagccagccattggcgtcgcccgaggcgtggccgagcgccatgccggccggggtaccgttcttgttcatgcccttcaccagatcggcaaagccggcgaggtccttcgggaattccttgtggccggccttctccatggccgcgacccgatagttgacgaggccgccggtggccgcgaccggaatgccgatccacttgccgttcagcatgccgtacgccttgccggaatcggcccagccgccgcacttcttgccgagatagtcggcgacgtcggtgacgtcgacgcacttgctcgggaacaggaagggcagcgaatagaggccccagaccatgtcgaggccctgccccgtattggccgccaccgaggccttcggctggatgtcgtcgtaggattcgttggagacgttgatcgtgacgttgttggccttctggaacgcgtcgacgatcttcatgaaggccacgtcctcggcttccacgaagcgcttccagcgcagcaggttgatcttggcgcccggctccggcttccactgcgaagtctgcgcccaggccttggcatagccgagcagctgatcgctcgacatcgtcgccgcggcagccagcatggtcgcaccgcccttgagcagcgaacggcggtccgtactaaaaatcgacattggcaattttctcccgttttttggttgtcgtttcagacgtcgcatgccccgccgaaaaacggcaggccgatagtctcgtcaccaggatgcgctgacgctgcgtgctggcgcggcatcgctcagctgttcagccgcttgccggtaccatcgtcgaacagatggaccagcgccggatccggcttgagccggaccttgtcgccgggattgaacagatggcgctcgcggaacaccgcgacgacctgctcgccgccgagcttggcgaacacctgcgtctccgatccggtcggctcgaccaccacgatctctgcctcggcgccgtcatcggcgatggtgaaatgctcgggccgaacgccgtacaccgccggcttgccgtcggaattggccggcgcggatttcagcggcagcttgacgccgttcggtccctcgaaataggcggcgccgttgaccttgacattgcccttgaggaagttcattgccggcgagccgatgaaaccggccacgaactggttcgcgggcctgtcgtagagctcgagcggcgagcccatctgctcgacgatgccgtcatgcatcaccacgattttgtcggccatggtcatggcctcgatctggtcgtgggtgacgtagaccgtcgtggtcttcagccgctggtgcagttccttgatctcggtgcgcatcgcgacgcgcagcttggcgtcgaggttcgacagcggctcgtcgaacaggaacacctgcggatcgcgcacgatggcgcggcccattgcaacacgctggcgctggccgccggagagttgccgcggatagcgctcaagcagcggggtcaaagcgaggatttccgccgcgcgcttgacgccggtcgagatttcctcgggcttggcgccgcgcagcttcaacgagaagcccatattgtcggcgaccgtcatgtgcggataaagcgcgtagttctggaacaccatcgcaatgtcgcgctctttgggctggacattgttgacgacgcgatcgccgatcgagatcgttcctgaggtgatgttctcgagtcccgccagcatgcgcagcagggtcgacttgccgcaacctgaagggccgaccagcacgacgaactcgccgtcctcgatcgggatcgacacgccgtgcaggacttcaaaattgccgaacgacttgcgcacgtcgcgaatctggaccgacgacatccacttccctccctcaagttaccgacgacgtacgacgagtgccgccaccgctctgttttgttccggccacgctgggcgcgcggctctgttggactgacgatattgtccgcagtttatccggttttggcaatcgttggattagcaatcgcttggtagcgctgtcaatatcggtttgtctgcgacgaacgtcgtgatatgagcggcaaatggcccgaaagcgcatcacgcctggcaagatccggctcgccgaagtcgcgaagctcgccggcgtcagtccgattacggcctcgcgcttcttcaggaatccggacgcgctttcggccggcaagcgcgcccgggtcgagagtgcggcaaaagaactcggttacgtgcccaatctcgcggcacgcgcgcttgcgtcgcagcgtaccgaggtgatcggtgtcctgatcccgtcgctcaccaacaacgtgttcgccgacgtactgcgcggcatctatgacgcgctcgacggcagccgctacagcattcagctcgccaacacccgctacagcatcctgcaggaagagcgcctgctgcgtctatttctggcacagaagccggctgggctgatcattaccggcatcaaccagaccgccgattcccaccgcgtcatggaggccgtggactgcccgatcgtgcagatcatggaggtcggcccctcgccgatcgacatgatgatcggattctcgcactttgacgcagcaaaagctgcgatcgcccacctccttgcgcagggctaccggcgcatcggcttcctcggcgcgcgaatggatccgcgggtgcagcggcggctcgacggctatcgcgccgcgatgacggacgccgcgctgttcgatccgcagctcatcgtcaccacggcgataccgacctcggtgacgctgggcgggacgctgtttgccgacctgctcgcccaggcacccgacatcgacgcggtgttctgcgtcaatgacgacttggcgctcggcgcgctgttcgaatgcaagcgccgccacatgacggtgccggagcagatggcgatcgtcggcttcaacgacctcgaattcatggcctcgagcgagccgacgctgagcagcgtgcgcaccaatcgctacgaaatgggcagaaacgctgccatgatggtgctggagacgctggaaggccgccgccccactgagtccgtcgtcgatctcggcttcagtgtcatggaacggcaaagctcggcgcgacgcagctgacatccacccgataccagcccgtcacaaggacgcgaaaaatgacaaaatgatagcgcaaccaagcgccttcaactaaggtccaatccatccatcgaaacacctgtgcgtgatcgcctgggtttgtaatgcccgacgatttgcgcaaggtagaacaacgttgaaccagagcccttgaatgggcccagcaagatttgcattgcgggagagaccaatgacaaaaccccacaccaacgggcacagcgccgcaggcgagaccacaaagggcaagggccgccggctccgctcgcaggaatggttcgacaacccgcacaatccgggcatgaccgcgctctatctcgagcgctacctcaattacggcctgacccgcgaggaattgcagtcgggcaagcctatcatcggcatcgcacagaccggcaatgacctgtcgccctgcaaccggcatcacctcgagctcgcccaccgcgttcgcgagggcatccgcgccaccggcggcatcgcgatggagtttccgacccatccgatccaggagaccggcaagcgcccgaccgcggcgctcgaccgcaacctcgcctatctcggcctcgtcgagatcctgttcggctatccgctcgatggcgtggtgctgaccaccggctgcgacaagaccacgccggcctgcatgatggcggctgcgaccgtgaacctgccggcgatcgtgctgtcgggcggcccgatgctgaatggctggcacgaaggccagcgcaccggctccggcaccgtggtgtggaaggcgcgcgagcggctcgccgcgggcgagatcgactatgagcagttcctcgagatcgtggcctcctcggcgccctcggtcggccactgcaacacgatgggcaccgcctccacgatgaactcgctggccgaggcactcggcttctcgctgccgggctgcgcggcgatcccggcgccctatcgcgagcgtggccagatcgcctacgagaccggcaagcgcatcgtcgacatggtctgggaagacctcaagccgtcggacttcctgacccgcgaagcgttcgagaactgcatcgtggtcaactccgcgatcggcggttcgaccaacgcgccgatccacatcaatgcgctggcgcgccatgtcggcgtcgagctgtcgatcgacgactggcagaaatacggacatgacattccgctgctggtgaacatgcagccggccggcttctatctcggcgaggagtaccaccgcgccggcggcgtaccgtctgtcgtgcgcgagctgatcaagcacaagcgcatccatgaaggcgccctcaccgtcaacggccgcaccatgggtgagaattgcaaggaagcgccgcagcccgatggcgacgtgatctggggctacgacaagccgctggtgaaggacgccggcttcatcgtgctgcgcggcaatctgtttgattccgcgatcatgaagaccagcgtgatctcgaaggaattccgcgaccgttatctgtccaacccgaaggacctcaacgccttcgagggccgcgccgtcgtgttcgagggcccggaggattatcacgcgcggatcgaggatcccgcgctcgacatcgacgagcactgcatcctgttcattcgcggcaccggcccgatcggctatcccggcggcgccgaagtggtgaacatgcagccgccggccgcgctgatcaaacgcggcatcctgtccctgccctgcatcggcgacggccggcagtccggcacctcgggctcgccctcgatcctcaacgcctcgccggaggccgccgccgatggcgggctcgcgatcctgaggagcggcgacaaggtgcgcatcgacctcaacaagggcagcgccaacatcatgacctcggaagatgagctgcgcacccgccgcgccgagctgaaggccaagggcggcttcccgcacccggccaaccagacgccgtggcaggagctctaccgccagaccgtcggccagcacgccaccggcgcctgcctcgagctcgcgacacgttaccacgacattgccggcaaggtcggcgtggcgcgggacaatcactagagcatcaccgtcattccggggcagcccgcagggctgaccccggaatccataaccacgatcgggagtatggattccgggcccgcgctgcgcgcgtcccggaatgacccgagaaaccgggagagagacaaatgtcagacagactgaagggcaaacgcgccgtggtcaccgccgcggcggccggcatcgggcgcgcatgcgcgatcgcattcgcgcgcgaaggcgcgaccgtgatcgccaccgacatcaatgagagcggcatcgccacgctgggcaaggacggcatcgccgagaccgcgcggctcgacgttcgcagcacggccgacgtcaacagcttcgccaagcgcgttggcaagatcgacatcctgctcaatgctgctggcttcgtgcatcacggcaccattctggagtgctccgacgaagacttcgacttctcgttcgatctcaacgtcaaatccatgcaccgaaccatcaaggcgtttctgcctgcgatgctggcaggcggcggcggcaacatcgtcaacatttcgtcctgcgcggcgttgcggccgccggccaatcgctacgtctacagcgcgtcgaaggcggcggtttcgctgctcacgcgcgcggtcgcgctcgacttcatcacccagggcatccgctgcaacgcgatctgtcccggcaccgtcgagacgccctcgatgctggagcgcgcggctgccgccggcccggacggacgcgagaagttcgtcgcccgccagaagatgggccggctcggcaccgccgaggagatcgcagccatggcggtgtatcttgcgagtgacgaagccgccttcaccaccggtgtcgacatggtcgtcgacggcggcttcatgctctgacaggcacgcaaaggcattcagcatgaacaagatcgatctcgacggccgctgcgccgtggtcaccggcggtgcgcaggggttcggccgcgccattaccgagcgcttcgtcgcatccggcgccaaggtcgcaatctgggatttcgaccagccgctggcggagaagaccgcgcgggcgatcggcgagaacgtgatcgcgatcaagaccgacgtcgccgatcccgccgcggtcgacgccgcgcgcgatcagacgctcagggcattcggcaagatcgacatcctcgtcaacaacgccggcatcaccggcgccaacaagccggtctgggaaaccgatctcgacgactggcgccgggtgatgcgcatcaatctcgagggtcccttcatctgttgcaaggcggtcgtgccgaccatgatcggccagaagtacggccgcatcgtcaacatcgcctcgatcgccggcaaggaaggcaatccgaacgccgcgcattattcgtcgtcgaaggccggcctgatcgcgctgaccaaatcgctcggcaaggagctcgcccagcacgacatcctggtcaacgcggtgacgccggctgcggcgaagaccgcgatcttcgaccagatgacgcaagcgcatatcgacttcatgctgtcgaagattccgaaagcccgcttcgtccaggtcgaggagctggccgcgatggtggcctggctggcatcggaagactgcgcgttctcgaccggcgcggtgttcgacatctccggcggccgcgcgacgtactaactcgcgcgcttcgcttgctggcggagcgcggcgaccaggtgatctgccaatagtgatgccgcgcgcgacaggtctcgcgcgcggtgcagccggatctccgcacgcggcagtcgcggcaagccgtcgcgcgacgtcaggcgccgcagcgcaggcggaaacgtgcccgacttgaccacggtcaccgcaaggccctgtgccgcaatcgcctcgaccgcggccaggctgtggctgacaaaggcgagccgccacggccggtcggcctcgtcgagtgcctgcatcgcccaggccctgaacaggcagccctgcggatacagcgcgaccggcagcggatcgagctgctcgacacgatgcgccgcgctggcggcccacaccgcctgctcggtgcgcagcaactcgccctcgccgcgcccctcggggtgcatcgcgatcacgaggtcgtaggcttcgccgagccggtccgtcatcgacgacgtcagcccggtctccatctcgacatggatcagcggatagttggcggtgaaatccttgagcagcggcggcacgatcaaggtcccgtagtcgtccatcacgccaagacggacccgcccgtcggtgccgtgcgcgcgcacccggccgatcgcctcggcgttgaggctgagaatccggcgggcataaccgagcagcccttcgccggccgcactgaggtcgacgctggaggtgctgcggtgaaacagctcggcctgcagccgttcttccagccgcttcacctgcatgctgacggcggattgggtccggtccagcgccgatgccgcgcgggtgaaggagcgatggtccgccaccgcgacaaaggcctgcaggagatccgggtccagggtgctcataacgatatgtgatttgctcgatcaaatatattccattccatgattatgccctcgtccctagattgcgcaagcaaaacagggggatcgagcgggatgggcgaaatctggggggtgctggctgcggtgctgtcgagtgcgatcggtggaacctcgatcggggcgacgcggttcctggtcggcgcgatcgatccgctggcgatcggcgcattccgtttcggcatcggcgtgctgctgctgctgccgctggcgctgctgcatcgtggaagctggccgccgcggcgcgactggcccggcgtcgccggcctcggcctgctgttcttcgcggcgtttccgatcctgttcaacgcctcgctgatcttcacgaccgcggcgcgcggcgcactcgcgctctcgaccctgccgctgctgaccatgctggtcggcgcggcgctcggcatcgagccgctcaccgcgcgcaagaccgtaggcgtcctggtcacgatcctcggcgtcgcgatggcgctgctctccggcctcgccacggcaccaccggatgcctggcgcggcgatctgttgatggtcgcggccgcgctgtgcatggcgctctacagcatctggtcgaaacccttcatccgtcgctccggcccgatcccgttcacgacgctcgccatggcggctggtgcagtggtcctgataacggcctcgctgctgcgcggcagctttgcgccggtcgcggagttcggcgcgccgcaatggttcggcgcgacctatctcggtgctttcggcgcggcgctgactttctatctgtgggcgttcgcgctggaacggacgacgccgacccgggtggcgatctcggtcaccgtcaatccgattgcagcctcgctggtcggcgcagccctgctcggcgagccgctgagctggaatctgatggccggcatcgtcaccgtgttcgccggaatctggatcgcgaccacccagccgcaacgggcacacgcgaccggacccgcggtcgcacccgacgcgcactgatctgcgggcaacgctcgccagccaagacttcagcaaatccgtgctagcctgacctcgggtccctgcgaatccgaggcggcacgccattgaacatttcgctttacgacgtctccgtctgggtgctgccgctggtcatcgccatcacgtttcatgaggcggcgcacggctttgtcgcgcaccggctcggcgacgacaccgcctggaagctcggccgggtcagcttcaacccgctgaagcatatcgacccattcggcacgctgatcctgccggcgatgctgctgttcgcgcattcgccgttcctgttcggctacgccaagccggtgccggtgaatttccgcaagctcaaccatcccaagctcgacatggtctgggtggcgctggccggcccggtcaccaacatcctgctggcgatggcagcggcgctggcattccacgcgctgccattggttcccgcagatgcggcaaaatggaccgcggacaatttgaaaaacgcgttcctgatcaacatcgtgctcgcgatcttcaacatgatgccgatcccgccgctggacggcggaagggtcgcggtcgggctgctgccgcgaccgctggcgatcccgctcgcccggctggagccttacggcatgctgattctgatcggactcttgatcctgctgccggtgatcggcaggcagatcggcctaaatcttgatgttatttcaacgatactgcgaactctgaccggctatgtaatcaacgcccttctcctcatcaccggaaacacatagctttgatttgcgcatgacccgatcggaaaaccggaacccaatcttcccgggcgtgcgcagggacaggaacgcttcgaggccatggtgatcaaagctgccgatatgctgattgcacgacgcgccgacacccgcgcgcgagctgactttgcaacctggaagatgatggccaagctgaacggcgcctccgccctgccgcctgaggcgcagaatttcctggcgatccacaagaagctgctggaacagatgagcgacgccgaggccagcgaggcgacgatccaggagatgtatcgcacctactatgcggagatgggcggcgccggcaaggcgccggaggtcccggcgcgcacgcgcgaaccggtcgccgacaccggcaacgtcaccgcgttccgccgcctgcccgccaagaagacgaccacctccggcccgaacgccaagcgtccgatgccggtggcgctgatcttcgcctgtctcgtcgtggtttacgtcgcgatccgctactactggaaatagcgccgtccacgcttcatctcattccgggctttcttgagcgacacgccgatgccgcggcatcgcgccgcgcacatccggccatccaatcgccgcggcgtggaatatcacgcgcgatcgatcgaacccgcgccctaggcgatgcgcccgatgccgggcataatgcggaaccaaaagaacaaaatcatactggagggaagatgaagcgttccattgcagccttggctacgacagccttggtcatgaccacgagcctggttttcgccggcggtgcgtcggcgcagacgatggacaaggtcgccaaggtcggcgccctcggcgaccagtccggtctctatcaggacatcggcggacccggctcgacggtggcggcgcagatggccatcgaggactccgggttgctggcgaaaggctggaagatcgacctgatctcggccgaccaccagaacaagcccgatgtcgccgtcaacatcggcaagcaatggatcgacgtcgagaaggtcgacgtgttcgtcgatctcgcagcctccaatgtcggcctcgcgatcgccaacctcgccaaggacaagaacgtcgtcaatttgaactcgggctccgcctcgtccgacctcacgggcacgcaatgctcgccgaacacggtgcactgggtctacgacacctacatgctcgccaacggcaccggcaaggcgctggtgaaatccggcggcgacacctggttcttcctcaccgcggactatgcgttcggccaggcgctcgagcgcgacacttcggcggtcgtcaccgcgaatggcggcaaggtgctcggcagcgtcaagcatccgctcaacaacgcggacttctcgtccttcctgctgcaggcacagagctcgaaggccaagattgtcggccttgccaatgccggcggcgacaccaccaacgcgatcaagcaggccgccgaattcggcatcgtctcgg

SEQ ID NO: 50 - DNA, 41760 bp, Bradyrhizobium enterica
cagcagcgccagcgtgctggttccagcgagcagcatcgagcgggacaccaatccgatccgctgccgcggcggaagcggcgcaacccggcgctgagcgaggcgggaacggcgggcaacgcgctgacgagacggcatgggatgtcccctgggaacaacggacggaacgtttgcgcagatcggatctgcgcaggcgcccgtcacgcggctgaaccgcatgccgggcttctcgtccccaaggacgccatctgatcggcgggaccgaacaacaaaatcacgggccgcatcacaattcccgcgcacacgcggtgcacgctttcatggctcgccaaacatcagctcagcagcacgatgccgcccggcagatgtcgcgccttcgcgccgaaaatctgctggaacatggtcagaatgccatcgacattgtcgatgcggaaccggccgttgacgagacggcgctccaattccgcattcgtcaccatgaccttgcccgaccggtagcgattgatctccgtcacgacgttacggagcggcgcgtcatgaaagatcaacattccgtcgcgccacgcggtcacctcggcgggatcgaccgacatcggcgcggcgaggccgagcgccgcatagctgacctgctgccccgcacgcagcgtcgcgacagagctgtgacggttgacccgcacctcgccatcgagacaggtcaccacgcaggtgctgcgctggtcatggcggacgttgaattgagcctggtgcgcgcgcatctcgccgtcgccggcaacgacgcgcacctcgcggctcgcagagcccgccgcgatcaccgcttccccggtcaaaatctcgatgcggtcctggctggcgtcgtccgatcgaacattgacgctggttccggtgttcagcgtcaccttgacgccgccatcgatcgtcagcttgcgctgctcaccggcagcggtgcgataatccgccatgacgtcctgcagcgacggccacagctgcagcggaggcgacaccacgagatacgcggccgccgttgtcgccagcgcgccgccgagcaccgcccgccgcgtcattcgcggctgtggccttgccgcagccaggatggaatcgccgcgccgcttcagcaggttggcgccggccgggccgagctgatcccacagcaggctggcctgcgccagcgcctccgaatgggcgctgctctggtttccccagcgcttggtttcctcgatgtcccgccgggtggcctgccccgaaccgagccgctggacgcgcgcaagcgcctcgcgctcgatcgcggtcagctcctccggcggttcgtcgctacgtgtcatcgatcgggcgtttctttcagaatcacttccatccaaatgcgcaatactctctgacgttctcacatcaggacgtttcccgcggtgccggaccgaaacgcctcgtgacttttttaccaaaccgcttggcgcaatgttcgagcgcggctttcaactcgagctccaccaaccgctgggaaaccccaagacgctcggcgatttcccggagcggggtaccctccaggcgggatgccagcaggatcgtccggcggcgcggcgtcagctcctcgagcacctgctcgaggcgcgcaatctgctcgcgcgattcgacctcccgctccggcccgggcgccgcgtcgacgatctcgagcatcggctgcacctcgaaccgcttgatccgccgcgtctcctggcgctcccggctgatcgcaagattgagcgcgctgcgcagcagatagccgatcgggctgtccaccacgcccgggccgttcttgtcacgaaggtgcaaccaggtctcgtgcagggtttcgcgcgctttctcgtcgccgagccgccttgcgaggcggcggcgaagctcgtcgtagcgctcgacgagcacctgcctaagcgtcgtccaggtggtttccgtcatcgcgcaaccagtccctggcgctgcggctcacgtgcagcgcagtcgccggtctcggaaggcggccgcggcgaaaccgccatcatgacgggctgcggcatgtccggtggcggcggccggccgatcacgaccgcacgcaacatggcggcgatcgcccggtcgcgcgcgctgtcgtcggtcgagccaagcagttggggctgcagcacttcaccgccatgcccgatccagaacctgaacttgatccgatatcctcccggcgtggtcagcgcggatcggcagaatgcatcctcgacgctgctctggacgaccgcaagatagggcatgaagctgcgcatcgacgtggtctgcggcgtggtggccgcgggcacgatcgtgaaggcgttggtcgcggcatagaccgcgaccaggccggtcccttcgagcagaagctgcaaagccatgtcaggcgccatcgatcccttgacggcctgtgcgcggcgtcctccggccagcgtggcgtcgtagacgacctgcagacctgtcgccgcgctgtaggcatcgagcgccgagaccaagggctgccccccgatatcgaagtcgaccgttgccggcgttcgaactgattcaggaccccccgccatcgctaccgtctggatattcccggcaacgagagtgcctatgaccagggcgagaaagcgctgccacatccgatcatgctttgcgcgcagctcaatcttccgaccaacaaagtgcatgaggcgccgccttgatccccaagccccagcggaacagcacgatccatcggcgatcgatacagccgttcgtcaagtcagcggcaggcgcaacatagaaagagattatgacaatctgctaacacgggcgtcgaccgcgcaagaccgcaccttgcgccgcagccggcgccatccgatcacgataccgctgatcgagacgaccgtgccgaccacggacagcagccacaccacgacgtcgcgcgccggccagatgcgcagcagcaacgggaagtcgaggctgtgcagcgcgttgaacagccagcgatacgatcgtcggctgtcgtcgctgcggtcgaggatctcggcggtgaccggagagatgtgcagccaggtgtgggccggatcgtcgaagccgatccgcaacaccggaagctcgcgctgatgatgcagcgtgtaccaatacgcatccggctcatcgagttgatgcaccgatgtcatcgcagcgcccggcatcgcgcgtcgggcggccgcgatgatctcgtcccgcgggagcgccacgggcgcgccggttgccggatcggcgaggctgcgacggccgctgctgtcgtcgagcaacatcagcgggcgtccgccgatccagacgaagcgcgcctccactgccgatatcgacggcggcgaccggaactcggcgacgatgtcgggcgcatcatggccgctgtagccggtcgcgatctcacgcgtcatgccgcgcccggagaacgcaccgccgggattgagcgacagccagccgctgaacatccaggtgaagacgaagatgccgccgacgaggcccgcgatatgatgccagcccatccagccgcgatagggcgagacggcgccatcggcgtagcggcgcgtcagccgcagccggagaatgccgatccagaatccggtgaccgcgaccacgaggcagatgcccgagatccacagcacgacgtcccgccacagcgggccgtccttgcgcagcacggtcggatagatccagtgcgggatcgatccgagccagttccagatccgttcgcgccgcgtggtatcgagcgcgatctcgccgctgcgcgcggagacgtagagctcggtgccgtcggcatcaccgaggccgatccgatagagcggccgcaacggatcgaagcgcgcggtgaccgaccattgatcgcgcgtcaccgtgtcgagcaattgtggctgcgccgcatgcgagtgatggccggcgatcgcaagcgcctgatccggcgtgatgtgatcgatcacgcggccatcggtcgccgagatggtgccggcggcgcccttccagccggtcacgcgatagaccggcgtatcatccatcatcgagagccgcaggtcgcgcggataatgctctgcgcccgcaatcgccatcgcgcgatccggcgcgacctgcaccttgttccagagaatgagcgggagcgcagcgaggcgctcgccgtcggtgaggcgtggaaacgcgacatacatcatgacgaggcccgagatgaaccacatcgcgaacaagaggcacgtcgcaatgccgatccagcgatggacgacatagagccaccgccgccctcgccggatcagagccttgcgcatggtcagaacttcacgttgacggacagttccgccgtgcgcggcatgcccagcagccactgccccgtgccgttcgcggtcaccgcgtagacctggtcgaacagattgtagacacggaaggcaaccgtcgtgcgatcgtccggtttccacctgatgccgccattgaccacattgtagcccggccgcctctgggtgttggcgagatcggagtacatcgcgccgacgatctgcacgccgccatagaccgaccagttgggcgcgaaatcccaagtcagccagacattggagacctgctgcggcacgttgaccgggacattgccggcatagctgacgatcttgccgccgaccagctggctgttgttgtcgtatttggcgcgcagcagcgccgtattggcgtcgatgcgccagccgtagtcgagcgcgagcccgaccgaggcctcgacgccacgcgatgattgctgcccgacctggagcgagtatccgggattgccgggatctgcgatgagcagattgttcttgacgatctcatagcccgccagcgtccactcgccgcgtccgcccaggaacgactgcttgacgccgatctcggtctgcttgccgctggcgagctggaagttcttctgcgaagcagacagcgagatgagattgccgaccgggtcgacgccgaccgcatactggccgtagagcgcgaggtccttgatcggttcgtacacgaggccggtgcgccagctggtacccgacagcgtggtttcgaaactgttccccggtatcttgtagtcggtgcgatcgatctcgggtcggtcgtatcggacgccggtaacgagcgacaattgatcggtcagcttgagccggtcctcggcgaacagcgcgtattgattgacgatcgaattgaagcccggcgcggtcgccgtcgtggttgcaaaaaacgacccgggatcgaacacatacgggttcaccgacgacgcgccgccatagggtgagttgttggtgtggaagaactcgatgtgattgacgtcgaagccggcgacgaactggttcgcaaggccgaagatgtgaccgctgaacgttgcgtccatccggttaccggactgcttctggtcgtggaagatctcgatatagctggagcggtcgatcagctgcgtcttcggattccaggtgtagttctcgatgtcgcgccagtgccgctcgctggtcaggtaataaagcgtgttgttgaccttgatgccgtcggcgacatcccactcggtcttgaactgggtccagctgtcctggtagcggatcgcgctgtcggaggcgttgtagttcttgaagcgcagcgcgtcctggatcgcgccgttgatcaacggcgtgccgaaatagcgcgacgggctgcgatcggcataatcttccgacagcgtgaaggcgagattctccgacgcctgcacgcgcacggcggccgacaccgccgcattcgaggtcttgtcgcgatcgacccagccgttcgacatgttgccggtggcgttgatgcgatacgacacattgggattgatcggaccggtgctgtccaccgacagccgccgcgtcatgttgctgtcgagcgaaacctcggcctcgttgtagggcgtgttctgcggcttcttcgggatcacgttgatgacgccgccgatcgcgccttcaccgtacagcaccgaggccgggccgcgcagcacttcgatgcgctgcgccgaccaggtgtcgtaggggaacgtcagggtgccggagccgatatagaagcgcgagccgtcgtagagcgtcatcaccgagttgctgccggcaaagccgcgggtgctgaacgacaggccgccattgccaggcgcaggcgttgcgatgaagccggccgcgttctgggtaacggcatcgagcacactatgctggccgcgttcggcgatggtctgcgcggtgatgatctcgacgctcgccggcgtctgcagcggcgtcaggttgaggcggctgccggtgccgccttgcgtggtggcattgagtgtcggcgaagccgcccccgatgcgcccgacgctgcggcgcgcggcgcgccgccggctgccgcggccgttgccggcctggcgcgctgccgcgcggtcgcggtgttgctgcttcgcgccgcgggtttgggcttcgcggatgccgatggtgcgacctcgatcggatcgagcgtggtgggtggagctgtttgtgctgaagcttcagccggcagcaacaatgatgacaaggagcagacgagaccgaggcgccagttgcgcgcaacggaagaagacgaggacatgaaacgactcgcggtaacgtggcacgtcaccgcgaacgcggactggcgcattgccggaaaggcagtgctccgatcccaccaggacgcccccgcccgatgtgctcgcgtgtgaccacgactgacggcaggtctcctggctcacgggtcatcgcctgttgacgccttcccgagctgagtagcccagtggcaaattgacgaaaggctcgccgtttacagttgcggggacagctgcggcattgggttaccctcgcaccgcattcccttttgatccccgaagggaaccgtcgccgaaattgataggaggtgccggctgggctgtcaattcgatgcgattgtcgcacgcatgctttgcgcgattgtgctgcggcgatgacacagccgtttgctgacgcggaggcttattgtcccgtcatcctgcttcgacgcatccctgcatgatctcatcgatctcggcacgcgagagcgctcccatctcggcgatgaacactagccgcgtgcgcggtacaccgggcgccgggacaccgcctgcagccagcttcgcgcggccgccggcgagttgaaataccgtcagccgtccgggctgctccaccgtctcgaacaatcccttcgcccgcgccagcttcggcgccagtttgccgatcgcctgctgcaggcgcggcagaagcaccggccgctccgaggtccaactcagcgtctcgaagcgatcggtcgccggccgtcgcggcgcgggctcgcgcggcgccggcacatgatcgagatcagccggaaacagcagcgcggccggcacctcgccatgcagggtatcgaccaccacggccgccggacgcaccgtccgcacggcggcgcgaatcgtggcgcaggcggcggcatcggcgagatccaccttgctcaacgccaccacatccgccgcccgcagctgcgagcgcagcagtgcatcatccagcgctgtcaccggttgcgtcgcatcgaccacgcagagcaccgtctccagcggcgcctccctccagatcaccggatccatcagattgcgcacgatgtcggcgggatcagcgatcccgctggtctcgatcacgatgaactccggacgcggatcacgccgcagcagggttgcgagcgtgcgcagcaggtcgccctccagcgtgcagcagatgcagccgttgctcaggctgaccacgccatcactggcgccggcgatcaactccgcgtcgatgttgatcgcgccgaaatcgttcacaacggcggcgatgcgcttgccttgcgcatgggccagcagatggttgacgaccgtggtcttgccgaccccgaggaagcccgcgaccagcaggatcgggaccggcacgtcagcccccggtgaccggccggcgcaccggccggccgggccgcgccgcgacatcgagcacgccgtcattgatcagcggctggccgctgaccacgaggtgccgcacaccttccgccggacggttcatcgccgagaaggtcgcacggtcgcttagcgtctcatagtcgaacgcgacgatgtcggcgtcggcgcccgcctgcagcctgcccttggcgcgcatcgccggcgtgctcgccgacaggatctcggccggaatcagcgcgcatttgcggatgccctcgagcagcgacaccttcttgcgctcgcgcacccattcgcggatgaagcgggtgaagcagcccgccgagcgcggatgtgaggtggcatcgtccggcagcggccaggcgtcgccggtgtaggggcggccgtccgacagcgtccacggcatcgcgtcggaggcgatcgcaccgcccggatacaacaccgccatgtcgagcagatcgcgatgatgcgcgttgttctcgatgtcgagcacatgccacagcaccagcgtggagggctcagcggcctgggccgccagcaactcctcgcggctgccgaagcgatgcccgtcggtgacgcgctgcaccgaatcatagccgaggccgttgcgctcctcgaatttgggatcgctgaagaaggtcgccgccagcacggtcgagccggtgccataaggataagcctccaccgtgatcggcaggccctgcgcctgcgctttcgcgatcagcgcgacgcagcgctcgatgtcggtcttgctcgacgagttgaagtggcagatgtgcatatgcgcgccggtggcgccggcatagccgatcaggcggatataggcttcggccgcgctctcgggatcgatccgcgacatgtaggcgacgtgggtgaaggtcggcaccgcgtgatcggcggcgagctggcacaccgcggtcaattcctgcacgccggcgccgggggcataggcgttgagaatgccgatgccgatgccgccctcgttcaggccgttggcgagacgctcgaggatgccggcgacctcgccgtcggtcgccacgttctcgatccagcggcgatcgcgcatcgccgcgccgaacgattccagcgagctttccgaattggagccggtcatcgcgccgatccgtgcgaaggcccagttggtcgcggcgccgtaattcagcacccgccccttctcggcctggcgcttgtaccaggatgccaccggcagcacgccggcctcgaggtcgagcgatgtcgtcaccccgtcgaacgcctgcatgcgatcggccggaatggtctggccatgcgcgtgcaggtcgatgaagcccggcgcgactacgaggccggtcgcgtcgatctggcgctcggcgccgccaaggccggtgccgacagcagcgatcttgccgtcgaccacggcgacgtcaccgatcgcgtccatcccgctggccggatccaccacccggccgccgctgatcaccaaaccacccatctcgccactccccgcattgcccgaaaccgaccggtctcatttcgggcacagagaagcgcatcacacgcatcacagcaaccgggccagggttgtggcgacatgctctggcggaatatccgccgcgccgtgacggcgattgcaggggagccgctgcctacgttccggttgcacgccgcgacggcaaccctcgccagagatcgttgcccggcttgatgcggcccgccagcagtttcggcggcgtgctctccttggcgatcgccgcctcgaacgcacgcttgagcctgacattgtcgatctgcgccaggaatcgccgaatcacggcggcccgatccactccccggcccgagatcgccgcgcacagctccgcggtcgtcctgcggaagaagtggaaggcatcatcggccgcaccgccgagccggtcgacctcgccggcgacgccgagcgcgtggatccgatcgtcgtcatcgagcgtcacggcaaagcgcagcaccgcaagctgccaggcacaaagcagcctgctctccggttcgctcaccatctcgcgcatcagtcgaacaccccgcgcgactgagctgcctcggttgtcgagggaggtccggcgcggcgcgactatccttgcgcgacaataggttttcgaggggagcgcgccggcgatcgcataggaatcgcatagacggagcgcgcggagtccgatccgctcagatgccctcgaactgcaagcgcgccagccgcgcatagaggccgcccacggcgaccagctcggcgtgcgtgccctgctcgacgatcctgccctggtccatgacaaggatgcggtcgcaggacagcacggtcgccagccgatgcgcgatgaccagcgtggtgcggtggcgcatcagttcctccagcgcggtctgcaccagcgtctcgctctcggcgtcgagcgccgaggtcgcctcgtcgagcagcagcagcggcgcatcgcgcaggatcgcgcgcgcgatcgcgatgcgctggcgctggccaccggacagcgtcaccccgcgctcgccgagctgggcgtcgaagccatcaggcaggcggcgcaggaattcggtggcatgcgcgagctcggcggcgcgctcgacctcggcatcggtggcatcggggcggccgaaccggatgttctcgcgagcgctcgcggcgaacaccacggaatcctgcggcaccagcgcgatccgcgcccgcacctcggccggatcggcctgccggatcggcacgccgtcgagcgagatggtgcccgatttcggatcgtagaagcgcagcagcagatggaacagcgtgctcttgccggcgccggaggggccgacgatcgcgaccttctcgcctgatcggaccgagagcgacacgccgtcgaccgccagcgcatggggccgggtcggataggcgaagctgacattatcgaagccgacatcgccgcgcgccggctgcggcagcgcgcgcggcgagggaggcgctgcgatctgcggcctgacgcgcaggatctcgaacagccgttcggcggcgcccgacgcggccgagacctcgccccagacctcgctgagctggccgaggccgctggccgcgaaggccgtatagagaatgaactggccgagccggcccggactgatggtgccgaccagcacgtcgtgcgagccgacccacaggatcacgacgacgctggcgaacacgatgaagatgacgatcagggtcagcaccgcgcgcgccttggtcgagctgcgcgcggcctcataggcctgctcgacctcgcggctgaagcgcgtccgggcgagccgctcgccggtataggcctgcacggtgcggatcgcgttgaccagctcggacgcgtaagcgctggcatcggccagcgtgtcctgggcgttgcgcgacagccgccgcacccagcggccgaacgcgaccagcggaatcacgatgatcgggatcgcgagcagcacgaagccagacaaccttgggctcgtgatcaccatcatcgcggcggcgccgaagaacagcatcacattgcgcagcgcgatcgagaccgaggcgccgaccgcggacttgatctgcgtggtatcggcggtgagtcgcgacaccagttcgcccgagcgggccgaatcgaagaacgagggcgacagcgagatcagatgcgcgaacacgtcgcgccggagatcggcgacgatgcgctcgccgatcgtcatcacgagatagtagcgcgaggcgctggcgcaggcgagcaccgcgaccaccgcgatcatcacgctgaaatagctgttgatcatcgcgatgccttcgggcgtgaagccgaggtcgatcatccgccgcaccgcgaccggcacgaccagcgtggtgatcgccgcaatcgtcagcgagatcagcgccaggatcgcccgccccttgtagcgcgccacatagggtgcgagcgcaagcagggggcgcaaacgcgcacggctcttcgccggctccgcgatctggctctcgatcaaggcttcctcatcgagcagcgcgtcgcgcggaggctcgggggcgcctcgaggggtctcaagctgttcggctgcactcattattcttagaccggttctatcgccccccacataggcccgccgacccccggctggcaaatccggtaaagtcccaatgcggtgatgggcttaagccctttcttggcttgttttgggggtctccatgggttatagagccgcccaaatcccgtatcccagacatcttgagacgggcgccggcgcgccgaaggaactgtcatgaaagccgatattcatccgaattatcatacgattaaggtcgtcatgaccgacggcaccgagtacctgacccgctccacctggggcaaggaaggcgacacgctgaacctcgacatcgatcccaagtcgcatccggcctggaccggcggcacccagcagctgatggaccgcggcggccgcgtctcgcgcttccagaagaagttttcggggttcctcaagaaggactaaagtccgcttcgagattgccttcactgtcgaatgcaaaacgccttcgtttcggaggcgtttttgttttggggggcggccgtcggtcggcagagaatatgcgacgcgcttgtgcccaccatcgtcgtccctgcgaaagcatggccttcgccgggacgatagggagtgtgtggcacgctcgcgacgtccagagacgcagggcttgcgttcaaccggaacagacaacctgcggcaggtccgacctagcgcggacgttttggtcgcttgagctcggcgaccttgaacttcccagcggcctgcagactgctgcaaagccaccaggcccgattgcgatactcgcccaggaaccacttggtctcgacgcaatccacataggatttgtaggtcagattgtcgcggcatgttgccgagaacggtccataggtttgtccgccacccgactcgctgcaccccacccaggggtccttgccgtgcggcatgctcgactcgcaaccaccattgcaattgctggcgaccttctccagcgcggcaatcctgcccatcacggaatccggcgacggcgcgcgcgctgacgatgacgacgtctgagcggttctcgatctccggtgcgatgcccctgcggtcgccgcctgcgtcggccgatttggccgtaccgccggcttcggcgcttcgaccgtgatggaaggaagcggcttggcggaatcggtttgtgacgccgccgggccgcacagcacgacgctcgacaagacagcggcagctgaaggcgcgacaaagcgtgacgacaatctcatgacatgccctcccaaatgcgggacggaacagccgtcccgagaagcgcacggtaccatacatcccggattgcgctaccgagggttgaggatctttccgccgattaccagccgtttccgagattgatgaagacccgccctggatccacggaagcagctcgtagcgcaggccggcgaagccgttgtcgccctccttgccattgatcgacaacgcctgcgcctaacgatccccgaacgccagccgtgcgccgagcgcgaccaggatgctgccgccgatccgctgcatgatccgctgcgaggtgcgcgagcgttgcagcttcgacatcacggcgctggcaaagaacacgcagacgatatcgaccgctgagaaggtcaggttgaccgtcgtaccgagcaggagcagctgggcccagaccggcaagcttgccgtcgcgtcgacgaactgcggcaggaacgccaggaagaagatcgcggttttcggattgagcacctcgacgacgatgctttgcgcgaaggcgcgctccgcggagagcggcgccagctcggggcgcctcgtcgtgttacgatcacggaacagcgacaggccgagccagaccagataggccgagccggcgagcttcatcgcggtgaatagcggcggcaccgcgtgaaacagcagtgcaaggccggcagccgcggcgatgacatggacatagccgccgagatgcaggccgagcgaggccatcagccccgcgcgccggccgcccgcgagcgtgcgggcggcggcgtacagcatggccggccccgggatcagcgcgaaggtcgcggtcgtgatcgcgaaggcaaggtacaattccatcgtgtgctttatctcagttcgccggaatcagcgccgcgacctcacggtcatgaggattgtcgctttcgccgagccccgcgatgacgccggcgcgatcctcgagcttgcggttctggctcatcttcttcttggcgtcgatccggctgatcggcatccggaagccgacgatgccgcgcagctgcgccttgatgaaatcatcgggcgcatcgctgacctgccaggcttccttgcgcgaactctcgtgcagcctggtcaaccgggtgacgacgtcgagcagacggtcggcatcctcgaagaactcggccaccccataggcgtgcacggcgacgtaattccaggtcggcaccaccttgccgtgctcggccttggtcacataccaggacggcgtcacataggcgtcgggccccatgaagatcgccatcgcctcgccgacagcgggcagcttccactgcggattgggccgtgcgacgtgaccgtagagcgtgccgtaatcgccctcgtcttcactgaggatcagcggcagcggcgtaccaatcaggccgtccgcggtcgcggtgaccagcgtcgcgagccgtgaggcccgcatcgcggcgtggatcgggccgagctcttccatcttgaaatgcagcggcaggtacatggacagacctcttcgacctcatcgattgctgctcgcacaatagcgcagaagtggcctatgataagagccactttcacgacctgcgatagaagcggcaactctcagcagctcggggcatgtgccatgaccgatgattttcggtactcgatcgatctgtcgatggcacaggcgagagccgagaaggtcatcgaatgcatgaagcggctcagggaccagcacgatctccgccgcttcgaatacaccaaccacctccgggttgctccgacggagataccccacagtcacccggtgctaacgctcaacaccgcctcgcacgatcccgaggcgatcctctgcgaatacctgcatgagcaaatgcattggtatctggtgagattggactgtgcgagcgaaggcgcgccagtgatcaccgcgctgaagcagcgctacccggaagcgccggtcggatttccggacggcgcgaacgatgaatactcaacgtacttgcacctgctggtgaactggctggagatcgaagcggcgtcacaggttatcggacgcgagcgcgtgatggagatcgtcggccgcaagcactattaccagtggatttatcgcaccgtgctgtccgaccgggacagcctcgaagcgatgttcctgacgcacggcatcgtgccgatcgcgcccgccccggtaacgatccctctcgctgatcctactgctcgaacgccgccttgaggcggttgagctgcggcaccagcgggttgccgatcgacgagcgatcgggcgccggcgcgtggatcgtggtgtcgaggcggcggacgcgcgcctgcaggtccatcgagcgggcgatcagctgctgcaattgctcgggcagcttggtgaccatgtcggccgggccgggatcggcggccgacagcttgaccttggtcttctcgcgattggcctgggtcagcgtcatctcgccttccttgactgcgcgatgcagcagcagccaggacgcgagctgcatcagccgcgtggtcaggcgcatgctttcggtggcataggtcaggctcacggaccgttccagcgccttggcctcggctcggccgtcgccgtcgagataggccgcggtctgctcgaccaggtccatgccttcccggaacagcacgccgaatgccgcagaattggtcagccgttcactgaacagcacaagcccggcttcgttctgggaacgatcggccatggttaacgccctcacaccatcgtaacgcccgccggcatctcgcgcgccagcttatgatgaacaaatcattgcgcgggcgcgccgaagagtccagccgcaaccggatttatggtttccagccgtggacgcaacaaaaaagagccgccgtttccggcggcttttgaagttgataacagggaggcgtcaaacagagtggacaggagccactcggtgtccaaacgaggacaatgcagtcataatcgagaaagcttaaccgatcgtaaatgaacggttttcttcaggctttgtttgccatgtcggccattgacctagtttgagacaggcccccaacgagtcgtcccggcgaaggccgggacccataaccaccaatgcccgcgttgcgcgcggctgcggccagccctgcgcgactagagacagctgtggttatgagtcctggatcgcgctcgctttgctcgcttgtccgggacgacgcgatgtgaggtcggaagctacgacttgaagaacgcgttcgcggcatccttcgaggcgcgcttcttggtcatcgcctctttcaagcgatcgacttcggtcatgagcagcgcgatgcgttcggtcaattcttcgaccgacagcagcgagagatcctgtccgatctcgtggctgatcttcttccgcggccggtcctcatcctcaatcggcatgtgtcctccccgcgatgtgatctggctccctgtgcggagaattttgcagtgactttcgtgtgcgcgcaacagccggcgcgaatgccccggccgccgacgcggcatggcacgccgctgcgagcgcggactgctcgctgacaaaagcgctcccggaaagccggctgtcagagaaccgggttcggggcctaacggcgtttcgcttcgttgcaaaaggcggtatgccatccgccaatcctcttctccgaccagggaccagccatgaccaacctgcccgcgcaaatgaccgtcgttgccatcagcaagcccggtggcccggaggtgctggtgccggagacccgcgcgctgccggtgccgaaggccggcgagatcctggtcaaggtcgcggccgccggcgtcaatcgtcccgacgtcgcgcagcgctccggctcctatccgccgccgcccggcgccagcgacctgcccggcctcgagatcgcgggcgaagtggtggcgctcggcgaaggcgccaagcacaagatcggcgacaaggtgatgtcgctggtcgccggcggcggctacgcgcaatattgcatcgcgcaggacgcgcaggcgatgaccgtgccgccgcagctcacgatgcaggaagccggtgcgattcctgaaacgctgatgacggtgtggcacaatgtgttcgagcgcggcgcgctcaaggccggcgagacgctgctgattcacggcggctcgtcgggcatcggcacgatggcgatccagctcgccaaggcgttcggcgccaaggtgatcgtcaccgtcggctcgcaggacaaggccgacgcctgcctcaagctcggcgccgatcatgcggtcaactacaagaccgaagatttcgtcgaggcggtgaagaaggcgaccgacggcgccggcgccaacgtcatcctcgacatggtcggcggcgactatatcgaccggaactacgacgccgccgcggtcgagggccgcatcgtccagatcgcgttcctgtcgggaacaccgaaggcaacggccaatttcgccaagctgatggtcaagcggctgcaccacaccgggtcgaccctgcgcccccgtagtaatgcggacaaggcggcgatggtcgcggcgatcgaggcaaaggtgctgccgctgctgcgcgaaggccgcgtcaaaccgttgatggacagcacattcccgctggaaaaggccgccgacgcgcaccggcgcatggagaccagcgaacatattggcaaaattgtgttggcggtttaactctcgcgactggagcagaggcggaaaccctttgattcccttcgctttcgtgtcatttatcgcgccacctccgggccggtcgccgggcccgggcagtttgtcgatcgcggagtactgacattgcgtctgatcaggtgccttgcgctgctggcgctgggcctcatgatgtttgccgctgcgcctgccgcgtatgcgatcgacgcggtcagcgtgcgcagcgatgcgccggcgatcgacctcaccgcggtgctcgaccatcagcgcagtgaaaccgaccgcatccaggtctccaccgcaccgggaaccgacggcatcgtgcgccgcatcgaagttcgcgcccgcgagggcggccagaactgggtggtgttcgcgctcgccaacaacaccgacgaccagctcgaccgcctgatcgtcgcgccgcattaccgcatcgtgtcgtcaggcctgttgtggcccgacctcggcctgtcgcgcatcgccaccatcacgccgtcggtcggcgaccgtccggagcggcaggagagcccgaccgccgacgtgttccgcatcacgctcgatcccggcgcggtcgtgacctatgtcgcggagctgcgcaccgacaagctgccgcagctctacctgtgggaacccgacgcctacaaggacaaggtcaactcgttcacgctgtaccagggcatcgtgatcggcatctccggcctgctcgcgctcgtgctcacgatcttgtttgtggtcaagggcagcatcatgttcccggccgccgcggcgctggcctgggcggtgctggtctatatcggcgtcgacttcggcttctggggcaaggtgctcgacatgtcgaacaacgccgagcgcgtctggcgcgcggcgggcgaggcgatcctcgcggcgacgctgctggtgttcctgttcgcgtatctcaatctcagccgctggcatgtccgctattcgcacatcacgatcggctggctggtcttcctcggctcgctggtggcgctggcgctgttcgatcccgcggtcgcctccggcatcgcgcggatgtcgcttgtcatgatcgcattcgccggcttcgcgctgatcgtctatctgtcgacccacggcttcgaccgtgcggtgctgctgatcccgacctggttcctgctggtggtctgggtggtcgcggccggcatgacggtcgcgggttcggtcaccaacgacatcgtcggtccggcgctgctcggcggcctggtgctgatcgtgatgctgatcggcttcacggtgatgcagcacgccttcgccggcggtggcgccaccaccggtgtcgtctccgatgtcgagcgccgcgcgctggcgctgaccggctccggcgacctgatctgggactgggacgtgtccgccgacaaggtgttcaccagccccgagaccgaggccctgctcggcctcaagcgcggcacgctggaaggcccggccgcgaaatggctcgaagtgctgcacccgctcgaccaggaccgcttccgcgccgcgctcgacagcgtgctcgaccagcgccgcggccgcctggtgcaggatttccggctgcgcacgcccgacggccatttcatgtggttcgcgctgaaggcgcggccggtggtcggctccgacggcgaggtctcgcgcgtggtcggcaccctcaccgacgtcaccgagttcaagaactccgaagagcggatgctgcatgactcggttcatgacaatctgaccggcctgccgaaccgcaagctgttcatggatcgcctcggcgcggtggcgaacctcgccaagaccatgccgaacctgcggccgaccctgatggtgatcgacctcgaccgcttcaagcaggtcaacgattccgtcggcatcgcggtcggcgattccatcctgctgacgctggcgcgccgtctgacccgcatcctcaagccgcaggatacgctggcgcggatggccggcgatcagttcggcctgatcctgctgtcggagcaggaccctgcgcggatcaccaatttcgccgagaccatccgcaagaccatccgcgcgccgatcgcgttcaacgaccgcgagatcttcctgaccgcctcgatcgggcttgcgctgtccgacccggcggcgccgctgaccgacgagatcatcaaggacgccgagcttgcgatgtatcattcgaagcggatcggcggcgatcgcatcgacgtctacaagccggcgatgcgggcgcggaagaccgaccgcctgacgctggagagcgacctgcgccgcgccatcgagcggcaggagatcacgatcctgtatcagccgatcgtgcggctggaggatcgcgcgatcgcgggcttcgaggcgctggcgcgctgggaccaccccaagctcggccggatgtcgccgtcggaattcatcaacgtcgccgaggagaccggtctgatcgtcgacctcggcatgttcgtgatggaccagaccgcacgccaactcgcggtgtggcagcgcgcgatgcgggcgcgcgagccgatcttcgcctcagtcaacgtgtcgtcgcggcaattgctgcgccacgatttgatccacgatatccgcaccgtgctgtcgcgctccacggtcgcgcgcggaacgctgaagctggaactgaccgaatcgctggtcatggagaatccggagcacgccgcccagatgctggcgcggattcgcgagctcggcaccgggctgtcgctcgacgatttcggcaccgggcactcctcgctgtcctatctgcagcgcttcccgttcgataccatcaagatcgaccagtccttcgtccgcaccaccagccgcggcactcgcccggtgatcctgaaatcgatcatcgcgctggcgcacgatctcggcatggaggtggtcgccgaaggcgccgagacggattcggacgccgtcgagctctaccagctgggctgcgaatatgcgcaaggcttcgccttcggcgagccgatggacgccgacgccgccacgcgcctgctcaccgaggaacggctggaagccgcgagttaacgcggcttcggcatgcgcttgaacttgacgctcttgccgtcggcctggcgggtggcgatgtagccggcctcgatgcaggcctcgcgctgcggcatcttctcctgcgggctgcgcagggtttcccaccacgacgcccggtgcgcggcgcgcggcagcgccgcatcgatgatcgcctcgatctcgtcgaaggtcagcacgaattccggcagatgctgcttcttcagataatcccgcagcgcgtcgtagtcgttcacgtcatcctcaaggctcagggttccggcaaccatccgttaacccattcggcgaccgctgtcgccatttaaggcgacgacaagatttcccgatgcatgacggcgcattggagctgaaaatgccatttcgacggggaaacgaagctaggcggcgctggaggctatcggcaaagctgctgatcgcagcgtcgattgccaccgtcctcggcttctccgcggtctgcgccggcgtgatgttcgacatgcgccgcggcgaggaagaactggcgcgccggacccttgagaatctggcgtcgggcatcgaggccgacatcagccgcaacatcgagctttacgacctgtcgctgcgcgcggtcgccagcaatctggaaatgccggagatccgcaatgtcagcaaggagctgcgccagctgatcctgttcgaccacgccgcgaccgcgaagcatttcggcgctatccaggtgttcgacagcaaaggcgatctgaccatcgacgcggcgagcctggatccgcagttggagaaccgcagcgacgaggagtatttcaccgtccatcgcgaccatcccgacaccgggctgtatatcagccggccgatgctgcatcgcggcgcctacgccatcgtgctgagccggcgcattgtcggcgaggacggccgcttcctcggcgtcgtggtcggctcgatccgcttcagctatttccacgacctgttcggacggctgaacctcgtgcccggcgacaccatcaccgtgctgcgcaacgaccgcaccatcatcatgcggacgccattcgatctcgacgtgatcggcaagaatctcgcggagcaaccggactggaaggccgacaagttgaaggccggcggcgcgttctcgggcaagggcccggtcgacaatacgccgcggctctatgtccggcgcggcagctccgggccgctctatgtggtggtcggcaagccgctcgcggccgtgttcaacctctggcgcaccgaggccattcgcatcggcgcgatcatggcgttcctgatcctgttcgtgctcagcgcgacgctggtgctcgcccgcgagatcgtccgccgcgccgacgccgaggacaggctcgaggaaatggcgaccaccgacgcccttaccggcctgaagaaccggcgcaagttcgatgccgagatcgaacgcgaatggcgccgcgccggccgctacggccagccggtcgcgctgttgatgatcgatgccgatcatttcaaggcgtacaacgacacctatggccatcaggccggcgaccaggtgctggtcggaatcgcgatctgcatttcggatgcggtacgccgcgccggcgattgcccggcgcgcttcggcggcgaggaattcgccgtgctgctgcccaacatgaccgcgctcgaggccttcaacctggccgagaccatccgcggcaaggtccagcaatggtgcgagggcgagctgagcacgacggtgagcatcggcgttgccagcatgcgaccgcttgcaggccagcaatgggccgacctgatcgaagccgccgacaaggcgctctacgccgccaaggccaacggccgcaaccagtcggtggtggccaccacgacgaagatcgcgctggtggcgtgaggacgaagtttgccgcggcaagatgcccggctgcatacgcaattgagttcgtcgcgcaatccctccacatcgtcgtcccggcgaaggccgggacccataaccaccgcatgtgattgtgaatgggattgtggccgcagcgtcacgcaacaacgagcattcggggtaatgggtcccggccttcgccgggacgacactgagaatgtggcaggtcccgtggctctcgcggcgcgctgcgttcgaggcttgccgccatcatcgccgcaggcaaaaaaggcggctccgccgcgtcagccgccagctcagccccgccgcttcttctttggcttcttgccgaatttcggcttcgccgccacgtccggccactgcgcaggtccggcgtggccgggcttgccccgatgcttctttttcttgccgaacctcggctcatcgccggatgtcggcctggcgcccttttcgttccgatcggatcggaacggggctctggagtcgcgccttggggcgttgtcgtcacgcgatctgccctccgcttcgcgcgaaaacgctctggtctcacgatccggcttgccgcgtcgccttgctgcgtcgtcgctgcgcggcgcgccgtgcccgccgtcgtcttgatcgcgccaaggctcgagcctcggcttgcgcgccggcttctccgcgcgcgcttccccctgcggggcgtccgccagcggctcgatgcggatgctgtcttccttgtccggacgcttgatcttgacggcgaaggaatccgcgacccgcgcggcgatctcgaattcggtcgtcgtatccatgatcttgatggcgccgatgtcgcgcttgtcgatgccgccgcggcggcagatcatcggcagcagccagcgggcttcggcattcttgcggcgcccgatcgcggcgcggaaccagacggtggcctcctccatgccgtggcgtggagacttgccggtcttcgtgcgcggctcggcgccacgctcctcgcggcgcgaggcgcgatcgccccggtcgcggccccgcccctcgccgggatcgagaatgtcttcgggcgcaggcagccgtgcgcgatagagcctggccagcgccgcggcgaccgcctcgggcgaccgttcggcgagcagggcctgcgcgagggccagatcgtccgatgtcgcctcctcggcaaacaccgcatccttcaacaggcgctcatggtcgagcttgcggatctcgtcggcctgcggcgcggtgccccagacgatatcgatgccggccaggtccagcagaagctcggcgcggcgccgccgtgccggcggcaccagcaggatgctgacgcccttgcggccggcgcggccggtgcggcccgagcgatgctgcatgacctccgggtctttcggaaggtcggcatgaatgacgagatcgaggctcggcaggtcgatgccgcgcgccgcgacgtcggtcgcgacgcacacccgcgagcggccgtcgcgcaacgcctgcaacgcctgggtccgctcgttctgggtcatttcgcccgacaatgcggccaccgagaagccgcgctccagcagcgccgcctgcaagtgcctgaccgcttcccgcgtgttgcagaacaccagcgcgctcggcgcctcatggaagcgcaacacgttgacgactgcgtgctcgacatcgtcggccgcgacgcggatggcgcggtactcgatatcggaatggccgccctcgtcacccgcgacctcgatccggaacgcctgctgctgatactgcttggcaagtgctacgatgccgcgcggaaacgtcgccgagaacagcagggtgcgccgggtgtccggcgtggtttcgaggatgaattccatgtcttcgcgaaaaccgagattgagcatctcgtcggcctcgtcgagcacgacgacgcgcaatccggagatgtcgagacggccgcggcgcaaatggtcgcacaaccggccgggcgtcccgaccacgatgtgggcgccttgagccagctcgcgctgctcgcggcgcggatccatgccgccgacgcaggacacgacgcggccatcggcatgttcgtaaagccaggcgagctcgcgctggacctgcaaggcgagctcgcgcgtcggcgccacgatcagcgccagtggcgcgccggccggctcgaaccgctcggcgtcgccgagcagatcccgtgccatggccaatccataggcaacggtcttgcccgagccggtctgggccgaaaccaggaggtcgcggccgacggcgtcgtcggccagcacggcgagctggacgggggtcggctgttcgtagttgcgctcagccagggcgcgggcgagcggcggacttgtggtcggaaagggcacgagatgggaaaccttgattggtccgggcgcagaacgtcgagcgggacgacctgaagctgcgacccggcaggcggcacggccgcatgacgatttggcgctgctttacgccaagaccggccaaatcgccatgcccccaaggccctcccatgacggaaaaggccttctattgcggaaaagatgccggatcaggccggctgcccgatcggggcccggccgccggcgatccggtccatcaatccggacagccgcgatggtggcgggctggctggcgcaatccggccgcccgcgccgcgcagcgcgcccggcgccagctcgcaggccagcagacgctcacgttcgtaggggccgggcatgcggagcgcaccggtcgacgccgccgagaagccgaagcgggcgtaatagccggcgtcaccgaccaggacgacggcgcgatgaccgagcagatcggcccgctgcagcgcctgccgcatcagcgcagcgccgatgccgaggcacctcacctcctccgacaccgcgagcgggccgagcagcaggcaggcatgaccggttccggtcacgaccggccacagccgcaaggtgccgaccaggcggccgccacggcgcgcgacaaacgcgaggccgcgcgcaggcttgcggccctcgcgcagccgctccgaggtcctggcgaagcggccaggaccgaatgcggcgtcgagcagactctctcgcgccgccacgtccgaacggcgttccctgcggatcgcaaccggtttgtcgttcggagaaccagatgagaacatcacgcgaccctcgccagatagatgaagacctcgtcgaggtcgcggcacttgaagcgttcggcgagctcttgcggacgccccatcgcgacgacgcggccctggctcatgatcacgacgaagtcgcagagctgctcgacctcggccatgttgtgcgaggacaacaggatggtggcgccgcggcgcttctgataggcgcgcagccggctacgcacccattcggcgcggtcgggatcgagcgaagccgtcggctcgtcgagcagcagcacctccggatcgttgatcagcgccttcgccaccgcgacgcgggtcttctggccggccgagagccgcccggtgacgcggtcgagcacgtcgccgagctcgaagtcctcgaccagctcctcgatccgggccttgagattggcgacaccgtaaagccgcccgaacaccgtcaggttctggcgcacggtgagccgtccgggtagcgcgacataggggctttcgaaattcatccggccgagcaccttgtgacgctcggtcgccatgtcgtggccgagcaccatggcgcggccgaagcttgggatcacgaggcccatgatcatggcgatggtggtggtcttgccggcgccgttgccgccgagcaggccgacggtccagcccttgggcacgatgaagttgacgtcgtcgaccgcccaatgggtacggtactgtttgcagagatcctcgaccgcgatggctggcgcctcctcgggattggccaggttcgacgagctgccctgcgcgggcgtggcgttcggcgacacggatgtcagatgtctgcggggcagcaagcgttcgatgcggctcatggatgtctccccttactcgcccatcgtgagcaggccgcccttgtgacgggcgctctgcagcagggcaacgaatgtgatgaagcccaagccgagatagacggcattgagcgcgaggcattcgatcatcaggtcagtgcggaaggtgccgtcgagcagcacggcgcgcatgccctcgaacacataggtcggcgtcagcgaccaggcgaccggatgcagccagagcggcagcgcggcgaccggatagtagacgcagcacagcggcagcagcacgatcatgatcgagtaggcgaggctttcggcgccaaagccctgccggatcacgaggcctgcgaccacgagcccgatcgcccagctggtcagcaccaggttgaggaagaacgcgaccagcccgggccccatcgcgaagacgttgaagccgaacagcacgaaggtcaacagcatcaccggcaacgtgccgatcacgagccggatcagactcatcgccatcagcgaggccgcaagctcgaacggctgcaacgggctcatcatcagattggcgaggttgcgcgaccagatctcctccaggaaggtgaaggtgaagccgagctggccgcggaacagcacgtcccagagcaggacggcgccgagcagcaggccggcggtggaggccatcgccgacttgctgtcatagaggtaggtgtagaggaagccccacaccagcatctgcatcgccggccagtagacgatctcgagcagccgcagcgatgacgagcgcaggatgtagtagtagcgcgccgtcatcgcggcgatgcggttcagtgactgtgtcatggcacccatccgtgtggcttgcatcagtcgaactcgcggcggatcgggcggcgcttgccgaccttgggcggaaatgccagcagcgcgttggcctgcacccggaccggatgctcgaggcaggccgcgagcaggtcctcgagatgcgcgaccgagctgtgcagccggcacggcggcgtatcctggccgagcacgacgcgcgcctcgacgaggtcgacgccgcgctgcacgatctcgaactgcgccagatgcaggttgcagtcgaacatccagcgataggtcgcatccaggatgctgccggccggcaccttgcggccgtcacggttgacgaaggcgtcgttgagccggccgtcgatgctcgcgatctgcgaccagttgatgtctgatggcgccggattgaccggccgggtgatgtaatcgccctggacgtagcggatgaacggcatcgcctcgttgagcagattggtgattacggcgatgccggactggccgtcggcctgcggctccatcgtgatgggatcgagcacgtcgagatgcacggtgtcctcgcagacgtgatactggccgtcgggcatctccagcgcgatccgggtcgcctcctcggaggaatattcgtcgagcacgggcacgccgagctggcgcgaccattcctgacgcgcggcgcgcgaggagtattccgaatgcgtcaccgcgagattgagcgaagaacggaactcgtcgacatgcggcatcagcgcatcgaggctcgacggatacagcgacaggatcttcggcccgagatagcgcagatgctgggcgacgcgcgccggcgggatcaggttcgagatgaacgcggtcggataatcgccgccgatcgaatcgaaccaccacggcacggtgtagacatgggcgagcagatcctccgcgcggtagttgccgccgctctgcatcgcgaactggcggacgccctggatggtgtcggtgatgacggcgtcatagtcgacgcggatcagcagcgtctggccggacgagccggatgaacgggtcggaaacaggttttccggcttgtacttcctgttgacgcactggtccggaaacgccgcgaccagctcgggcttggtgatgaccggaatcttctggatgtcgtcatagtcgcgcagatgctccggcttgaatcccgccgcatcatacttgttgcggtagaccggaatgtcgcgataggcgagctcgaccagctccttgatgcgggcgagctgccgtgcgcggatttcggacaccggcagatagggatgccgcatgcattcgccgagatagtttgcggtggccgcgaccaattccggcgccgcatcgctggagggctggaaatccggacgggtgtgctcggtctcccagaactggcgctgcggcacggccgggacgagggacgcggcggcctgatcgtgctccggcaccagagcaaggctgtcatcggaagtgctaattgcaagggtggacgtcatcttcagctccatgattgtcgggagaccgcccgttcatggcgctatcaatggcgcgcggcgcgcgtggccgccgtgacgagtgtcacacgcggccgcagcccacgcgcgccccatccaccgcggtcgttcgaggctgcggctcgtgatgttcgctgactgccgttaggcgattgctatttgccccacatcgccttcctgatccgccccttgccgccgcatgtcctgcaaggctcaggatagattttgcgtcccggctcgctcggctgcctgacctcgggaaaacctgtcccgttgcacgcgtcacacttctcttcatcggaaataaggtgcttcaccatcgaacgtcccggattgaaaagatcgaagcccgcgggcgcgggattccgccatcgctacttacgaacgaacgcgggtcgtggtttcagctgcatggctgccccgcgcggcagcgcatccgagaggtcaagggaacgatgacgggacgaccgccgttattacactgtctcttctgaacgtagcttcacttcgccttgagcgccttctcgtggctctcgagtgctgccgtcatcagcttcggcaattgcgcggcatagacctcgatgaaggtcgcatcgccgcagccttgcggatcgcgcgcggcctgctcggcgacgcgcgcggccttggcctcgcatttcgcgaacatgtgccagaaccagtccgggctcttgccgagcgccggcttgttcttcttgatgacggcggcgccgaccgcgctcatcgcgctgacgacgccggcgcccagcgcgctgatagcgcgcgcgttaaggatgtcctcgcgcgcctgcgcagtggcgttggtcgcggtcgttcgtgccttggccggcatgctcaagctccttcgatcctgtcgatccctgccgtaggcgaagcatcggccggggaagttgaggaaggctcaaggggcatggttgaaaaccgctatggatttcattccggttttatgcgcttccgagcgatcgggcctggagagcttttgcccttccctcggcgatcggcgaaagggtaaggctcctgacacatcttcgtcgaccggcaatcgatcgacagcggcgctgagccggcgtctacgcccccgtcacgcgccagatcacgttgccgacatcgtcggcgaccagcagcgagcggtcggggccgagcgcgacgccgaccgggcggccgtaggacaccttctcgtcgggcgcgaggaagcccgacaggatgtcgcgcgccggccccgaagggcggccgttctcgaacggcacgaacaccaccttgtagcccgacagcgtcgagcgattccatgagccgtgctggccgatcaccatgccgtcggggaaaccaggcaaggtgcccttgggcatccagcacagaccgagcgaagcggtgtgcccgccgagcgcgtagtccggctggatcgctttggcgaccatcgccggatcctgcggcacgcgatcgtccaccgtctggccccaatagcaataaggccagccatagaagccgccgtcacgcaccgaggtcagatagtcgggcggcgtctcgtcgccgataccgtcgcgctcgttgacgacggtccacagcacgttggtgctcggctcccatgcgagcccgaccggattgcgcaggccgccggcgaagatgcggctggtgccggcggcaagatcgagctcgtagatcgcggcacggccttcctcgaccgccatgccgttctcggcgatgttgctgagcgagccgacgccggcgtaaagcttcttgccgtcggcactcggcagcaggctgcgcgtccagtgcccgtcgggcttgaaggttgcgagtttgcgtccctccgcggtgatgcgatcggcgcccgcagtgtagggaaaggcgaccacgccgtcggtgttgccgacatagaaggtgtcgccgatcaacgccatgccgaacggctggcgcagtccctccatgaaggcaccgcggctttccgcgatgccgtcgccatcacggtcacgcagcagcgtgatgcggttggcgctgacgccgagggccgcggcgcgccgcatcgtcgcctgcatcgcatagtggaagacgctgcgcggtgtccctgcgatctgcgtcgcctccgcgatcagcacgtcgccattgggcagcacgttgatccaacgcggatggtcaagcccggcggcaaaggcgttaaccttgagcccgggcgcggcggtcggcacctgccccttgtcccagccgcgcgcggtcggcatcttcagcgtcgggatcgcgccctgcgatttcgccgccggaatctgcggcgcgtcgccccaggccggcgcgggctgcgcgccctgcatccgccgccacgccacggcgccggccccgatcgccgcgacgacgcgggcaaaaactccagacgtgctcatgaacttcccctgttattcgcgccggttattgcgcgttgttattgccttgccggccggccgcggcccgcagcagcattcgcataatgccggccctgatgacagtagttatacgatcttcgcagctgcacccgaatcgaggacactggtggcacgctcccttgtcagagcgttttcctccctgagaccttgcccgccccggtcggcgggcttccttttacgaaccgcccagctcgggcgcagcttgccgtggaccgttatagctggaaaagcatagcgatcgagcgaatgcatgcgaccgggcagagccggcgcgccaatctcgcagcgcaaggctcttcaccaaatcccgatcccggctccgtgcaaattcaccttcgtccgcggcatcgcggatcaggaacgctgctccgcggcggtcgttggtcgcgacaccagcaaggagtgtatgcatggaacggaacagcgtcgctgatcgctgaccggcgtttaccggcagtggtaagccacgcaaattcaacggcccgtcgctcggattgagcggcgggccttttgccatttcggcgaaccgatatctgtgaacgactctctcgcaatttggaggacgatcacttcaccatcgcgccgtagacgatgtcctggacgttctcgcgataatatttgcgcatctcgcccggcgccgcggttcccaccaccacgacgagacgctccttcggatcgcagaagaactgcgtgccgtaggcgccgttccaggtgaactcgccgggattgcccggcaccgaggacagcccctcgctggtccgcaccgcaaccgccagcccgaagccgaagccggcgcgatgcggctcgaccgcggcgacgttgttcttgatctcgggcccgagatggttcgacgtcatgtgatgcaccgtctgcgggctgaggatgcgcttgccgtcgagctcgccgccattgagcagcatctgcccgaaccggacatagtcgccgacggtggcgaacgagcaggcgccgccgcagtcgaacctggtcggcgtgtcgagcagcttgatcgattgcggcttgccggtcagcggatcgttggggaacggccgcgccagccgcgcacgctgggcctcgttcgggtggaacgtcgcctccttcatgccgagcggcttccagacattggccgcaagatagtcgccgagccgttcgcccgaaaccttctcgaccacggcgccgagcacatcgatcgagaagccgtattcgaactcggtgccgggctgatgcaccaaaggcaactgggtgatgcggtcgatgaaggcctgagtgtcgccctcgaccgccggcgcggtgccgtcgggataaagccgggccagcgcgctcgaactgtcgggccggccgccatacatcaggccggaggtgtggcgatagagatcgtggatgaagatcgggcgtgcctgcggctccatcgcgagcgagccgtcggcctgctgcacgccgaccttcatgtcggcgaacgccggataatagtcggcgaccttggcctgcagcggcaacttgccctgctccatcagcgtgagacctgcgaccgcggccatcggcttggtcatcgaggccagcgcgaacacggcgtcgatcggcatcggcgtgcccttgaccgggtcgagctggccataagccttgtaatgcacgagccggccgtcgcgggcgatcgccacgacggcgccgggcacccgcttggccgcgatctcgcgcgcgaagaagtcgtcgagccgcgccagcccctggtcggagaagccgacctggtgcgccgaagcttccgggagcggcggtgcggcgtgagcgatggtgatggcaagacttgtggcggcggcagccgcggcaatggcgatctttcgcattgtttcctcaccggggcgggcgattgttatgcgatttggtgcccgcagctcgcaggaatagatcacgccgacaacggcgacaaggcgtggcgacgcgcggcggtgccgccggtgcgcatatcttctgcgaagaacggctcgacctcgcgctcgaacgtcttcagcgccgcgccgatcgcctggtgcatgtcgagatatttgtaggagccgagccggccgccgaagatgacgttcggatgcgccgccgtcatggcgtgataggacgcgagcatggcgcggtcggcggcggtgttgatcggataatacggctcgtcgttgcggccggcgaagcgggaatattcccggtagatcgtggtccgcgcgccggtatgggtgcgctccggatgcagatgcctgaactcgtggatccttgtgaacggcacctcggcgtcggcatagttgatgacggcggcgccctggaaatcggcgacgtcatggacttcgcgcgcgaagtcgacggtgcgccagccgagatggccgcaggcatagccgaagaagcggtcgatcggcccggtatagatcacgagctggcgcggcgtgatgcgctcagcgacgtcgaaatagtcgacgccgagctcgaccgcgatttttggatgctcgagcatccgttggaagatcgcggtgtaaccgtcgacgggcatgccctcatagcggtcggcgaagtagcgatcatcgaagctgaagcgcaccggcaggcggccgatgatgtcggccgacagctcgcgcggatcggtctgccactgcttctgcgtatagccgcggatcagcagatcgtagagcgtgcggccgaccgaggcgatggccttgtcctcgagattgccgatcccacccgcgccatgcgcggcagcctcggccgcgatcacggcgcgcgcctcgtcaggcgacatgatgcggccgaaggcggcgcacaccgtcgcaaggttgatcggcatcgaatagacacggccgttcgccaccgtgaagacgcggtgacggtagtcggtgaaatacgtgaagcgctgcatatagcgccagaccgtctcggaattggtgtggaagatatgcgtgccgtagcggtgcacctcgacgccgctgtcggaatccacttccgagtaggcattgccgccgatatgcggccgccggtcgagcacacagaccgagcgaccgagcctgctggccgcctgctcggcgatcacggcgccgaagaagcccgcgcccaccaccacgacctcgaagctatcaagctgcatgtggccccgctccccgcgggcgcaggcggcagcccgccgcgacatcccgacggaacttcaacggcgctgcggtcgacttccggcgaagattttggttaaggccacgataattccgagcccggaacggccggctcggccgttcaactggcagcatgcgaagcggtggatttgtccgcgcacgcggcaacagcatcatgcgcgggggctccatgtccgtgatctgcgtcctgtactccagcaacacgacctatgattcactgcgcggcatcctcgcgatggccgccgccgagctcgaccggctcgggcacgaggtcaagatgctcgacctgctggcgccggatttctcggcccggctcaacgccctgctgccgcggaaggccgagacgatggcgctcggcttctccggcatcgggctcgacatccacaccaaggacggcaggctgttctgggacgtggcccagatcccggtcttcacctggttctgcgaccatccctgctacttcgccaagcggcacgggctcgagagccgctataccgcgcatggctacgtgtttccggaccacgccgcattcaaccgcgaccacctcggcgccaatggcagcgtgttcgcgacccatatgggcatccccgatcccggcttcttcggcggcctgccgcccgagcagcgcaacggccggctggtgttcgccaagtcgggctggaatccgctggggctcgagcgcggctggcgcaagaccatgccgccaaagctgttcgcgctgctgttcgacgcgatcgccgaggcgcgcggcaagacctgcggcgcgtttccgaagatcatcgtcgacgtcgccgagcggcatctggtctatctgacgccgggcggcgatctgttcaacgtgatcctgacccggctcgacaactacaccaggggcgtgcgcacccgtgaagtcggcgccgtgcttgccgactacccggtcgatttcatcggcggcggctggagcgatctcgacgtcaccgggcgcccggcccgcgtgctcggcgcgatgaccttcgatgcgatgcgcgagggcctcggcagctatctcggcgcggtctcgctcaatccgaatatcgaccagtcggtgcatgaccgggtgttcttcgcgctcggcgccggcaccgtgccggtgttcgacgccaaccgcttctcggccgcggagatgccgcatctcgcccgctacagcttcggccaggacacggccagcatcgccgccagcgtcgaggcggtgcttgccgatcctgccgcggcgcaggctgcgaccgccgccacgatgagcgagctctatccgcgcttctcgatgcagcggtcggtgcaggacatccacgagatcacgatgtcgatcgcgggcgccgccggcgccggcctgttgccggccgagccggtgccggccggcgtctggacgccgaagcaggcggcctgacgcggagccatttcgatggccggctcgcgccggctgcgataccctgcacccatcacctccgaacgggtccaggatgaaccggcgcgcgtttgtttcgggactggctgtcgcggcgctcgccggcgttgcgccgctgcccgccgccgccgacggcaagcgggtggcgctggtgatcggcaacggcgcctacagaagcgtgccggcactgaccaatccgccgaccgacgccggcgatatcgctgcggcgctgaagcgcctcggcttcgccgttaccctgatcaggaacggcagcttcgatgacatgcggcgcagcctgatcgcgttcgggcgcgaggccgcaggtgccgacatggcaacggtgtatttcgccggccacggcatggagatcaacggcgacaactggctgatcccggtcgatgccgagctgaagcgcgataccgatgctgcgaatgaagcgatcagcctgcagagcgtgatgctgcaggtctcgagcaccggaagtctcggcctcgtcatcctcgacgcctgccgcaacaatccattcgcgacgaagatgagccgctcgatcgcgacccgcgccgccgcgaccagcgggctcggccgcatcgagccggtcggcaacgtgctggtggcctatgccgcgcgcgacggcaccaccgcgctcgacggcgacggccgcaacagcccgttcgccgcagccttgttgcgcaacatcgaggcgccgggcgtcgaggtcaccttcatgttccgcaacgtccgcgacgacgtgatggaggcgacgcgcaacgagcagcagcccttcgtctacggctcgctttcgcgcaaggcgatctatctggcagcgccgcccgccgagaccgcaagcgcgaaacaggcgaacaatgcgccggcagcggccgctccggcattatcggccccgccggcaacgccagtcggcgccatcgatcccgcgctggtcggcacctgggagatcatggtggcgagcggccgcggccagtcgcgctggatctggcagatcatggccgacggcacctacaaattccacgccgagccgttccgctcggcacaagcccacgaaggcaccgtgaccttcgccaacggccgctggacgctgcatgcgctgaagggcatgaggaactatagcgacgccggctcctacgaggttcatgacgcgactgctgtcatcacgggcaagctcggcaccggctattggaagcgcagcgtggagtgaggcgcatggcacaccgcggtcgccgcgggttgcatcacgctctcatagatcgagctgccccgttgccggatagaccaccgtcccatcgccctgcacgagcgcgccttcggtgagccgggcaggctcgagccggccctctcccatgatgtggacgacgctctcgccggccgcgatcagatagtcggcgacgatgcggcggtggcagcgccaccacaccgcctccgagcacatcatcgcgcagcgttgcgcgcgaccctcattgcgcagatgctgcaggcctgcgtgaaactgcggcgacaacgcatagtcggcgtaattgtgaaagctctcgttgctccagaagccgttgaccgaaggcggcacgttgcgcgccttgccgcgcagcccgccgagatcggccagatgctcatacgagatggccgtggccttgagcgaaccgggaagcgtgtccttgttgaactgcggattggttcgcgagcgcggcaccgttctgatgtcgaccacgcgatcgatgccggccgcggtgaggacggcgacgaaatcctcgagactgcggttcgaatgacctatcgtgaagaacggaagcgccatgccgcggctctgctaggcaggatggagcgcgctgcccttgtgggctgcgacgtgatcggtcttgtcgctcttgatctcgtattgcggatcggcttccgaggcgcggtgcatgtgccccttgtaatcgaaatcacgcgtgtgaaccgcgatgatggtgccggagacgcgtccggcctcggagttccagctgacgtgatcgccgaccttgaatctcctggtcatctttgtagcgtccttcgtgcgcgggatgccaaggggataccaagcggatgccaacgcaatctgagcttgcccgcggcagcaaagagtttcatccaggttaagttcctccccatcccgaatgccggttgcgggattcaccgatactataccaaatctgcggaagagcccccgactgtgagcggcatcgctccaaggttgtcgcgctatatgctaacgagtttgccgcgtaattgtacgttggcgtttttggttggggaccgatggccgctcgtaaactgccgcaagggcaggcccccacgcgggtagcgcgtcgacgctggaatgaggaacggtcgctgcgatgcgccatcaggatggcccgcatgggctactgggaatcgcacagcgccgccgcgaccgatgtctggatatcgcccgagttcgccgccttctacgaattcgagacgcgcgacggcttcatcccgatcgccgcggtgcgcgagcgctatttgcccgaaagccggaaggttctggaggcgcattacgccgcctgctgggcggaggggcagccctatgcggtccagacgcggctgcgcaggtccgacggcagcgtgctcgactgcgtagtgcatggcgagccggaattcgacgcgcgcggtcaggtccggcgcgtgtccggcattgtccgcgacgtcacggaggagacctccgcgctgcggcgcctcgccgagagcgagcagcggctggccgatttcgtttctaccgcttcggactggtgctgggagagtgcccccgaccatcggctgctgccctatcccaaatcgcttcccggcaatgccgccttccagacggtggcctccggcggcaaagcacgctgggagctggcttacgcgcctgaggacgcggagggtatggcgcagcatcgggccgacatggaggcccatcgcccttttcgcgacttcacctatacgctgatcggcaaggacggctcgcgcgtcagcatctgcaccagcggcaaaccgatctacgccgaggacggcagctttctcggctaccgcggcacggccagcgacatcacccagctcagggcggccaaggcgttgctcgaccagcgcacgcgggcgctggaggaagcccaccggctcggcaagatcggcacctggagctatcggctcgacaccggccgcacgacctgggcacccgagctctatcagttgctcggcttcgatccggcgacgttcgagccgaccaatgcgagcgtgatgccccatttcctgggcggcgacgccgaccgcctccgcgaggtgcagaaacgggtgctccgcacccgccggaccgaggcgacggatttgcgcatcctgcacgcggacggcaccgcccgcgacctggcggtcatctgcaaggccgagatcgcccacgacaaggtcatcggcatcgtcggcaccgtgcaggacgtcaccgagcgcaaggaggccgagcgccagctcgagcagctcgcctacagcgatcccctgaccgggctcgccaatcgcgcgctgttcacgcgccagctcgccgccatgatcgagggctgcgccgtcgaaggccgcggcggcgcgctgctgctgatcgacctcgatcgcttcaaggaggtcaacgattcgctcggtcatgccgccggcgaccagttgctgatccaggtggcggctgcactgcgccaggaccttgggccgcgcgccttcatcgcccgactcggcggcgacgaattcgccgtgctggcggagggacgcggcatgtccgacgccgcgctgaccggacttgccaaccggctgatcggcaggctctcggtcccggtcgatctcagcgagggcgaggcctgcgtcggcgccaccatcggcatcgcccgcctgccggagcatggggcgacggcggagaccgccgtgcgcaacgcggatctcgcgctctacatggccaaggaggccgggcgcggccgggcccagctgttcgagccggtctatgcccaggcggtcgatcaacggctcgacctcggccgccatctgcgccacgccgtggaagccggtacgctcgaggcccattaccagccgcaactcgacctgcggaccggacgcgtcaccggcttcgaggcgctgctgcgctggacccatcccgagcgcgggccgatctcgccggccgagttcatcccgatcgcggaaagctccgggctgatcgtcgatctcggcctgtgggtattgcgtgaggcctgccggcagggccgcgcctggctggatgccgggctgccgccgcgcaccgtctcggtcaacgtctcgccggcgcagatctggaacgtggacttcgagacggccgtcgcggccgtgctggcagagaccggctttccggcggagctgctctgcctggagctgaccgaaagcctgttcgtcgatcataccgagcagcggatcagccgcacgctgacggcgctctctgatctcggcgcccggctggcgctggacgatttcggctcgggctattcctcgctcggctatctgacgcgcctgccgttcgactgcctgaaggtcgaccgcgccttcgtcgacggcatttccaccgcgccggagaagcgcaaactgctcggcggcatcatcgccctgtcgcatgggctcggcatgacggtggtggccgagggcgccgaattgccggccgaggtcgacgtgctcggcgggctcgattgcgacctggtgcagggcttcgtgttttccccgccgatcgccgccgacaaggcgccgctggtggccgccagcatcgagcgcgaggcgtaccggatccagcccaaacgcaagcgccactagagcatgatccggaaaagtgcgaagcggttttccgaaaagatcatgctcagacaacaagctaaagcgcgatgatgattcactaatctcatcgtgctttaggcggcgaccttcaaccttctcaacgtcaaggtctcgcgggatcggcggaagcagctaccaccgcagccgtggcccgccgagacgacgggccaccgtgcggccaagggcattcgcgcagtggagcaaggccagcttgagatcattttcgaccgtacgaaggccgatctgcaaacggtccgccacctcttgtgccgttgcgccctcgatcgagatgtcctggagcacccggcgaggcctctcgggaagctcggccaacgcagatttgaaggccgcgatctcggagcgtgcctcgaccacccgtgcggcgtcgggctgattgtcgcagacatccaacagcgcatcgacctcggacgcgccgagacgatgggtctgggccctgtgccgatccttcgcgacattgatggcgatacgaaagagaaagtcgggcgggctgcggaccggcgccgcatccgtgacccgatccagccgcaggaatgtctcgtgcagcgcctcgtgggcgaagtcggaggaccccaggcggcgcgtcagccttgcgatgagaccatcatagttctccaccagctggtcgcgcagcctcgcctggttggtattgcccacgttcagcgcccccaaactattcttcagtgcgtctcgagactcgctcgttcctccgcggtgagcgcctgcctctgcgtctccgaaagcgcaccattgccgacaagctgcagaacactgttctggttgtaactgtgctggtcttgcggccgccgcttctgctcgtcccgcgcgggatccggcgcagcgccgtcgccgccgccgtaacccatgacctcgacgatgatgatcgagggctggtcattgccctttggcggcggcgcggcggcctgctggctcgcggcggcggtgttcgacgccgctgtcggcctcgcccgcatcgatggtgccgagcggtgcgatcagatcgatgttgccgggcgggacttcgggaatcggattgagcgtcgcgatgccggcg

SEQ ID NO: 51 - DNA, 40801 bp, Bradyrhizobium enterica
cgcgcaggcaatacgatggtccgttgttcgatgctggtcatggcctcgctggccgcatacaggccacagccatccgccagcttgcgatcatgcatgctccgggcaatgacgtggaactggtgttctgcggcgcaggcgtagagcgcgaagatgtcgctctcgcggtcgcccagcatggtcaccatcgcagccttcgccaacagcggcttggctgccagagcggtcgcgatccagcgttgcgattctttgtccttcagatcgcgattgtcgtgcgagacggtgcggcggccctggcgggtccagatctcgccgtgcaacaggccaaggcagcagccgctttccgcgtctgcggccagcatcgggtgcagcaacaccccgcgggtgttgccatgaccgatctcgcccaagccacgccggttttgtgccttggtggcaaaattgatctcgctggtatcctggatcgccagcacatggcggccttcggccgccattaccgtaccatcgctccagctttcgattatccgcgtcgtcgtcaccttggcattgccgagaaagcggttgaagcgcacctcccgggcacgcatgcctcctgccagccgtcgcaggcagacatccttgcccgcgaccatgcattcgacgagcgccgcccccctttatcgaggcggagatccccgaaccgacctaatgaccagtcaatttgcgccagcatgtcgacacctccgccaaagccgaagtgccgcaatatgaatcacacgaaataccgattcgggaatccccacccaactagatgtgtgcatgccctagggcgttcgccgggacgacggagagattacaccccgctgaacagcgcgcgttcggcttccaccgtctcgtagatgtagtccgccaccgcgcggatgcgggcgaggtccttgctgtcggcgtgcatcaggagccagaaggtgcgggagatccgcacctcgtcgggcagcaccggctgcagttcgggatgggctgatgccatgaagtgcggcagcacggcgatgccgaagccggcgatggtggcgttgagctgcgcgatcaggttggcactgcggaatttcgcggagatcttcggcgagacctgcggcagatagtccagttccggcgtgaacagcagctcctcgatgtaaccgacgaagcggtgccgcggcaggtcggcacgcgcggcgatcacaggcgcctgcgccagataggcgggtgcggcataaagcccgagcgtgtagtccagaagcttgcggccgacgatgcggccttccttcggcatggtcaggctgatcgcgatatcggcctcgcgcttggagagcgagaacagccgcgcggtggcgacgagttgcaggtcgagatcgggataccgctcggtgaacttgaccagccgcgaggccaggaagtgactgccgaagccgtcgggcgcgccgatccgcaccgtgccggtgagatgcgcgcgcgagccgccgaccgcctcctggttggccacgatggtggattccatcgcctcggcgctgtcggcgacgcgctggcccgcctcggtcagcaggtagccggttttgcgccgatcaaacagttttgcggagaggtggcgctccagccggtcgacacgccggatcactgtggcatgatcgacaccgagctgcttggcggcagccgaaaccgacccgccgcgcacgatggcaagcacgaaacggaagtcgtcccagtcgattgtgtcgctgccttgatcctgcattaccgcacatctatggtgcaatttatcggacttgaatcctataaaatgcagggtcatagggtttgtaaagcgatctcgccgcgcggagcggcgattcacgtctccaagggaggatattcatgcgctcgatcggacatttcatcggtggcaaggaggtcaagggcacctcgggccgtacggccgacgtcttcgagccgatgaccggcgacgtccaggccaaggtggcgctggcctccaaggccgaggtccgtgccgcggtcgagaacgcccgcgccgcgcagggcgaatgggccgccaccaacccgcagcgccgcgcccgcgtcatgatgaagttcgtcgagctggtgcagcgcgactacgacaagctcgccgagcttttggcgcgcgagcatggcaagaccgttcccgacgccaagggcgacatccagcgcggcctcgaggtcgccgagttcgcctgcggcatcccgcatctgatgaagggcgagtacaccgagggcgctggtcccggcatcgacatctactcgatgcgtcaacccctgggagtggtcgccggcatcacgccgttcaacttcccggcgatgatcccgatgtggaagttcgcgcctgcgatcgcctgcggcaatgccttcatcctgaagccgtccgaacgcgatcccggcgtgccgatggcgctggcccagttgatgatcgaagcggggctgccggccggcatcctcaacgtcgtcaacggcgacaaggaggcggtcgacgccatcctcgacgatcccgacgtcaaggcgatcggcttcgtcggctcgacgcccattgcccagtacatctatgagcgcgccgcgcagaccggcaagcgttgccagtgcttcggcggcgccaagaaccacgccatcatcatgcccgacgccgacatggaccaggcggtcgatgcgctgatcggtgccggctacggctcggccggcgagcgctgcatggcggtgtcggttgcggtccccgtcggcaagaccaccgccgaccggctgatggaaaagctgatcccgcgcgtcgagtcgctcaagatcggcacctcggtcgatccgtcggccgactacggtccgctggtgacccgcgaggcggtcgagaaggtcaagagctacatcgacatcggcgtcaaggaaggcgccacgctcgcggtcgacggccgcggcttcaagatgcagggctacgagaacggcttctacctcggtggttcgctgttcgacaacgtcaccaaggacatgcggatctacaaggaagagatcttcggcccggtgctctcggtggtgcgcgccaaggactatcacgaggcgctggcgctgccgtccgaccacgactacggcaacggcgttgcgatcttcacccgcgacggcgacgccgcgcgcgacttcgcggccaaggtcaatgtcggcatggtcggcgtcaacgtgccgatcccggtgccgatcgcctactatacgttcggcggctggaagaagtcgggcttcggcgatctcaaccagcacggtccagactcggtccgcttctacaccaagaccaagacggtgacctcgcgctggccgtccggcgtcaaggacggtgcggagttctcgatcccgacgatgaagtgacgcgagattggagtgagcttcggcagcatcggcaaatcacctctccctgtgggagaggtcggcgcgaagcgccgggtgagggggcacggtctctcgttagagcagcacaccctcacccgatttgctgcgcaaatcgacctctccccggtggggagcggtgacctcagcgtgcgggggcattgagatgcagttcgctctcaacgaggaccagatcgcggttcgcgacatggcgcgggcgtttgcggcggaaaagatcgcgccccacgcgctcgaatgggacgagacgaagcactttcccgtggatgtgatgcgcgaggccgcaggcctcggcatcggcggcatctatatcaaggacgatgtcggcggctcggcgatgacgcggttcgacgccgcgctgatcttcgaggcgctggcgaccgggtgcccgaccacgtcggccttcatctcgatccacaacatggcgtcctggatgatcgatgcctatggcaacgacacccagcgccacaaatggctgcccaagctctgcactatggagctgatcgcgagctactgcctgaccgagccgggcgccggctcggacgctgcggcgctgcgcacccgcgcggtgcgcgacggcgatcactacgtgctcaacggccagaagcagttcatttcgggcgccggcagcaccgaccttctggtggcgatggtgcgcaccggcggcgacggccccggcggcgtctcgacggtcgtgatcgacggcaagacgccgggcgtttcgttcggcaataacgaacgcaagatgggccggaacgcgcagccgacccgcgctgtcattttcgagaatgcccgcgtgccggtcgcaaaccggctcggcgaggagggcatcggcttcaagatcgcgatggccggcctcgatggcggccggctcaacatcgcggcgtgctcgctcggcggcgcgcaggcggcgctcgacaaggcgctggcttacatgaaggaccgcaaggcctttggaaaacggctcgacgaattccaggcgctgcagttcaagatcgccgacatggcgaccgagctcgaagccgcacgcaccttcctgtggcgcgcggcggcggcgctcgatcgcaaggatccggacgcctcgatgttgtgcgcgatggcgaagcgcttcggcaccgatgtcggtttcgaggtcgccaaccaggcgctgcagctgcatggcggttacggttacctcagcgaatacggcgtcgagaagatcgtgcgcgatctgcgcgtgcaccagatcctcgaaggcaccaatgaaatcatgcggctgatcgtgtcgcgcaagttgatcgagggcgcgcgatgaacgatgtggccgcggaaggcgatctgatcgcacgcaaggaaggggcggccggcatcatccggctcaaccggccgaaggcgatcaatgccgtgacgctggagatgttccacgacatcgacagggcgctcgacgcgttcgaagccgatcccgaggtcgcggtcatcttgctggaaggcgccggcgagcgcggcctgtgtgccggcggcgacatccgggcgctctgggaaagctcgaaggtcaagggtgatctcggcaagatcctgtggcgcgacgagtacatcctcaacgcacggatcaagaaatttccaaaaccctatgttgcgttcatggacggcatcgtgatgggcggcggcgtcgggttgtcggcgcacggcagccaccgcgtggtgaccgagcggacgaaactcgcgatgcccgaggttgggctcggcttcttccccgatgtcggcggcacatatctgctgtcgcgctcgcccggcgagatcggcacctattttggtctcaccggcaccacgatgaatgggcccgatgcgatctacgcgaagtttgccgatgccgtggtgccgagcgcaaagctcccagcgctgcgcgaggcgctgaccaaggtcgcaccacgcagcagttcggctgagatcgaccggctgatcgcgggctttgcgaccggcgaaaaatccggccccgttgctgcgatgcaggccaaaatcgacggctggttcgcgcgcggccggatggaggacatcgtcgccgcactgacggccgacggatcggacctggcgcaggccacgctgaagacgctcggcgaaaaatcgccgcgcggcatggtggtgacgctaaaactactgcggctggcgcgggcgaccgcgacgctggaagagtgcctggtgcgcgaatatcgcgcggcgctcgaagtgttcgccagcgacgatttccgcgagggcgtgcgcgccgcggtgatcgacaaggaccgcaatccgaaatggtcgccgcctgagatcgaggacgtgacggcggagatgctagcgccttacttcgccgagatcggcgccgatgaactgaaattccctgacagcaaatagaaacgtcgcaagcggaggacttcccatggcaaacgtcgcattcatcgggctcggcaatatgggcgggccgatggcggccaatctggtcaaggccggccacaaggtgaccgcgttcgatctggtcgcagcgtcccgcgatcaggccaagagcgatggcgccgcgatcgccgagagcggcgttggcgcggtgaagggcgccgacgtcgtgatcaccatgctgcctgccggcaagcatgtgctcggcgtctggaacgaagtgcttcccgccatgagcaagggcgcgctgatcatcgactgctcgaccatcgacgtcgaaagcgccaagcaggcgcacgcgctcgcggccaagcacggcatggcttcggtcgatgcgccggtctccggcggcaccggcggcgccaagggcgcgacgctgaccttcatgtgcggcggcgaggcgaaggcgttcgcggcggcccagccgatgctggccaacatgggcaagaagatcgtgcattgcggcgccggcggcgcaggacaggcggccaagatctgcaacaacatgatcctcggcatttccatgatcgcggtcggcgaggcctttgtgctggccgaaaagctcggcctctcgcaccaggcgctgttcgacgtcgcctcgacctcgtcggggcagtgctggtcgctgaccacctattgcccggttcccggcccggtgccgacctcgccggcgaacaacgactacaagccgggcttcgcctccaatttgatggtgaaggatctgacgctggcgcaggacgccgccaatgccgccggcgcggtgacgccgctcggcaagcacgcgcaggagctctacaagaccttcgacgcctcgggccacggcggggtcgacttttccggaattatccagcacgttcgcagcctcgctggaaagtaattatattgcgtcatccttcgagacgccgcgcatagcgcggctcctccagcgacaacgcgaagcgttgcgcgggatgacgacagcggatgtggagaagccggatgaccacatttcaggacgcacgtgcctttctgctcaagcatcgcaccgactacgacgcggcggtgaagggattccgctggccggatccagtgccgttcaactgggcgctggactggttcgacgcggagctcgcgcacaatgccgacagccgcgaccggccggcgctgtggatcgtcgatgccgccagcggcaacgagacgaaacggtccttcgccgagctgtcgcgccgttccaatcaggttgcaaatttcctgcgtgcgcaggggctgaagcgcggcgatcatctgttgctgctgctcggcaatgtcgtcccgctgtgggagaccatgctggcggcaatgaagctcggcgtcgtcgtgattcccgcgaccacgcttttgactgcggatgagttgcgcgaccggctggatcgcggcaaagccaaggcggtggttgccacccaggatcaggtcgcgaagttcgcagggctcggcgccggcaatctctcgcgcatcgtggtcggcgcgacgcagacccacgagggttggttgccgttcgaggatgcggcgaagcagtcggatgccttcacacccgacggcccgaccagggccgacgacccgatgctgctctatttcacctcgggtaccacggcaaaaccaaagctggtgcggcacagccagcgcagctatccggtcggccatctctcgaccatgtattggatcgggctgcagcctggcgacgtccatctcaacatttcgtcgcccggctgggccaagcacgcctggagctgcttcttcgcgccgtggaatgccggcgccacgatcttcatcgccaatcagccgcgcttcgaggcgaaagggttgctctcgatcatcggccgctgcggggtcaccacgctgtgcgcgccgccgacggtgtggcggatgttcatccaggaagaccttgcgagcttcaaggtttcgctgcgcgaggtctgcggcgccggcgagccgctcaatcccgagatcatcgaccaggtcaaatcggcctggggcctgaccatccgcgacggttacggccagaccgagaccacggcgctggccggcaactcgccggggcagaaggtcaagatcggctcgatgggccggccgctgcccggctatcgcgtgcaggtcaccgacagtgacggccacgcagccaaggaaggcgaggtgaccttgctgctcggcactgagcggccggccggtctgatgcagggctatcagggcgacgacggcaagctgattggtacggacggcgagatctatcgcagcggcgacgtcgtgttcaccgatgacgagggctatctcaccttcgtcggccgcaccgacgacgtgttcaagtcatccgattaccgcatctcgccgttcgagctcgagagcgtgctgctggagcacgatgcggtggcggaagctgccgtggtgccgagcccggacccgatccggctcgcggtccccaaggcctatgtgctgctggtctccggtgtcgagcgcagcccggagacggcgctgtcgatcttcaaacatttgcacacgcggctcgcaccgtttaaacgcatccgcaagatcgagctggtcaccgaactgcccaagacgatttcgggaaaaatccgccgggtgcagttgcgccggctcgaacatgacgatgcgagagacgatgcgttgcgcggagccgagttccgcgaggaagaatttccggagctgcagaaagtgcggacctccggttaggaggtcagccaatgaatgaagtctggaagaagccgccggtgtcgctggaaacctaccagggcatggtcggcaaggagatcggtgtctcttcgtggcacctgctcgatcaggggcgcatcaatacctacgccgacgtgatcgaggatcaccagttcatccatgtcgatcccgaacgcgccaagacggagaccgccttcggcaccacgattgcgcacggcttccttacgatgtcgctgctgtcaatcatgtcctacgaggtgatgccggtgctcgaaggcaccgcgatgggcgtcaattacggtttcgacaagctgcgcttcatctcgccggtccgctcgggcaagcgtgttcgcggccgcttcctgctcgccgaagccacgctgcgcaagccgaaggaactgctgtcgcgcactaacgttacggtcgagatcgagggcgaggagaagcccgcgctggtcgcggactggctcggcctgatctatttcagctagagcgttttccagcgaagtggataccggttcgcgcgaagaaaacgcgtcccaacaagaagcgggagccccgttccgacttaatcggaacggaaagggctccagcaaaaggttgagtagctccacctttcccgcaagcgggagaggtggagcgagcccgcctggctagaagtagcgcattgacggctttgattcccggtgtccatcatgctcccgtttgggcggtgcggtcccgggagtggcagccatggtgcagaacatcgtcgccggacttgtcgtcgtcgcgttgcttgtgatcggctcgatcagctacgcgcaggaacatcacgagtgctggagcgggcatctgctcaagagcctgaagccctgcgggtcgatgacccccgacgtctagcgcgtcaagtggtcggctctgctacccccggccgggcttgacccggccatccatcgctgctcaaaagtctctaaccttttcatgccgttcgggcgcacaccctctccccttgtgggagagagtggcgaaatcgagcggagcgagatgaagccgggtgagggtctctctccgcgcgctcatccgtggagagaacccctcatccggcgcgctacgcgcgccaccttctcccacaaggggagaaggaagtcagagcaggaatgacaagcatggcaatcaggtttgacggacgcgtcgctatcgtcaccggcgcgggcaatggtcttgggcgggcgcatgcgctggggctcgccagccgcggcgccaaggtcgtggtcaacgatttcggcggcgcgcgcgacggcaccggcggctcactgtcgccggccgagaccgtggtcgaggagatccggaaagcgggcggcaccgcgatggccgacggcgccgacgtctcgaacttcgagcaggtcaccgcgatggtcgagcgcgccaccaaggagtggggcagcgtcgatctgctctgcgccaatgccggcatcctgcgcgacaagtcgttcaccaagctcgaggtcgccgactgggacaaggtgctcggcgtgcatctcaccggcaccttctactgctgcaaggcggtgtgggccggcatgcgcgagcgcaattacggccgcatcgtgctgacgacctcgtcgtcgggcctgttcggcaatttcggccaggccaattacggcgcagcgaaggccggcatggtcggcctgatgaacgtgctcgccgaagagggccgcaagaacaacatcaaggtcaacaccatctcgccgaccgcggcgacccgcatgaccgaggaactgctgccgccgcaggcgcttcagctgatgaagccggaggcgatcacgccggcggtggagttcctgcttagcgaagatgcgccgacccgcaccattataggcgccggcgccggctcgttcgcggtgatccgcgtgctggagaccgaaggcgtcaacctgccgcagtccgaatggacgccggacggtgtcgccgcgcacttcaaggacatcagcgacatgtcgaccgcgaaggcgctgcagggcgcgttcgagcagacgcagaaatacgtcgcccaggccgccgcgcgggccgggatcaagctctaaccgtcattccggggctcgcgaagcgagagcccggaatccgtactcacgatcgtggttatggattccgggtctggtgcttcgcaccatcccggaatgacctcttttgttgtggcgccgagccgggtctaaactctcgccatgtcatcatcctccgcccaacacgtcgccatcatcggagccggccccgccggcctgatggcggcggaggtgcttgcggctggcggtgcagaggtcaccgtctacgacgcgatgccgtcggcggggcgcaagttcctgatggccgggcgaggcgggctcaatctcacccactccgagccgctgccggatttccttgcgcgctatcgcgaggcgatgccgcacctgaaggccgcggtcgaggcgtttccacctgatagcttgcgcgcgtggagcgatgttctggggcagccgacgttcgtcggcaccagcggccgcgtcttcccgcaagcattcaaggcttcgcccttgctgcgcgcctggctgcggcggctcgatgccgcgggcgtcggattcgcattccggcatcgctggatcggatgggatgcgcagggcgcgctgctgttcgagacccccgacggagagcgcgcggttagggctgacgcgaccgtgctggcgctcggcggcgccagctggccgcggctcggttcggatggcgcctgggctgatatccttgcggcgaaggggattgcccttgccccgatgcgaccggccaattccggcttcaccgtcgcgtggtcgaatatcttccgcgaccggtttgaggggcagccgctcaagggcgtcgccctcacgatcggttcgcacaccgcgcgcggcgaggcagtcgtcacccgcacgggcatcgaaggcggcgctatctacgcgctgtcggcggacttgcgcgaggcggtgctgggtatcgggcaggcaacgctgacgatcgcgctgcgaccggacctcgacgccgcggcgctgaccacccgcctgtccgggacccgcggcaagcagtcgctcgcgaatttcctgcgcaaggcggcgcaactctctcctgtcggcatcgggctgatgcaggaggcggcgattgcatccggccggccattgccatcgttctcgccggcagagctcgcgcggctgatcaacgcggttccggttcagctcacgggcgtcgcgccgatcgcgcgcgcgatctcgagcgccggcggtatcaggttcgacgagctcgacgcgcatttcatgctgcgccagctgcccggcgtttttgccgccggcgagatgctcgactgggaggcaccgaccggcggttatctgttgcaggcgtcgttcgcgacggggatggcggcagggaagggcgcgttgaattggttgaacacgacgaaatcgtaggatgggtagagcgaagcgaaacccatcaacttctctccgaatggagggatgatgggtttcgctgcgctctacccatcccgcgcctgctcactccgaacctgtcttcgtcgcgatgtcggtgatgaacccgagcataccgaacgttgccgcgaccgcgcagaccgccgtccatccaccaaaactccatgccgcagatgccgttgccgcgccgaccgcaccgccgatgaagaacagcgccacgaacaggccgttgatccggccgcgcgcctcgggctgcagcagattgacggcgcggcggccgagcgtctgatcggtggtgatgccgaaatcgagcagcacggcgccgacaccaagcagggagagggcagcgacccgcgactcgatcatgccggcccaggcgcagagcgcgagtgcaccggcgatgagaaggtgcgagacaatcagcagcggccgcgcgaagcccctgtccccccagcgcccggcgatcggggtcgctgccgcccccgcgacgccgatcagcgcgaacagcgctattcccctggcatcgagcttgaacggcgcatccggcaggcgcagcgccaccgcggcccagaacgcggtgaaggatgccatcaccagcgccgcggtccatgatcggacgcgcagcaccggctcgtcgcgcagcaatttgggaaatgagcgcaggagcgctccgtagctgacttttgccgccggctgcaaggtcggcagatagcgcgccaacgcgccggcgagcaccgtcatcagcacggccgaggtgacataatagccgcgccagttccaactgtccgcgatcaggctcgccgccggccgtgacagcaggatgccgatcatcaagccgctcatcacgtcgccgatcgcttgtccgcggcgctccggcggcaccatcgacgccaccagcggcaccaccatctggatcgctgcgcaggacgcaccgaggatgaaggtggcagcgagcaggatcaccggcgtcggggccatcgcggtgccgatcgcggcgacgatggcgcaggccagcgtgcgcaggatcagccgtctgttctcgaccaggtcgaccagcggcaccagcagcaacagcccgagcgcgtagccgagcagggtcaacgtcgagatcaggcccgcctgcagctcggtcatgccgagcgagcggccgatcaggccgaccaggatctgcggggcaaacaaattggtgacgacggtgccggtggtgatggcgccgatccagatcaggggacgcaccgaggtggcgcgcgccgtggagagtttggtggcttcggaaatggtcatgggacctcgcggggaagtggcgaggccccctttaggggatcgggataatatgctacaattcaaataagataatgaagaatatgcgagattgttatgaacacccatgacctcgtggcgttcgtcgccgtggtggagaccggatcgatcgtcgcggcgtccgcgcggctgaacctgacccaacccggcgtgacacggcggatccagaatctggaggagatgctgggcgcgcagctgctcgaccggctgtcgaagccgctgaagccgacggctgcgggcatcgaggcctatgaacagggtcgccgtctgctgcgcatgctcgacgacctcaaatcgggcgtcgccagtgacggcgtggtgcgcggcgagttcaggctcggcctgacgccgtatttgtcggaggcggggttggcgggtccgctcgatgcggtgcgcgcggagtttcccgccctcgcagtgcgcgtcgttgcgggcctctcgccgcaccaggtcgacgcggtctcacgcaacgagctggacgcggcggcgatctgcattccggacggtgccgtgccgccggcggacctggccgccgacgatctcggcgcgcagccggtcatcttcgtcgtcgcacgcgacatcaagctgccgaaatccgccgacctcgaatggctgtcgcgcatgggatgggtgatgaaccaggacggttgcggcttccgccaaacgttgaagcgccagttcgaagccgcgcatctgccgttcaacgtcgcggtcgaggcgctcgatagtgagctgcggctgtcgctggtcgcgcgcgggctcggcatcggcgtcgtgacgccggtcgcgctgaagcggagcgcgctccgtagccggcttaaggtggtcaggatcgaagggttcgatgccgcggtgcgcgcctggatcgtgcaccgcccgcccgccggccgcctgacgcggccgatcgaggtgtttcgcgatgcgctggatcgggagttgcaggcgctgatccgcgcctagcgcagcttgccccttgccgtcaccggcaacgcgccgatgatttcgtcgccgcgcaccatcacgacctcgtccatcatgttgacgacgacgcagacatgattgggcacgacccgcacgacgtcgccgacattcggccgggtgttgctgcgggagaggtcgaggaagccatgctcctcggcgaagcgcgcgatcttggcctcgggatgttcgaggatcaggccgtggccttcgagcccaccggtgtccgaggtcagcgtcttggagccggcatcgaggataccgcgctcggggccggcgcggctgaccacggtggaatagatatgcagcgcgcaatcgtcccaggtcgcgacgccggccgcgacctgcatgcggtcgttgtagatgtaggtgccgaagcggtgctcggtgccacccttcagtttgccgagattgacgaggttcggcgtgccaccggtcgagacgatggccgcatcgaggccgtgggcgcgcacgccggccagcgcctcgtcgtagaatttctgcgcgtcggcccagccggtctcggtcgggtacagcatgaagcccgcgaagctcaggcccgtggaggccgcgatctcgcgcgccagcgcgatcgcctcggccggggtctcgacgccagcgcgcttgcgcccggtgtcgcattcgaccacgaccgagagtgggcgaccggaggcggcggctgccttcggcagatcgccgaccacgacggaattatccgcggcgacggtgacgttggccttgccttgcagcgcaccgagccgcgccattttctcgtcgccgagcagattgtagctgatcaggatgtcgtcgatgccgctatcggccatgatctcggcctcgccgagcttctggcaggtgatgcccttggcgccagccttgatctgcaactgcgccagcatcgggttcttgtgcgtcttgatgtgcggccggttggcgatgccggcctcgtcgcaggccttctggatccgcgcgatgttgcgctcgacccggtccatgtcgatcacggcgcagggcgtgccgtattccctggcgatcttggcggcgaggggcgtggtcatggtctgtcctttttctccggcctcgtaggatgggtagagcgaagcgaaacccatcgtctttaatccgcgcggaagcaggatgggtttcgctgcgctctacccatcctacactttacgcctgttcgatttcttcgcgcagcacttcgagttcgagccagcggtcctcggcggcggcgagctcgtcctgcgccttggcgatcgccgctgaagctgcgtcgaatttcttgcgatccttcgcatagagatcgggatcgtcgagcagcttctgctgctttgcgatctcggcgtgcaacttgtcgatcgtcttcggcagcgtctccagcgcgtgcttctcgttgaagctcagccggcgtctcggtgccgcctcgggcgctgcggccctggcttccttcttctcttcagtcgcggcgtccgccttcaccgcctcgcgcttcacgtcggcgccgcgctgcgccagcatgtcggagtagccgccggcatattcgatccagcggccctggccttcgggcacgatcaccgaggtcacgacgcggtcgaggaagtcgcggtcatggctgatcaggatcaccgtgccctcgtaatcgccgagcatgtcctcgagcacgtcgagggtttcgagatcgaggtcgttggtcggctcgtccaggatcaggaggttcgacggttttgccaatgcgcgggccagcatcaggcggccgcgctcgccgccggagagcgcctcgagcggcgtgccgcgctgctcctgcgcgaacaggaagtccttcatgtagccgatgacgtgcttcgacttgtcgccgaccatcacgtgatcgccgcggccgccggtcagggcttcggccagtgtcagcttcggatcgaggctctcgcgatgctggtcgagcgtcgccatctcgatattggccccgagccgcaccgagccggaatcgggcggatcgttgccgatcaagagatgcaccagcgtggtcttgccggcgccgttgggacctacgatgccgacgcggtcgccgcgctggatccgggtcgagaaggtatcgacgatcttgcgctcgccaaaggccttcgcgatgctcttggcctcgatcaccaggcggccggatttatcggcctcggcggcggcgaggatggcattgccggtggcgccgcgatagttgcggcgctggtcgcgcagcgcatgcagattgccgagacgcttgacgttgcgcttgcggcggccggagacgccgtagcgcagccagtgctcctcgttgacgatcttgcggtcgagcttgtgctgctcgcgctcttcctcggccagcacctcgtcgcgccattcctcgaaggcgccgaagccgcgctcgatctgcctgatccgaccgcggtcgagccaggcggtggtgcgcgacaggttggtcaggaagcggcggtcatggctgatcagcaccagcgcgcagcggcggctttccagctcgccttcgagccattcgatggtcggcaggtcgagatggttggtcggctcgtcgagcagcaggatgtcgggcgagggcgccagcacccgcgccagcgccgcgcggcgcgcctcgccgccggagacatgcgccgggtcttcctcaccggtcaggccgagttgctcgagcaggtagcgcgcctggtagtggtcgtcgccggggccaaggccggcctcgacataggccagcgtcgtcttgtgctcgccgaagtccggctcctgcggcagatagcggatggtggcgccgggctgcacgaagcggctgccggcgtcgggctcaacgaggccggccgcgattcgcagcaaggtcgatttgccggagccgttgcggccgatcaggcagacgcgctcgcccgcggagaccgacaactcgacgcctgacagcagcggcgtgccgccgaaggtcaggctgatgtccttgagctggatgagaggaggcggagccatcgcgctaaccctgctggttcgtcgtcgcctgctcggcgcggcggcgctggatgcggcggatggtctggtcgagcgtcgacaggaaggtcgagcggtcgcgcggggagtaggatttcggcccgccggtgatctcgccggacgagcgcagatcggtcatcagattgcgcacggcgagcgtcatgccgatcgactgttccgtaaacggttttccatttggcgcgatcacatcggcgccggccttcacgcagcggctcgccagcggaatgtccgcggtgatgaccacgtcgccctgatgcgcgcgttcggcgatccagtcgtcggccgcgtccatgccggaaccggcggcgatgcgctcgatcaggggatcctgcggcacgcggatgaaattgcccgcgaccacgctgaccggcacgccgagccggatcgcgacgcgatagatttcgtccttcaccggacaggcgtcggcgtcgacatagatgcgggtcaaggcaggggtttcagtcatcgattccgggttcgcaggcacggcctgcgtgtactccatgatgcggaaaattgcgagcaaaacgagaggcttgtcacgctgcccggttcgactacgattgcctccgaaaaacaaccgaaataaggggaaacccgatgtcttcgacgacgcctgtgcagacctaccgcgtctcggcctacaacacctcgaaactgtcagagaacaagatccacgacgacgcggtggcgcggaaattcggcttttccggtggcctggtgcccggcgtcgatgtgatggcctacatgatgcatctgccggtcgagaaatggggccgcgatttcctcgaacgcggcctgatcgaggcgcgcttcgtcaaaccggtctatgacggcgagatcgccgaattgaccggccgggagaccggcaatgggctcacgatcgagctcttcagccgcggcgagctttgcgcgaccggcaccgcttcgctgccggcatcggcgccgtcatttgtgctcgacgactataagcaggtcgcagccgttgccgagcgcaggccggtcagcgcgtcgtcctacgaagagggcaaatggctcggcgtgatcccgcgcgactggtccggcgatgcggcgaaggagtatctcgccgacatcagggagaccgacccgatctatctgcgcgaaggcctcggccatcccggcctgctgccacgggtgatgaacaaggtcttggtcgacaatgcgatcctcggaccttggatccatgtcggcacccgcatgcagctgttgtcggcgggcaagatcggcgacgagctgacggcgcgcgccaaggtcatcggcaattacgacaagaagggccaccgcttcgtcgagctcgatgccctggtgctgggcagcggcatcccgctcgcgcattgctggcacatcgcgatcacccagccgcgcgaacaggcggcggcgtagatgtcggtcatcatcgactattatctgtcgctcaactcgccctggacattcatgggcagcgcaccgtttgccgagatcgcgcggcgccatagcgcgaccgtcaacgccaagccctgcaagttcggtccgatcttcgagcagaccggtggcttgccgctgccaaagcgctcaccgcagcggcaggcctaccgcctggtggagctgaggcgctggcgcgagttgcggggcattccgctcaacatcgagcccaagcatttcccgagcgacgaccttgcggcggcgcgtcttgtgattgctgccgccctgcagggcaaggatgcccaccgcctctcgctggaattcggccgcgccatctgggagcgcgaggaggcgctctccgacgcggatgtcatgtcggccgccgcgcaacgtgccgggctggacgccgcggccctgcgcgcaggcgctccgccggatgccgagcttgaccggctctacgagcagaacacgcaggatgcgctgaaagccggcgtcttcggcgcgccgagctacgtgctgccgtccggcgagattttctgggggcaggaccggctggagttcctggaacgcgcactgaaggcgttggcttgatcggacccgagcgggcgacgaggtagggtaggggcgaaccccatccacaggtacaattgtcataccccgcgcatgcggggtatccagtacgccgcggcttctcggttctatcgctgacgtctctggaatactggatcacccgctttagctttcgcgggtgatgacaatggtgggtgaggcgaaacgccgccttacgccgcgttcgccttggcatcctggatcgcgcgccagactttttccggcgtcagcggcatgttgatgtgcttgatgccgtactccgacagcgcgtcgaccaccgcgttgacgacgcagacgaggctgccggcacagccggcttcgccgcagcccttggtgccgagtgggttggatttcgccggcgagggatgatcgccgacctccatgggcggcacatcgccggcgcgcggcaacgcgtaatccatgaacgagccggtgatcggctggccggaggcgtcgtagctgacttcctccatcagcgcctggccgatgccctgcgcgacgccgccgtgcagctggccggcgacgatcatcggattgaccacgacgccgaaatcattgaccgcggagtagcgcacgatccgcgtcacgccggtgtcgggatcgatctcgacctcggcgacgtggcagccgttcgggaaggtcgaggcggtctccttggtggcgtgatcgacgtcgagcgtgtcaggcgcgccctcgggcatcttgccggcgcgcatccgctcggcgagctccatgatgccgatcgagcgatcggtgccggcgatggtgaagcggccctggccgaactcgatgtcggcctcggaggcctccagcatgtgcgcggccgccttcttgcccttctcgacgacgagcgcggaggcctcgacgatcgcctggccggttgcggtgatcgagcgcgaaccgccggtgccgttgccgaaccgaaccagatcgctgtcgccctgttcgagcgtgatgttctcgaagggcacgccgagctggtcggacagcacctgcgcgaacggcgtggcgtggccttggccgtaatcaagcgtgccggtggtgagcttcaccgagccgtccggctcgaaggtgatcttgccgagctcgcccgacggcggcgcggtgacttcgagataggagccgacggcgatgccgcgcagcttgccgttcttcctgctttccttcttgcgcttggcgaagttctcgtagtcggagatctccagcgccttctggaacacgccggcgaaatcgccgctgtcataggtgacgcctgatgccgccgggaacggcagctgcgacggcttgatgaagttgcgcttgcgcaaggtgacgcggctgatgcccatctcgtcggcagcggcatcgatcagccgctccatgtaatagttcgcctcgggccggccggcgccgcgataggcgcccatcaacgtggtgttggtcaagaccgtcttgatgtcgacgccgagcagcggcgtgcgatacacgctggcgaggttcttgccggtgttgagcgacagcgggccgggcgcgacgcctgtgatgtaggcgccgagattgccgtagccggacagccgcaccgcaaggaacttgccctcggcatcgagcgcgagctcggcatggatcagctgtgcgcggccctggctgtcggagaggaagctggtcgagcgttcgtcgagccacttcaccggacggccgagctcgcgcgccgcatgcgcgatgcaggtgtattcgggatagctgaggttcttcatcccgaacgagccgccgacattgccggtgaggatgcggaccttatcggcaggcacgttgagcagacgcgccatgatcgccttgttgccggagacgccctgggtcggcacttgcagcgtgaagcgctcggtctttttgtcgtaatgcgccagcgcgacgcgcggctccatcgagaccacggcgacgcgggtgttgacgatgtcgagttttgtcacatgcgcggcggcagcgaacgctgcctcgatcttggcggtgtcgccatagtgatagtcgagcgcgacgttattcgggatgttgtcgtagagttgcggcgcgccgggcttcgacgcctcggcggcgtcggtcaccgccggcagcggctcgatgtcgacctcgaccgcctcggccgcatcgcgcgcctgcgccgcggtctccgcgaccacgaaggccacgggatcgccgacgaagcgcaccttgtcggtcgcgagcgccgggcggttggtctgcagcagcggggagccgtcgcggttcttcagcggcaggccgcaggtgaagggcttgtagccggcggcggcaaggtcggcgccggtccagacgccgagcacgcccggcatcgccttggcggcttcggtgtcgatccccttgatcaatccgtgggcatgggaggagcggaccatccagcagatggcctggccgggcagggagaaatcgtcggtgtatctgcccttgccccgcaccagggtgtcgtcctcctttcgtcgaacgggctgtccgacaccatatttttgcagtgcgatagcgttgtcgagagaggcgggcggcgtatgatcttgcatcgaaaatgacctgaaatgcccggatttgctggagtttgggggcgcagacgagataacgcacgccccccttaacgacaacgcccgattgggcatggacccaatgtgaacggagtttgcgcagggctctgacgctgctaaagtttccgtgaacgacaattattcggcgggccccagggatcgcccctggggcgctgcggaaagacagttttgatgaacgaccatgtgcggctttgcgacggccctccggccagcgaagccccgtcagggttggttgcggcagccgcggaaagtggcgtctacgccgcgctcgaccttggcaccaataattgccggctcttgattgcctgtcccactggcgacgggttccgcgtggtcgactccttctcgcggatcatccggctcggcgaaggcatcgccgcgaccggctcgatcagcgaggctgcgatcgagcgcgccattgctgcgctcgccatttgcagcgacaagatccgctatcgcaaggcgcgccggctacggctgatcgccaccgaggcctgccgcgccgccggcaacgccgaaagctttcgcgcgcgcgtcgcggccgagaccggcatcgagctcgaggtgatcgatcgcgaaaccgaggcgacgctcgccgtgatcggctgctcgccgctgctcgacccgaagggccggggcgccatcctgttcgacatcggcggcggctcgaccgagctggtgcggatcgagcgcgatcccgccgcgcccgatgcgccgccgcgcatcaaggcgtggatgtcgatcccgctcggcgtcgtgacgctggccgagcatttcggcggcaagaatgtcaccagggatttgtatgcgcagatgatcgacgaggtcgcgcggcatgtcgcgccgttcgcggccgagcatggccgggatctgcgcgacatgcacatgctcggcacctcgggcaccgtcacgacgctcgccggcgttttcctcaacctgtcgcgctacgaccgccgccgcatcgacggcatctggatgaatgattgcgacgtcactgcgacgatccagaagctgctcggcatgagctacgaggcgcgcgtcaacaacagctgcatcagtgtcgagcgggccgacctcgtgctcgccggctgcgccatcctcgacgcgatccgcaacgcgttcccgatgccgcggctccgggtcgccgatcgcggcctgcgcgagggcatgctggtcgagatgatgcgcgaggacggcgcgctgcgggcgtgctagaacacgcccaatcacaccaatccaagaaagatcatggcgaaagacaccaccgggcggctgcacgtcacggtcaagagcggcggcaagcgaaagctgtcgtcaaaactctggctcgagcgccagctcaacgatccctatgtcgccaaggccaaggcgatgggctaccgctcgcgcgcggcgttcaagctgctcgagatcgacgacaaataccgcctgctcaagccgggcatgaccgtcgtcgacctcggtgccgcgcccggcggctggagccagatcgcggccaagcgaaccggggccgccgacggcaagggcaaggtggtcgcgatcgacttgctggagatgggcgagattcccggggtgacgttcgcgcagctcgacttcctcgaccacgacgcgccggaaaagctgatcgcgatgatgggcggccgcgccgatttcgtgatgtccgatatggccgccaacaccaccggccaccgcaagaccgaccagctgcgcatcatcggcctggtcgagaccgccgcgcatttcgccggcgaggtgctcaatcccggcggcacgttcctggcaaaagtgttccagagcggcgccgatgccgagctggtggcgcagctgaagcgcgactttgcagccgtgcgtcacgtcaagccggcggcgagccgccaggattcgtcggagcgctacgtgctggcgacggggtttcggggacagcagcagccgtcattgcgaggagcgtagcggagcggcaatccatcgttccgcagacgtgggggcatggcttgcttcgctccgctcgcaatgacgggactgaaactaccccagccgctgatccctcgcgttctgggtgttctcggtcgccgtcttgacggcgtcggcggcggcgcgcttctcggcgcccttgcggctcgagatgtcgatcggcttgcggccggagatttcgctgccggcgtcggccggcatctgccagaagaaccaggccgatgccgccgagatcaacgacaccacgatgaaggccggcgcgaacacgtcggcggagagttcggtctggtgatgcagcgccagcgtggtttcaactgagaacgcgccgaccgcgacgcccgctgacactgcgagctgctggttgacgctgacgagggtggtggcgcggctcatctgcggcgcctcgacctcggcataagcgaccgtgttgatcgcggtgaattgcagcgagcggaagaagccgccgaccaccaggatggtgaagatcagcatcagcggcgtcgagatcgtgaacagcgcgcaggcggcgaggaaggccgaactgaccacggcgttgaccgtcatcatgttgcggaagccgaatgccttgatgatgcgggccgccagcgtcttcatgcccatggcgccgaccgcggaggcgaacgtcacgaggccggactggaacggcgacaggccgaagccgacctgcatcaacagcggcagcaggaacggcagtgcgccgatgccgagccggaacatgaagccgccgacgatcgaggcgcgcatcgtcggcagccgcagcaggccgaaatcgagcaccggcgaaccggtgcgccgcgcatgcaggacatagagcgtcatcgagatcgagcccaccccgaccaaggcggcgacgatcggccagggcaggagattgaggcctgcgaccgacagcccgaaggcgatgccggcaaggccgatgccggccagcaccagtcccatcaggtcgaaacgctcggggtcttcgctcttgatcgggtcgatatatttcagcgccaggaagatgccgagcagcccgatcgggatgttgatcaggaagatccagtgccaggagaaataggtggtgatgaagccgccgagcggcggcccgatcaccggcccgatcagcgcggggaccgtgacccaggccatcgcattgaccagcgcgctcttgtcgaccgagcgcaacagcaccaatcgcccaaccggcgtcatcatcgcgccgccgaggccctgcaggatgcgggcgaacacgaaatcggtcaccgaggacgacagcgcgcagccgatcgagcccagcatgaacacggcgaccgcgccggcgaacacgattcgggcgccgaagcggtcggcggtccagccgctcgccgggatgaacaccgcgagcgacagcagataggacgtgatcgcgagcttgagcgtcagggggctggtgccgatatcggcggcgatcgccggcagcgaggtcgcaatcaccgtggagtccatgttttccatgaacagggcagtggccacgatgagcgggatcaggcgttgtttgttcatcaaaacaggacagctgtgctgaaaatgcgggcgagggggccatatcatcctgcctccggccacgctattgcggaacccggtaaaccacctaaatcctgcgtgacgctggtatgcatccgccagcgctcgagcaccgttccgacagggtctgaacggtgctctggattcatattttgacgcgttttcgtcacgcgaaccggtaaccacttcgctcgaaaacgctctggaaggtttgccgtgatctacgtcctcgccgctctgctgccgccgatcgggctgctcctgaacggacagccgttttcggccatcttcaacctggttctgatcgtgttttgcgcgattttcggactgtttttccacgtcttgctgctggtcccgtcggcccatgcggtgatcgcggtccacatgaagcgggaagaccggcgccaccgcgagatggtcgaggcgatccgccgccacgggccgccgccgggttacagggtcccctgaccaggttcctaaaaagcctgtgcatggctggcaaacactttgattcgtcatgccgccatgctatcgaccagcgtcaaccccaccgatgggcaccgattcgacggtgacgcagcaagcgtcgccgcaggcggcgttcatccgtaagaccattgcggccgcggccgcagataaggagttggcaatggccacgggatttccggctatccgagaagccttcacgttcgacgatgtgcttctgaagcccggtctgtccgacgtccttccctcggaagtcgatatccgctcgcgagtcacccgcgcgatctcgctcaacatcccgatcatggcgtccgcaatggacaccgtcaccgaagcgcgcatggcgatcgccatggcgcaggcaggcggcctcggcgtcatccaccgcaacttcgatccggacgggcaggccgcccaggtgcggcaggtcaagaagttcgaatccggcatggtggtcaatccgctgaccatcggccccgacgccacgcttgccgatgcgctggcgctgatgaaggagaacggcatctccggcattccggtggtcacaggtagcgccaagaacgtgccgggcaagctggtgggcattctgaccaaccgggacgtgcggttcgccagcgatccccgccagaaggtctcggagctgatgacgcacgagaacctcgtgaccgtgcgcgagggcgtcggccaggacgaggccaagcggatgctgcaccagcatcgcatcgagaagcttctggtcgtcgacgaccagtatcgctgcgtcggcctgatcaccgtgaaagacatcgagaaggcggtcgcccatccgctggcctgcaaggacgcacagggccggctgcgcgtcgccgccgccactacggtcggcgagaccggctatgagcgcaccgagcgcctgatcgatgccggggtcgatgttgtcgtggtcgacaccgcgcatggtcactcgcgccatgtgctcaacgccgtcaaccgcatcaagcggctctccaacgccgtgcaggtcgtcgccggcaatgtggccaccgaaggcggtgcgcaggccctgatcgatgccggcgccgactgcatcaaggtcggcatcgggccgggctcgatctgcaccacgcgcatcgtcgccggcgtcggcgtgccgcagctcaccgcgatcatggatgcggtggcggcggcgaagaaggctgacgtccccgtgatcgccgacggcggcatcaaatattccggcgacctcgccaaggcgctcgccgccggcgccgacatcgcgatggtcggctcgctgctcgccggcaccgacgagacgcccggcgaagtcttcctttggcagggccgctcctacaaggcctatcgcggcatgggctcggtcggcgcgatggcgcgcggctcggccgaccgctacttccagcaggacatcaaggacacgctgaagctcgtgcccgaaggcatcgagggccaggtgccctacaaggggccggtcggcaacgtgatgcaccagctcgccggcggcctccgcgcggcgatgggctatgtcggcgccaaggacatcaaggacttccacgacaaggccgagttcgtccgcatcaccggcgccggcctgcgcgagagccacgtccacgatgtcaccatcacccgcgaagccccgaactatccgggcggggtttagaaaccaccgtcgtcattccggggctcgcgaagcgagcgcccggaatccatcgggcggcaccgttggtggatgaatggattccgggctcgtgcttcgcacgccctcagatgcgcaattgcgcatcggggaatgacgacttgagagtcggcgccaccgttttcggcatgacgcccgtcatttcaaacaacatttcaaacagttcgacgcgaaagaacaaaatccgtctcccttgcggggaggcggattgcatgcctacgtgtgcgccacgaaccaatcacctcaagaggaaaatcatgtcccaaggaaagcgcatcgttctggcctcgcgtccgcatggcgagcccacgccggccaatttcaggctcgaggactacacgccgccgacgccgggcgcgggtgaggttctgctgcgcaccatctggctgtcgctggatccctatatgcgcggccgcatggccgacggtccgtcctatgccgcgccggtgccggtcggcggggtgatggaaggcggcactgtgagcgaggtgatcgcgtccaacaatcccgccttcgccaagggcgatatcgtgctgtcgcgcgcgggctggcagacccatgtgctgtccgacggcaaggggctcgccaagatcgattcgaagatcgcgccgatttcgaccgcggtcggcgtgctcggcatgcccggcatgaccgcctatacgggcctgctcgagatcggcaagccgcagccgggcgagacggtggtggttgctggtgcctccggtgcggtcggatcggcggtcggccagatcgcgaagatcaaaggcgcgcgcgcgatcggcatcgccggcggcaaggacaagtgcgcctacgtcaagaacgagctcggcttcgacgagtgcctcgaccatcgcgatcccaatctcgccgccaagctgaaggaagcctgcccgaagggcatcgacgtctatttcgagaatgtcggcggtgcagtgttcgacgcggtgtttccgctgctgaatgcgttcgcgcgcatcccggtctgcggcctgatcgcgcattacaacgacaccgaggcgcacgcgccgaaatgggccggcgcgatgatgcgcaacatcctgaccaagcggctgaccttccgcggcttcatcgtcagcgacttcgccgccatgcatggcgacttcctacgcgacatgtcgcaatgggtccgcgagggcaaggtcaagtacaaggagttcgtgactgaggggctggacagcgcgccggaggccttcatcggcctgctcaagggcgccaatttcggcaagcagcttgtgcgggtcgggcccgataaggcctgagcaagggcccctcagctctcattccgcgcaacaaagtatcaaaaacgccacattggcgagcttttgggggcctttcggcccccatttgcttgacggagacccggagcagttgattcaatatggctatatttcaggtgtagccatggtttttgaagcgattgttttcggggtcatcgtcctcgccgtcggctattgggcgacgatgttcgtcatgggccgccgcgacgacgtgttgcatggaaaattcgtcgaggaggagccggccgccgagccggcgcgccccacgccatacatgcgtcgcgcgcggaccgcgccggctgcgccgcagccaaacaaggaatcgcttcaggcgttgctcaccgtcatcaagcgggacctgcacgacgccgcgcgatagccacgcagctcaggcagccggctgcttgccgaacagcgtatccaggtcgacatcgacctggcccttggccctgacgtggcgcacctcgaagccatcgggctggaagcggtactcgacgagaccgacttccttgatgccgattacttcctgccgcgcatctgaaatgatgaagccggccgagggcgcccagacgtgcctgacatgctcgaacgtgtagtcgcggcgctggtgcacatggccgctgccgaccaggcgccagtcgaccttgccgaacatctcgatcaggcggcggcgcgccggctgcggcacgaagcggatcgcggtctcgacgcgctcggcatcgttggggacgtcgagatacagcggcttgtgcacgaacagcgcgaccggccggccgacagccttgtcgagcgcgcccgcgagccagtcgaattgctcggcctcgctgtcgagcccggtgttcatgatcagcgaattgaggccgatgaagcaccagccggcggcgtcgaaatgccagcggtcttcgccgagcaccgagttgaaggcgcggcgcgtctcctcggtcggcaactgcgcaggcgtggggccgaccgcggtcggattgtcgccgatgtcgtgattgccgggcagatagaggcaatcgaccggcagcgcgttgtgcagctccctggcgaacgtcatgtcgtcgcggctggtcggcccgtcgaacgagacgtcgccggagttgagcacgagatcgggccgcgtcgcatcgatatgctcgctgacgcgatgaaagttgtcgacgagcggcttgaagcggctcgcgaggtgggtgtcggagatctgggtcaggcgaaactgggacatgcatcgctccttttggccggagcataggtcggcgcgaagtcggaacgatgacgatttcgtcgtgttattcgctgctctgtttgatgtgttgtttgatgtcttgtttgaagagtctggtttgaagcgttggcgttgccgctagatcgcgagctgcatgatcgagggcgttggcagggcaggcggaaccatgccgagcctgccatccgccgaatcatcgaaccagccgatgccggggtcgatcgccttcagcgccgaggtgaggagatcgccgagcgtcgccgccgccagcgccctaccgtccgggatcgggggatgatgcgcatcgcgtcatcgcagaggaactgaaaccgccattggtcccgggagttggccatccgggctcggatcatggttcaacgggttaccgcgtacgcttcattgtcaggggcgcgcgcggcggctaagagggcggccgggcgcccgcggctgagggagattttggtgtcggttcaaatggttctattgccggtcttcatccagattgggctgaccttcgcgctgctgttcgggatggcgacgctgcgcacgcggacgctggcgagcggcgagaccaagatgcgggacatcgcgctgcgcgagccgaactggccggcccgcgccacccagtttgccaactgctttgccaaccagttcgagctgccggtgctgttctatgtcctgatcgccattgcgttgccgctgcgccgtgccgatctgttcatcgtgctgatgtcctgggtgttcgtggtgacgcggtttgcccatgccggcgtgttcgtcacctccaacgacgtgcggccgcgctcgctcgcctggttcgccggcgtgctggtgctggcggcgatgtggctgtatttcgcgctcaagctcctgctgctgatctgatgcgcccaaccgaaagagaacgatgactcccgctgcccggctttccgccgcgatcgaattgatcgccaccatcgacgcacagcgcattcccgcggcgaaagcgctgaaggaatggggcaccgcgcaccgttatgccggctccggcgatcgcgccgcgatctccggcctgatctgggacgtgctgcgccggcaagcctccgcggcctggctgatgcaggacgacagcgcccgcgcgcgcgtgctcggcatgctcaagctcgaacgcggcatggatgtcccgacgatctcggcgctgtgcgacggcggccgctttgcgccggatccgctgaccccgactgaagaggccgcattggcctcgcgtaccctcagcgacgcgccggcccatgtcgcgggcgattatccggactggcttgatccgcatctggcaaaggtgttcggcgacgaccgcgtagcggaggcgaccgcgatggccagccgcgcgccactcgatctgcgcgtcaacacccttaagggcaagcgcgagaaggtgctgccgcggctgtcgcatctcggcgccagggaaacgccgtggtcgccgctcggcctgcgcatcgagctcggcgccgatgcgcgcaatcccggcatccatgccgaggaggatttcatcaagggcgccatcgaggtgcaggacgagggctcgcagctcgccgcgctgttcgcggcggccaagcccggcgagcaggtgatcgatctctgcgccggcgccggcggcaagacgctggcgatcgcagctcagatgcagggcaagggccggctgatcgcgaccgacagcgacaagcgccagctcgcgccgatccatgagcggctgtcgcgcgccggcgtgcacaattgcgacgtccgcacgccgcgcggagaggaggaggtgctgtccgacatcaaggcgtccgccgacctcgtgttgatcgacgcgccgtgcaccggcaccggcacctggcgtcgcaatcccgacgccaaatggcggatgcgccccggcgctctcgaggtgcggctgaaggaccaggccgaggtgctcgagcgcgcggtgccgctggtgaaggccggcggccgcatcgcctacatcacctgctcggtgctggcggaggagaacggcgaacaggtcaaggcgttcatcgcgcggcatccggagttttcggtccagccgccggagcagaccgcatcggtgctgtgggacaaggccgaggtattcaccgaggccgcgttgctgtcggccgaaggcctgctgatgaccccgcgccgcaccggcacggacgggttcttcgtcgcggtgctgaagaaggcgtaaggctctctccgccgtcattgcgaggagcgtagcgaggaagcaatccatgcctccgcacatgcggtgcgatggattgcttcgccccgctcgcaatgacggataacccaccctacgcttcggagcacgcacccacaggcgccggcgtcctgctcaccacgatcacccagtacagcagcgcaaccgcgctgatcgcagcacccagcacgcagacgccgagccagcccgcggccgcatagacgatggtggaggcgatcgcgccgagcccgctgccgatcgaatagaacatcatgtagacgccgatcaggcggctcgacgcctcaggacgggtagcgacgatcaggctctggttggtgacatggatcgcctgcaccgcgaagtcgatcatgaccacgccgaccagcaccagccatagcgacgtgttgaggcaggcgatcggcgcccagccggcgagcatcagcagcagcgatagtccggtggtgcgctggccccagccgcgatcggcgagacggccggaattgcgcgccgccagcgcgccggcgaggccggcgatccctagcatcccgatcgtagtgtgcgagagcgacagcggcggtgccgccagcggcagcacgatcgagctccagaacgcgctgaagctcgcgaatgccagcagcgcgaacaccgcgcgttcgcgcagcaccggttcctcggcgaacagcgcggcggtcgagcgcaacagcttggtgtaagacgagccggccagcggctgcggcgcatgccggggcagggcacgcgcgagcagcgccgccatcaccagcatcagcgccgccgagatcaggtagaccatgcgccagccgccgagatcggccagcgtgcccgaggcgaagcgggcgagcaggatcccggagacgacgccgctctggatggtgccgatggtctgtccgcgctcggccggcgcggccagcgtcgcggcgaacgccacgatcacctggatgacgacggcgagcagcccgaccagcgccatcccgccgaacagcacgacggcgttcggcgcggtgccgacgacgacgagcgcgaccgccgacagagcgatctggccgacgatcagcttgcgtcggtcccagaggtcgccgagcgggacgatcagcatcagtccgaaggcgaggccgatctgggtcagcgtcaccacgatgccgatcgcggccggcgtgatgccgagatcccgcgccatggtgtcgagcagcggctgcgcggaatagatgttggctacgctcagaccgcaggcgatggcgaacagcagcacgatcgcgggggaaagtcgggttttggccatatcgccggacgttcccggtccggccgtcgttgcatcctgggtgatcattgcacatccgctccacattccaatctggtctcataatgagaccagttgcgtcgcgcgctgtctagtcctattttgagaccagttcggaatcgtgatcgaggaggaaggacgcgatgaagcggaccggattcgccaaggcggactgcccggtggcgcgcgcactggacgcgatcggcgactggtggtcgctgttgatcgtgcgcgacgcgttcgacggcctgcgccggttcggcgacttccagaagaatctcggcatcgccaagggcatgctgacgacgcggctgcgcacgctggtcgaactgggcgtgctcgagcaggtcgcagcgtccgacggcagcgcctatcaggaatacgcgctgacgaagcggggccacgacctgttcccggtcgtggtgggtctgcggcaatggggcgaggcgcatctctatgcgcgcggtgagccgcattcggtgctgctggaccaggccgggcaggcggtcgggcaactggtgctgccgtcgaagagcggcaaaccgctgggctgggcggatacgaaggtgaggaaggttgcagggcgcaggcggtgagtgccggcgccggagcgcagcgacgaagcaatccatcgctccgcatatgcggatagatggatcgctacgcggagcctgtcatccggcggcgctgcgcgccgaccgggtggctcgcaatgacggtggtgagaccggcctaatgcaccagatggttcgccgaaccctgcctgatcttgccctgatcatcgagccgcagatactcgcagatcttgttgccgcgttcgttctggtagaacaccacgacgctgtcgggcgagacatagagatcgatcagctcgaaatgcagctcgggcagtttcgccagcgctgcgctccaataggcccgcagctccgccttgccgcgcacggtgcctgaggcgccgaagccgaacgccggaatccggtccgaagtcatctcggtatcatcggaatacatcgccagcacgcgctcgaggtcccgcgcgttccaggcggcgatccagtcgtggccgagggccaagaggcgggacgggtcgtgaaaatcgggcatcggtttcctccttgattgcttatggtcaaattaggtcaataatactgacctatatcgatttgtccatgcccaaagaagaatgtgggcgcaacgctggccgcggttgcgggggcgggcgccgtcgcgtatctgcttgccatgacagcccagcacacagaccgtgaatcgtcggcgccctccgtggcctcggcgcatgacaagattctgattgtcgatttcggcagtcaggtgacgcaactgatcgcccgccgcgtccgcgagatgggcgtctattccgagatcgtgccgttccagaaggcggaggccgccttcaacgagatgaagccgaaggcggtgatcctctccggcggccccgagtccgttcacgagaccggctcgccgcgcgccccgcagttgatcttcgaatccggcgttcccgtgctcggcatctgctacggccagatgaccttggcggcccagctcggcggcgaggtcgagggcgggcatcaccgcgaattcggccgcgccgatgtcgaggtgaagaccgacagccagctgttcgacggcatctggaaccacggcgagaagcaccaggtgtggatgagccatggcgaccgcatcaccaaaatgccgcccggcttttccgtcgccggcacctcgccgaacgcgccgttcgcgatcatccaggacgagaagcggaagtattacggcctgatgttccaccccgaggtggtgcacacgcccgacggcgcaaaactcctgcgcaacttcgtccgcaaggtcgcggggctctccggcgactggaccatgcgcgccttccgcgaggaagcgatcgagaagatccgcgcccaggtgggcaccggcaaggtgatctgcggcctgtccggcggcgtcgattccgcggtcgcggcggtcctgatccacgaggcgatcggtgatcagctcacctgcgtgttcgtcgatcacggcctgctgcgtctcgacgaggccaagaccgtcgtcgacctgttccgcaaccactacaacatcccgctggtccatgtggacgcgtcgaaagagtttctcggcgagctcgcaggggtcaccgaccccgaggtgaagcgcaagaccatcgggcgcctgttcatcgacgtgttcgaggcggaagccaagaagattggcggtgccgcgttcctggcgcagggcacgctctatcctgatgtgatcgagagcgtctccttcaccggtggcccctcggtgaccatcaagtcgcaccacaatgtcggcggccttcctgatcgcatgaacatgaagctggtcgagcccttgcgcgaattgttcaaggacgaggtgcgcgtgctcggccgcgagctcggcctgcccgaagtcttcgtcggccgccacccgttccccggtcctggcctcgccatccgctgtcccggcgacatcaccagagagaagctcgacatcctgcgcaacgccgacgccgtctatatcgaccagatccgcaagcacggcctctatgacgcgatctggcaggccttcgccgtgctgctgccggtcaagaccgtcggcgtcatgggcgacggccgcacctacgaatacgtcgtcggcctgcgcgccgtcacctcgaccgacggcatgaccgccgacttctaccagttcgacatgaagtttctggccgagaccgcgacgcgcatcatcaacgaggtgaagggcgtgaaccgggtggtgtacgacgtgacgtcgaagccgccggggacgattgagtgggagtgaagttacgaagaacgaaaagccgaaagataccttgaattagctgtgggccggttgctctcgcatgagtgaagtaaagcttgatcattttcggcgggccgtcgctgatatatctgcgcatggcgacaacgatactcttccgttcgatgtagacaattggttcatcgcccagtgtccggaagatttggccaacctggcgttcgagtggagcaaccgggtagccaaagtagacaagaaaacggccaagcgccttatcgaagaattgccggtcttctcagaacggttgctggtgccgactggttcggcaggctttcggattactactaagattcatcccttttggaacgtctattttaatggcctgggaattgccattgctgaggccttggagcccaaacgtagcagccgcgtgcattcctataggttcgttccctccggcgactccttgttcaatcgcgattcatcgtggcgtgcatttcgacaagcaaccatcgacgaatgcccagaagcatcgagtggggccgtagtcgtccaaaccgacatatcgagcttctatgagcatgtttcgcatcataggcttgagaacttgatcgatgacctgttcggcccgtcatccaacctggcagttcagattgacaggtttctgagcaagtttgcagctggccgatcctttggcttacctgtcggcgggcaatgctcgcgagtactcgctgaacttctgctgacatcgatagacagtacccttaccgtcgaaggaatagcttggcggcgatacgttgacgattttgtgctgattacggccaatcaatcggaggcctatcgtgcactttctatcctgtcgcacgctcttgcagactatggcctcactctcaatagaaccaaaaccattattttgacggcgaagcactatgtcgattacgttgagacgcagctcggaacctccgacgatcaagcgaacaggctggctgagattgatctaaagtttgatccttactccgatacgcgagattccgattacgacgaactgagggagatcgtcgaggggttggatgttcgggcgctgctggacaacgagctccataaagcgcagccagacacatttctggtcactcaaatcggaagaactctaacgttacacgagccgagtgcagcgttccatctctgcaggacactgctctctccgggtaatcttcactcatttcgggcctcgtgggccaccataatgagaggtgtcgcatcgatctgcgccgattctcgttttgtcgagattcatggcgcggttgatcgccttctggactcagttcctacacactcgccacacttgttgagtgcggaagttagttgccttcattatttgcgggcactgcgctttcgacggacggacgagcgtgcagcgttcgtcctcaagatgcacgactccacgaagtcagagacggtgaagcgcgggtgtctcgattgctggcgcctttggaaggagagaacgatcttcacaagggaacgaaaccggtggaactcgttaagtaccgaggagcagcggatgctttggttcgctgcagcccagtttggcgacgagggatctaaattccgtagccaagtgaagaaaagtgtccttaacggttggaggctgggattcgagcgcggtagtgaccgtgagcaaacgtttgctgtgctttatagcaattgggcggaaggcgatcaccatgcgcctgccaattagagatcccaggacaattgctcgcgacatctcgggtgttttcgacgctctgttcccgcagctcgcgcaaggggtagtcgccagtttcaatcgcggggctattcctatcgacggatgcgaacccgtttctcaagagttggtagaagccacaagtgtccaacgggctatgctatttgaaacagctgtcgcagctgccgagcaactgatcgaaggagggtcggcggtcgattgggatttgtgcctaggtacagcggtggcgcgccagaaagcacattttgacgccaagcttccgcaatcgctgaccagtgtcgacaaggaggtgtcgctccatgtggcgaggaatttgattgcggcctttcggcaacttcgagcttcaagtggcaccgaggctcttgtgcgtggcccgcgtattccgggttttcaatgggtggcctctagtgtgggtgacttttccattggaagagcgctaattgaggtgaagtgcacgaacaagcacttcatatcttccgactaccgccagatcctaatgtactggcttctcagctattgtgcggcgcttgagactggtgccacggaatgggcggacggggtcttggtgaatcctcgtctgaatcgagtggttcggttctcatttaatggtcttattccaatcgtcggagcgggaaaatcaaaagtcgaactagtagaattgttttcgaccatgttgggaacccgtgtcccccttacgcctcgcgggcatgctgacgggccaggctaacaagcgtagcccggatgagcgtagcgatatccggggctctttcactcgcgtcgtggtctcccgcatatcgctgcgctcatgcgagctacacggctagctacgccggcagcagcccggcggcgcgatagttgtcgatcaaggagtcgtagagcgaaatatcggagcggcttctggccatcagctgcgcgccggcgacggcagcgaagatggcgcgggcgcgctgttcgctctttcttgcactgacgaggcgcgccgccaccagcagcttgctcagccacgccacgttgacgtcggcaaaggtctggacctcctgcttcaccgcgtccggcaggtcgtcgacctccgcggacatgaagctgcacaagcacatgcgattgtcgttctcgagcgccttgcgaaacacctcgggatatcggcgcaggcagcggaccggatccgcggtttccgccagcatcgcctcgagttgggcggcggtgtcctcccagtagcgccgcgcgacggctgcgccgagatcggccttgctcgggaaatggtgatagatgctggcggccttgatcccgacctcggcggcgagatcgcggaaattcaagccgccatagccgcgcgcctgcgcagttcgctttgctgccgccaagatggcctcccgagcgcttgaacccacgtcgtcctctcactgcttcgttatctaccaagtgacaggtagggcttgaccggccggatgtgaagtactcatatcgaacctaccaagtggcaggtagacaaactggagtttatgatgaagatctacgattggccgaccggcccatatccggcccgcgttcgcatcgccctggccgagaagaacctgcggtcgcaggtgcagttcgtcctggtcgatctctacaagggcgagcacaagaagccggaattcctcgccaagaactactcgggcacgctgccggtgctcgaactcgacgacgggaccttcatcggcgaatgctctgccattaccgagtaccttgatgcgctcgatggcgcgccgacgctgaccggcaggacgccgcgcgaaaagggcgtgatccacatgatgagcaagcgcgccgaactggagctgctcgaccccatcagcgtctatttccaccacgccacgccgggccttgggccgcatgtcgagatctatcagaaccccgaatggggcttccgtcagcgcgacaaggcgctcagggggatgcgctacttcgacggcattctgcaaagccagccgttcgtcgcgggcgaggcgttcacgatggccgatatcaccgtcatcggcggcctgatcttcgccggactcctgaaggtgccggtgcctgaggagtgcgaggctctttcggcgtggtacgcgatgatgcaggagcgtcccagcgtcgagaaccggatcacgatgtccgaaccggacatggcatctggttgaatggcatctggctgagcggagactgcacacgtccgctcttgcgaggcctgcgcgagggcggatcggcaagcatcccaagcctggcccggatgagccaacgggtcgcgcgaacgatcacattcaaacggctcaccggctataccccgaccgattggcgtcgtcgcacgcgttcacagcacacgtggggttcgactagcggacgcagctccggaacggcgcggcgatgtccgagcattcgcgtgtcatgtgcctattcgacgcgcctctctcttcccccgtcattccgggctcgccgaaggcgagagcccggaatccatcgggccgcataactcgtggatcaatggattccgggctctc

SEQ ID NO: 52 - DNA, 36760 bp, Bradyrhizobium enterica
  misc_feature (35761)..(35866): n is a, c, g, or t
cggcggcttccggccaggatacaatgtgcaggtggcgagcgcggccggcgagcagatcgtggccgggctcgacgtgaccaatattggttccgatcgcggcctcatgcagccaatgctagatcgcttgcgcgcgcggaccggccgccttccgggccgccatctcgttgatggcggctttggcagtgccgaggacatcgagtgggcgcatgatcaaggggttgaggtctattgtccgcccacgcaatccaagcacggtaccgatccctacctgccgcggcgcggcgacggcccgggcgtgttggcttggcgggcacggatggcaagcgagccgggcaaggcccagtacaagctccgatcgatctgcgagtgcatccacgctcgatggcgcaactggggcctgcggcaactcaccgtacgcggccttgaaaaggtccgtgccgtcgcgctctggttcgccctcaccaacaacgtcttacaagggcatcggctctacagcgcttaaacaccacatcggccacccggccgcagctgcgcaaaaaaccaaacccacccgacctacagacgtaaaaggcaaaacccgaaagcttcacaagctgtcagggtgacggtagttagagcgcgggaggtcaactaaaacctcggcgccctcttctcggcgaacgccttgatgccttccttgatctcgtcgccgcgcatgctgtcgcgatggcgctggtcggcgtcggcttcgtcgagctggccgcgggcgaattcgttgatcgcgcgcttcatgccggccatcgccttcggcgcattgccggccaggatcgtcgccagccggtcgacctcctcgtcgagcacgtcgggcggcaccattgcggtgaggtagccgatgcgcagcatctccggcgccgtgatcttctgcgcggtcaagaacagcatcttggcattgtcgacgccgagccgcgtgacgtagcgccggatgccgctcttgtaatagtgcagcccgagccgcgccgccggcatgaacatctcggcggtatcgacgccgatgcgaaagtcgcaggcgagcgcaaggtcggtcgagccgccatagacgccgccattgagccggcagatcgtcggcacagcgaggtcctcgagccggtcgaccacgacctcgaaggccgaacccgcgctctgctgctcgttggcgctcaccgcgcgctcggccaccgagttgagatcgtagccagcggagaatgcgcggccggttccggtcagcaccagcacccggatcgcgggatcggcctcgatccggtcgaacaggcggacgagctcgccgagatcctcggcctgcaggcggttgagatgcttcggccggttgagacggatcgtggcgcgcgcgccggcaatctcgagcacgggtccgctggcggtgtcggccgcgtcagccatcttggtctccatcattggttctcacgttcgcgccgcttcgcctcggcgtcgatggtctcggcgagatcgggatgccttgccatcaacaggcggaaatcgaccaggtcaagcaccaacagcctcgtcaccttgctggtcgagacgctggcgccgcgcttggcattgccgagcagcgccatctcgccgaagaacgcgccttcgccgagcttgaccttgcgtccgggcaggtcgacctcgacctcgccggcgccgacgaaatacatgcagtcgccattggtgtccttgcggatgatcatggtgcgcggcggcaagtcgatggtgcgcagcacctgggtgacgtcggcgatcgcggccgggccgagatgcgcgaagaacggcaccttgctgacggtctcccaggttctcaggaagttgtcgcggcgggtttcggcggcaaagccggtcgccagaatgccggtccacagcccgaacacgccgaggcccgagatcatcaccatggcggcgacgatccggccgagcggggtgatcggcaccacgtcgccatagccggtcgtggtcagcgtcaccaccgcccaccacagcgccgccggcacgctgccgaaggtctgcggctggacgtcccgctccaggaagtattcggcgaccgaggccaggaacaccaccatcaggaagatcacgagcacgctgagcagcgggccggactccaccaccagcacgcggcggagctggcgcaggccgggaatgccgggcaccaccttgagcacccagagcacgccgagcagccatgcggttttcgacgcgatgccgcagagcagcgccagcggcaccgccagcgcgccgatcgcatcgaccacgccggcgctggacagcgcgtagaaccaaagcttgtcctgccgccgcatatggcgcagccgcaccagccattcgaatatgaaataggcaaggcaggcccacagcagcgcgtcgacccagtgcggggccgcgtcataggccggctcgaccgtcagcagcgtcatcatggcgacaccgaccatgaccgcgacataggccaccgtggtcatgttgcggccggcggtggcggaaacgaagcgcgtcaaggccggaaggacgagcggcttggacatcggaacggagcttgcctgtcgctgaactgctggaatcgaggcccagcgcgtggccgggccgagcgcacaacgtgcctctcccggccgaggccgtcaacgcgccggctgcggcggcctgatcgtggcgaagaggccggcaggttgggcgaatggcctaaccatgttggcccgattttgcgcccgcgaatgtgagaaatcagacaaatcgtcgctttttccccgtatatcagggatgctggccgccgacgcgagggcaggcaacctcggcaggaatgaagcgactaataaggcgatcttgttcacttcttgagaattggttggtttccgatggatacctcacatctcgcggagcacgccggcgccgccggcagcttcttcgcatcgatcttcgtggtcgccacgctgtcgatgcggaccatgatcccgttgcgcgtcttcgccatcctgaccaacatcatcctgatcgcgaccgcgatcccgacccacaattacgcgaccctgatcctgcattccgtgctgctgccgatgaacacctaccgcctgcaccagatgctgcaactggtccgcaatgtgaagaggtcggtcaacagcgatttgtcgatggactggctgcggccattcacgacggagcgcaaatgcactgccggcgaagtcctgttctacaaggacgagaaggccgacagcatgttctatatcaccagcggccgcttccgcctggtcgagtccggcatcgagttgccggtcggcgccatcgtcggcgagttcggcatgctgtcgccgtcgaacacgcgaacccagacgctggaatgcgtcgaagccggcgtggtgctgtcggtgacctacgatcaggtcgagcagctttacgtccagaatccggcgttcggcttctacttcctgcgcctggcctctgcccgcctgttccagaatatctcgacgctcgagcagcagctcgcgcagcacaccacgccgaaggtcgcggagcctaagcctgcatgagcccggtgaccagttctggaggcgccgcagtgccggatgacgacagtctgctggcctcgctccgctacctgtttgccgacatcatcggcgacgaggacgaggggccgccggtgctgcccgacgcctgcccggatcatctcgggcctgttgtcaccgaggccatccatctgttgatcgcctatcagagcacgagctatgcccagctctatatcgaccggctcaatcgcttcgtcggccgccgcggcgtcgacgacgccctgctcggcgacatcgcccgcctgatggcggagcgcatggcctatgaggatgctatccggatcgcgcagctcaagctcggcgaagcccatgcggcgggcggcctcgccgcgcgctcggccgacgacgtcaagaagctccgccttgacgagttgatcgacgctttgccggagatggtcgccgatccgatccttgccgtgctcgatcagttcggctggcggcgccgccgggtctcgatccgcttcagcgccaacaatcgcttcagcgttcgccggctcaggatcgaggcgggcctgaagcgctggcggctgttctcggggcgctacgccaaggagcggctctgggtcgagcgctggctgcacatgatcgaccgcagcctgaccaagcagccgggcgcggctcgggcggtcgtgcagaccgcgaccatgatccagggctacggcgatccctatcgccagggcatcgcggactggcacctgatcatcgacgggctcgtcaagccgaccttcgatggcgcgctcgcgcttcccgacctcgccggcgccatcgccgaggcccgcgccgccatcatgcccgacccgcggcaagcggcgctgaagcgcaagatcgcggagattcgcgcgcgggtgccggtagcgtcccaggtgatctagcgcgccagccggtctatgttattgcgacgaccttggccagcgcctgctgcccggcttcggtcagctcggggagcgtcgtcctgccgctcttggcgcacttgatgatgtatctggcaacgcgcctgcgggtggcatgttcctcgccatggagcgcatcggcgcagacctggtcgagcgcgaagttcatggcggcaagcgtatgtgagtcaaaccgttcctcgatcgtcatagctgtcctgtcggtcctcttcgaggcgccgctatttgcggagtgtcagccattcgctgacttccatcacggtctcggtttgcctggctctcttcatcagcgtttcgcgttcccgtcccggtggcagcttgcgcgctgcaatgcgcgaatcttcggcgaatttttgcaggcggtcctccaacgatccgggaggccgcgacctgttacgcttctttttgatcatgctgcctccgacgtgagaccaaaagcttaggcaggtgccaaattcgcgtcgttaacccatgacattcgacaattgaaaaaattgcgatctccagtctcgcaagagcaggccgagggatcgcaagggcggcccgggcatcgcaaacgcgatgctgagaccacaggaacgatcttcggcgtcatgcgtaacaccattgtgttcgctgccttgctccccgaaaggtggcgaaacgctccggtgacgggccccggcgaattgtatcgccggggcccgcatatcgtctcaaattcaatgacgctcgccgaatggcgctttcgctgggcagcaactgcggcaatgcggcaggaacgatcctctcggaccgtcgttggcgccgggagatcacaggagaagtgacatggcgatggatgaaaaagagctcggaaacctgatcggcagcgacaaggtcgagggtaccgcggtctatggatcggatgagcgcaagatcggctcgatcgagcgcgtgatgatcgacaagaagagtggccgggtgtcctatgccgtgctcggcttcggcggcattctcggcctcggcaacgaccactatccgctgccctggcaatcgctcaaatacgacacgaagcttggtggctatgtcaccggcgtgaccgagagccagctgcgcggcgcgccgaaatacggcagcgaacgggactggaattgggccgacatcggcaccacccgggctgtgaacgactactacggtgtgccgctcgtctgagcgacgacggcttgcagggctggctctttgtaaggcttgttgcaaggcttgcctgttgcaaggcttttgaaacgccgacggcggcgatgccctgatagtaactgaactgtacggcgcttgaggacagtaaccgtcgagtcctccggcgtctgtacactagtgaacatacgtcaatagctgtgcaatgtaacatacgttattgaaaacggcttggcggttacccgattaagcatgcggggagaccaatgtcgttggcatcgctagtccgtaaattggagcagttcgtaaggctttcgccggtcgatcacgtcattctcaatcgtgcatcgactgagcgggtccggcattttgcaccgcgcgtcgatatcgtccgtgaaggcgagaaaccgaaggatgtccacctgatcctgtccggttgggcctgtcgctacaagcagctcgaggacggaaggcgccaggtggtgtcgttcttcctgcccggcgacatttgcgacgtgaacgtcttcatcctgcgcgagatggatcattcgatcggcaccatcaccgcggtgtcgatcgcggatctctcgcgcgagttcttcgacaaggtcgcggccgggcatccgcgcatcgtcaccgcgttctggtgggaaaccctggtcaatgcggcgatccagcgcgaatggaccatgagcctcggccagcgcacggcgctggagcggatcgctcatctgctctgcgagatctggctgcggctgcgtcttgccggtttgacccagggcgacagctgcgacttcccgttgacgcagggcgacctcgccgacgccactggactctccaaggtccatgtcaatcggacgctacaggagctgcgcgccgacgggctgatcgtgctcaagggcaagaccctgtccgtccccaatctcgaccggctgatgcgcgcaggcctgttcaatccgaactatctgcatatggatcacgaagggcggcagctcgacgccgtcggcacgcaatcggacgccgctgcgggatgaccggcgcgccccctcggagaggcgcaacgcttggtcctccatggatgcaagcaggaccgggcgcacagcggttcgcatgagcgcgttgctgtcgtcgtccgcttagaaacgatttccctgtgcttcgcgttattgaccattgtcgccgacaatgatggaggcgattggatggtgcgctatttcttcgatatcagagatggcactgggctctatccggatgaagaggggcttgagtttgaggatcaacgggccgcagaactggaggccgcccgtactctgggcgaactggcccgagaccttgcgtcactggacgaccggcatgattttgcgatcgaagtgcggaccgaaggcggccccgtcttcaaggtcgtcttcgttttcgaggcaacccatctgagacaacaaggcagcctcaactggaggtgatcacctcaccgggcgccgctggccggtcggagcggactcgatttttggctgggcgcggtatggtgccggcggcggtgcgtgtggcgcacgcaatgtcgcgtcattgttgggcttggtgattgccggcgtcgccggattggctggctccgcttcgaccggagcggcgcaaagtgttgtagcaagaaatccgagcgcaatcttcttacccatcgtcgatccctccgccaggcaaccagccgcatgggagcgcccaagcgtggcggaggtgagaccaaggcttgcggcgatcgcgccggagtgtctcgtttcgtcgcggattccatacatgaaccagccgaccaacgaccccggcaccggaggttggcggcaccagggtcgctactcccgatgcgcttgggggctgatgtcgggagctatgagtcgactcccgctgttccgcttcgttccagacggcgtcagccaattcctgatcgcgagcgcggatcagttggcgcccgcaaagtgaaatcgcgagcgggtgattcgacgcggcgatgcaccgcgccgcgcaggatcgcctcggtgaccgcgctgagcagcagtgtcagcagggtgaaggtgatgatctgcgcgcggttgctcttggcgaccggagggcgaggccgcggctgcatcggcgaaggcgcgggggcttcggcgctcatggttgactacctggctgatcacccgtccggaacggtgtgttgccgccgcggcgctgcccggtgaatccgtaaatgactataaaagaaagaaaatttcctgtgccgccgacggtatacctccgtgggggaatgcaatccccccaaccggccgccaccttggtccggctgacctgcgccgcgatggcgcatgaccatcgccactatcgaggcctgaacccggatgtgattttcgcggggccgcaggtgcattccgccgccggagatgtcataaatgagacaagcttcggtttgcggaattgtgctgacggcctgacccggatttcttgcaatcacattcatcgaagtaaaagggcgtcagcttgttgtttcctgccatgtcatcgtcggtgtcggttggtgccctggtgggatggatgttgcttctcaccgcaaagcacatcatcgccgacttcatgctgcagaacgcctggatggcgatcggcaaggaccagaagaccggctgggccatgccgctgctcgcgcattgcctggtccaccttgcggtcgcgctggcactgatcctggtggtggcgccgcggttctggtacgtcgccttcgtcgacttcgtgatccacatcatcgtcgatcgctgcaaaggcatctgcgcctcgcatttcggcgtgacgctggaatcgcaccatccctggttctggaccctgatcggggtcgaccaggcgctgcatcacctcaccggcttcgcgctgtcgatctacatggccgcgaactgagcgactcgcgacgccgcctcccacagccctgaccacgaccctcccgccgaagcccgttccgacgggatcctggttttgacgcgttttcttgacgcgaaccggtattcccttcgcttgaagacgcttttggccggggcggatgtgattcgcgtgcaacgggcaagcctcttcggcgacgaccggaggccgtggttaacctttcgttagaggattgcgcggcatcttcccgatcgagggggatttgcaaatgttttcaagccgcgacgccttcgagaacgatgcctgcccggttgccgacgacctgctcggccagatgtatcgcgccaatccgaacgggctttcgttgctggtcgctaatgtcgcgcccgatgtccgggcgaggctggcgctgttctgctatcggcgcagccatctgcacgcactcgcggtggcgattgcgtcgagctgcagcgagtgggagctggtcaattccggcggccgtgtcgggtcgacgctgtacgcgctgtcgcgcgagccggtccgtgccgcggccgtttcgcatggcggccgcaagccgatcacgctgtcgaccaagccgctgtcgagcttcgcgccggttgtcgatgacgagctcgacgacgaggacgtcagcgagacggtgactgtgacggcctaagccgcgctcaatccggctgcgcgctcgcgatgagcggcagcccgtgccggcgccgcgccatcgcgcattccgcgtcgcccggctggcaggtccggcacacgtccggccgcaccgcatagaccacgcagcgcgttgcctctccgatcttccccgacagcgccgagcagcgatcgccctcgcagcgcatccctgattgtcgtgcgttgacgaattgcgccgggatcaggtcgagttgcgtgtcgtcctcgatcgtgaagcgcggccagttctccgaatagctgcaacaggcgccgcaggactggcacgggctgttgccggccgcatcgattgcgtcgtcggccatcaggtgtccctcggtgcttcccacaccaggctgcgtcgccagcgcgccctgagcagatcgcgccgctccggatacttctcgtcgtggtaaacagcggtgaccacgcggtcggtgcggaagctgcggaaatccttgcgcagctcgcaccaggcggcaagcagccgcaccgcctcgtgatagccgactgcgatcggccagatcgtacgctcgctgtcgcggccgtgctcgtcgcgatagttcagcgtgatcttcttgccctcgtggatctggctgcgggtcctgaccatgtcgatgcggtcgggctcccggttccaggcggagcgggcgcggctcgccggctccagcacgaacggccgcagccggtcgggcacggtctcggcaatcttggccatcaggtcctcggcggcgcgcgccagcgccggatcggcgtggccgatcacccattgcgcgccgagcacgcaggcctcgatctcgtcgggtgtcagcatcaacggcggcaggtcaaaacccttctccaggatgtagcccatgccggcctcgccgcggatcggcacccgctgctcgatcaggctggcgatatcgcgatagatggtccgcttcgaggtctcgagctcggctgcgatcgcgtccgcagtcaaaggcttacgggtgcggcggagcacctggatgatctgaaacagccggtcggcgcgtctcatggcaactctcttggcaattctcttcagcgtcttgacgaccgtcttgacgcatctcgcggtgtctcgacgcgtcggcttttctgcgtcccgtccggctgctgctgacagcatgttggcagcaggtgggggctatatcaggacaacacctcaagtgaagggaatttgtccatggcgaatcttgatgaactcggtttccggcaagcgcagagcttcgcgctggaacagctggtcacggtctactccacctccggcgacctgcgttgggccctggtcgcgctgatcgcacagtctgtcagcacggtctggtcctacgggcgggcacggctggtcaagcgggttcgcgaggcggttcgccgcctcgcacccgcaaccccgctcggcagtgaatgccactactgctgacaccatgctggcagcaggggacagctagcctcaattcacgactacaggcgatcgggagcttcatatgattacgctttttggctttggcacgggcttcggtctgccggaaatcagtcctttcgtgaccaagaccgaggtccagctcaagatggccgggcttgcctacaccaaggagaaggcgatgccgccggcctctccgaagggccagctgccgttcatttccgacgacggcgagacgatcgccgattcgaccttcatccgcgcccatatcgagggcaaatacggtttcgatttcgacgcgccgctgagcctgcaggcgcgcgctcaggcctgggccttcgagcgcatgatcgagcatcacgtctactgggcgctggtcggcgcgcgctgggtcgacgataccaatttcgccaaggggcccgcgcatttcttcgacggagcgcccgatcacatgcgcgacaagctgcgcgaggacgcccagttccgggtggccgagaactatctgttgagcgggctcggccgccacgggcccgacgaggacgtcgacctcgcgatgcgctcgctgtttgcgctgtccgtgcagctcggcgacaagccttatctgatgggcaacgcgccctgcggcacggatgccactgcgttcggcgcgctggcggggatcctgacgccgttcttcgattcgccgctgcgcgagcgcaccgagaagttcgacaatctcaccgcctatgtcgcccgcatgatgcagcagtactatccggagttcgcctgggcgccgctgcagcagcaggcagcttagctggcagcaggggcgggctggcccttcaatgcggcgagctccgcctcgagttcggcaatacgctggtcgcgtgaggcgagggcttgcgccacgtcggccgcgtcgaacttctgcggaatgtgctgcgggcagttgctgtcccacgccgtgaccttgaacaggatcacctgctcagggcgcgcgcgatagccttggggcatcagcgaacgcgtcagcgccggatcgtcttcgaccacgcgcgcctcgccccagatcttgacgcgctgccggtgcgcataattcatcacgaagatgtacgccttcgggttctccgagagattgccctgcgtgatgaactgccggttgccgctgtagtcggcgaacgcgatggtgtgcttgtcgagcaccttgatgaagcccttcggtccgccacggtgctggatatagggctgaccgtcggctgatgcggtcgcgaagtagaagctgttggtgttggcgaggagggccgcgaggttctcgtcgatctcggtctgccagccgccatgcgcctcgacctcggcataggtgtcgcgcgagcccttgcgggtctggatcgccttgaccgccggggtgaaggcgacgtcgctgggataggtgtcagcatcaaacatctgggcctcccgaaacggctgtcctacccgtacaaatgggcgtttccggatcgcaagcaatcttgtgaattgacacttcactattgccgattatgcaatagttccatggaccggatcgatgccatgcaggccttcgtcgcggtggcggacctcgaggggtttgctcccgctgcccgcaagctcggtctgtcgccatccgccatcacccggctgatcgcggcactggaggagcggctgggcgcgcggctgctgcagcggacgacgcggcaggtgacgctgaccgacgccggctcgcgctatctggagcgggcgcggcggatcctcgccgacgtcgaggaggcggaggacgcggtggagagcgagcgcactcgccccgaaggccgcctggtgatctccgccccgttcggcttcgggcggctgcatgtcagtccggtcgtctccgcctacctgaagcgctatcccgaggtcggcgtcgacctgcggctgtcggaccgccgcatcaacctcgtcgaggatggcgtcgacctcgcggtcaggctcgggcacctgccggattcgaccctggtggcgcggcatgtcggccagatgcgccgcatcgtggtggcctcgcacggctatctcaagctccgcggcgagccgaagcggccggcggacttgacctcccatgacaccatccagttcggcgccatgaccgcaacgcccgactggcgctttgtggaggacggccaggagatccgcatcacgccgacgccgcgcttcaccagcaacagttcggattccgccatccagttcgccgagcaggacggcgggctgacccgggtgatggcctaccaggccgccgaatcactgaaggcgaagcgggtccgaatcgtgctcgccgcgttcgagcagccgccggtaccgatccatgtcgtctatccgacatcccgcctgttgtcggcgaaggtgcggaccttcatcgatctcgtcaccgagatcaccgactggcgcttcagctagctcaccggcggcttcttcggcaccacgcggaacgtgccgctggcgcgcgcgatcgtgacgccgtcggccttgatcaggctctgcgcgaagcagatcgtgctgccggtcttgatcacgtcgctctcgatcgcgagccactgcccgatattggccgagccgacgaaatcgaccgtgagcgagatcgtcacatatgaggtggtccagccggtcgcctggccgcagctatagcccatcgcgttgtcggaaagtgccgcgatcagcccgccatggatcaggccgcggccgttggtgtgcggccgggccagccgcaggccgatgatgacggatcgctcggtctttttctggtagagcggctcccagggctcggtgagggggctcttgcggaacagcggctcgaagccgtcaggaatgtcgggggcgatttgtgtatcggtggtcatctcaaatctcgcttatgacgttggattgacgccattgaacgcgatgtcgaggacggtttcaccgcctacaaagttttaaacgggattcacgtgggtgtttgaatgcggcgctggcctgttgccacgtcttcagctgtcatcgcccgcgaaagcgggcgatccagtatcccagagaccgcacggcatgaatcgagaaggcgcggcgtactggataccccgcatacgcggggtatgacggccgagattgcggagaggatgctgtttgacaaaagcatccgcgagcacccctagaacggcagccccacataattctccgacagcgaggtcgacgccgccttcgagctgacgaggtagtcgagctcggcgatctggatgcgcgcggcgaattcgccttcgtcggggaatttatgcagcatcgaggtcatccaccaggagaagcgcaccgccttccagacccgcgccagcgccctcgccgaataaccgttgaggccggcggaggatttctcgtcgtaaaattcgcgcagcgcctgcgacagataatgcacgtcgctggccgcaaggttcaggcccttggcgccggtcggcggcacgatatgcgaggcgtcgcctgcgaggaacatccggccgaaccgcatcggttcagcgacgaagctgcgcagcggcgcgatgctcttctcgatcgaggggccggtgatgatctcgtcggccgccttctggtcgagccgccgctttaactcatcccagaaccgctcgtcggaccactggtcgacatgatcgtcgagcgggcactgcacgtagtagcggctgcggtgggtcgagcgcatcgtgcacagcgcaaagccgcgctcgtgcttgttgtagatcagctccggcgaaaccggcggcgtctcggagaggatgccgagccagccgaacggatacacccgctcatagctggtgatggccgaggccggcacgctggcgcggctgatgccgtggaagccgtcgcagccggcgatgaaatcgcaggcgatttcgtggctgacgccgtccttgacgtagctgacgcgcggacgatcggtgccgaagtcgtgcggcttgacgtcggcggcggagtacaccgtggtcaggccggccgccttgcgggcattcatcagatcgagcgtgacctcggtctggccgtagatggtcacggtcttgccggtcgccgcatgcatgtcgatgcggtgccgcgcgccgccgaacgccagctcgacgccgtgatggaccaggccttcctggcgcagccgggcgccggcgccgacgcgctcgagcagtgacaccgtgccttcctcgagcaggccggcgcgaatccggcccagcacgtagtccggggtctgccgctcgagaatgacgttgtctacgccgaaagtatgaagtagttgcccaagcaacagtccggccggacctgcgcctatgattgctacttttgtccgcaatacctgctcctcccgatcggataggcttgagtcgggcgccccgcgccgggggctcaccgtcaacttgccttggcaactatatcatataacaggtttggcaaggtcgatttgccgcggacagctttcgccgcagcgcaagatgccggagggccgggtgcgacgaggcgtccgccccgcggatttcggcttgaatatctacgtgaattagataacatgttaagtaatgagaccgggcacaaagcccgccgtcctggagaggaggagacgtgatgaggagaagtttgtcggcgctgctgatggcagccgccatcgtgccggccgcagcagcccctgccctggcgcaggacaagaccgtcaatctcaaggtgtcgctctgggtgccgccggcgcatccgctggtgccggcgacgcaggcctgggccgccgacatcgagaaggcatcgggcggcaccatcaaggtcaccgtgtttccgtccgagcagctcggcaaggcgttcgaccattacgacatggcgcgcgacggcattgccgacgtcacctacgtcaatcccggctatcagcccggccgcttcccgatcgcggccgcgggccagctgccgttcgtattctcggacggcaagaagggcaccctggcgctgaacgagtggtaccacaaatacgcggccaccgagatgaaggataccaagctctgcttcgccttcatccacgatccgggcgcgctgcacggcaagaagaagatcgtgctgccgggcgacctctccggcgtcaaggtgcggccggcgcagagcacgatcggcgagatggtgaagatgttcggcggcaccaatgtgcaggcctccgcgccggaatcgcgcgacgcgatcgagcgcggcgtggccgacgagatcaccttcccgtggggctcgatcttcctgttcggcatcgacaaggtcgtgaagtaccacatggacgtgccgctctacacgacggttttcacctacaacatgaacctcgccaaatacaatgcgatgtcggatgcccagaagaaggtgatcgacgaccactgctcgccggaatgggcttccaaggtcaccgatccctggaccgatttcgaagccaacggccgcaccaagatgaaggcgctgcaaggccatgaggtctatccgctgacccctgatcagctcgccgaatggaagaaggcggtcaagccgctgcgcgacagctgggccgaggcggtgaagaaggccggcggcgatgccgagaaggtcgaggccgatctgcaggccacgctgaagaagtacgaggcggggatctaggcgacttcgtcattccgggatgcgccgcttggcgcaggccgcagatgcgcatcggggaatccatactcactgtggtggttatggattccgggttcgcgactttgtcgcgcccctcaggtgcgcaattgcgcaccgagaatgacgagccacgggaagcgaagatcaaatcatggccgcgaattccgaagtcacccaagacggcgcgatcaccggtccacccgagccggtgcgcaagaatttcatggatcgtttcatcgattcgatcgaatgggtggcggccttcttcgtcggcgtcgtcgcgctcaacaccttcaccgcggtgttcatgcgcaagttcttcgcggtgacgatcccggactattacaatttcggccagttcctgctcggcatcctgatcttctggggcattgcggcgacgagctatcgcggcacccacatcacggtggatctggtctgggccaatgcctcgccgcgttaccagcgctggatcgacatcttcgcgaccctggtgctgctgttcgtggtgtcggtgcagacctacacgctggtcgacaaggtgatcgataccaggaacagccatatcgtgacgatggacctcggcgtcccggtctggccgttcttcctggtgtcgtggatcggcgacgtctccgcggtgctgctgatcgcgatccgcacctaccgcctgatcttccacccggaagatatccatgatgccaagatcaagaccgcggagtagacggtaatgagtctcgacctgagtcccgaggccgtcgccgtcatcggctttgtcagcctgttcgtgctgatgctgctccgtgttcccgtcggcatggcgatgggcctcgtcggcatcactggctttggctatctcaccggctttgctcccgcgctgaaactggtcggccagaccacgatgcgcacggtgaccgactattccttcggcgtgatcccgatgttcttgttgatgggcgctttcgtgtccgtctcgggcatcagccgcgagctgttccgcgccgccaacacctttgtcggccattggaagggcgggctgggcatcgcgaccattgcggcctgcggcggcttcgccgcgatctcgggctcgtcggtcgccaccgccgccaccttttcagcggtcgcctatcccgagatgcgccgcttcggctatccgcaatcgttcgccaccggcgtgatcgcggtcggcggcacgctgggggcgatgctgccaccgtcgaccgtgctcgcggtgtacggcatcatcacccagcaggatatcggcaagctgttcatcgccggcgtcgtgccgggcctgctcgcgatcctgatgcacatggtcacgatcggcatcatcggcgtgacgcggccgggcttcctgccggcgggcaagaaggcgtcgtggcacgagcgcctggtggcgctgcgcgacgtctggtcgccgctgctgctgttcctgttcgtgatcggcggcctctatggcggcttcttcgtcccgaccgaagccggcgcggtcggcgcggtcggcgccttcatcatcggcctcctccgtggcaagctcaccaaggacggcatcctgcaatcgctgctgcaggcgacccgcaccgcggcagcggtgttcaccgtgctgattggcgcgctctgcttcggctatttcctcaccatcacccagacgccgcagcacgtcaccgaattcctcaccgggctcggcatcgggccctatggcgtgctggcgctgatcctgttgatgtatctggtgctcggctgcctgatggacgcgatggcgatggtgatccttaccgttccgatcgtgtttccggtggtcaccgcgctcggcttcgatccgatctggttcggcatcatcatcgtgatgacggtcgagctcgggttgatccatccgccggtcggcatgaacgtgttcgtgatcaagagcgtgatcaaggacgtcaacatgtcgacgatcttcgtcggcgtgctgccgttcgtgatcaccgacctgatccggctggtgatcctgatcctgttcccgctgctcgcgacctggctgccgcaacgcatgataggttagacggatgagcccagaactccgcaccaggtacgtcttcaccatcaccgcagcgatcgccgaggtgacgtccgccggcgatatcggcaccggcgtccgccgcatcattccgatcatcggcggcgaggtgaaaggcgagcggatcaacggcaaggtgctgcccttcggcgccgacttccagatcatccggccgagcgagctgatcgagctggaggcgaaatacgccttcgagaccgacgacggcgccgtcgtctatgtcgagaacaagggcatccggttcgggccggtcgaactcttgcacaagctcaagcgcggcgagcctgtcgatcccaagctgatctatttccgcaccgtgccgaaattcgagaccggcgccgagaagtaccgctggctgatggagcacatcttcataggctccgccgcccgccacgccgaccgcgtcgtgatcgacgtgcaccaggtgctgtgaagctccgggcgggctctgttcgcccgcacgagctgaagagcaaagctcggacagttcacggcgcaaaatgcgggagcatcagtcacagctggtgcaacacatcccgcgtcgtcctggcgaaagccaggacccattgccccaaatctcaattgtgcgcgacgtcgaggccacgatcccgttcatcatcaaatgcggtggttatgggtcctggctttcgccaggacgacgatcatgaacccatattgactcctgcgatgataattataaaatataactattctgaacgggaaacaataacgccatgggaaacgctgccgacgcgggtgacgccgcgctgctcaggatcgagacgcggggggcggtgctgacggtcgggctcaatcggcccgccaagcgcaatgcgctgaacgacggcatcatcctggcgctgcgggactgcttttccgccatcccggaagaaatcggcgcggtggtgatccatggcgtcggcgatcatttctcgtccggccttgacctctccgaactgaccgagcgcgacgccaccgaggggctggtgcattcccagatgtggcaccgcgtattcgaccgcatccagtattgccgcgtacctgtgatcgccgcgctgaagggcgctgtcatcggcggcgggctggagctggcctgcgccgcgcatatccgcgtcgccgagccgtcggcctatttcgcgctgcccgagggccagcgcggtatcttcgtcggcggcggcggatcggtgcggctgccgcgcctgatcggcgtgcccaggatggccgacatgatgttgaccggacgggtctattcggcgaccgagggctcagcctacggcttctcgcaatatctcaccgaagccgagggcgcgttgcccaaggcgctggagcttgccgagcgcgtcgccgcaaatgcgccgctgaccaacttcgcggtgttgcaggcgctgccgatgatcgccgaggccaatccgcagaccggcctgctgatggaatcgctgatggcgacggtggcgcagagcgacaaggaagccaagaagcggatccgcgccttcctggatcgcaagactgccaaggtgaagccgacatgagcgccacgatgtctgcatcagcagcgagtgtgcatccgttgcgcccgatctcgttcggcaatcccgccgtcaccgtcgagcgccgcgacgacggcacgatctatcttcgtcccaagctgaagctcgccgactttccggtacgcctcaccgaccggctgcatcactgggcgaacgctgagccgaaccgcgtgttcatggcggagcgcgccggtagcgactggcggcgaatcagctacgcgcagctgttcgaggccacacggcgcatcgcctccgcgctgatcgcgcgcggattgtcggcagaacggccgatcgtgatactgtcgggcaattcgatcgatcacgcgctgatcgcgctcggcgcgctctatgccggcattccgttctgtccggtctcgccggcctattcgctggtgtcgcgcgactacggcaagctcggttacgtcatcaagctgctgacgcccggtctggtcttcgtcgatgacgccgacaaattcgccgacgcgttgcgcgccaacgtggcgcccgaggtcgagatcgcggcaagccgcggcgcggtgcccggccgcgaggtgacacggctcgccgatctgatggcgacgccggaagacggccgcctcgacgcgatccatgcggccgtcggtccggacacgatcgcgaaattcctgctgacgtcgggttcgaccggcaacccgaaggccgtgatcaatacccagcggatgatctgcgccaaccaggtgatgctgcgcgagacgctggcgttcctgaaggacgagccgcctgtgatcgtcgactggctgccatggaatcacaccttcggcggcaaccacaatgtcgggctgacgctctataacggcggttcgatgtatctcgatgagggcaagccgatgcccggcggcatcgaggagaccgtgcgaaacctgcgcgagatctcgccgacggtctatttcaacgtacccaagggctatgaatcgctgctgccctatctgcgtgacgacgccgacttgcggtcgaaattcttccaccggctccacgccatgttcttttccggcgccgcgctgtcgccgttcgtctggaacagcctcgatgcgctcgccgtgcaggagaagggctatcgcgtccccatgctgaccgggctcggcgccaccgagacctcgccgttcttcatgtcggtacgtcccgacaccagccgctccggccatgtcgggcttccggtgtcgggcaatgacgcgaagctggtgcccaacaacggcaagctcgaggtccgcgccaggggcccgaacgtgacgcccggctactggcggcagcccgagttgaccgccaaggcgttcgacgaggaaggcttctacaagttcggcgatgcgttgaagcccgccaaccccggcgatctcgatgccgggttcgatttcgacggccgtatcgccgaggatttcaaactggcgagcggcacctgggtcagcgtcgggccgttgcgggcgcgcttcgtcggcatctgcgcgccgctggtccgcgacgtcgtgatcgcggggatcaaccgcgacgaactcacggcgatcgtgatcctcgatctcgatggctgccgcctgatcaatccggcgcttgcctctggcgacatcgcggccgcagccaacgatccgctggtgcgcgctgccttccgcgagcgcttcgcgcgtgtgcttgcaagcgccaccggctcgtcgaaccggatcgcgcgggcaatcctgctcgacgcgccgctgtcgatcgatcgtggcgaggtcaccgacaagggctcaatcaaccagcgcgcggtgcttgagcatcgcaccgacatcatcgatgcgctctatgcaccggtgccgccggcatcggtgatcacgtcaatctgattctcgaagagaggagaatgccatgcagttgaaggaccaggccgccatcgtcaccggcggcgcatcgggattgggcgctgcgacggcgcggcggctggccgcgcaaggcgccaaggttgcggtctgcgatctcaacgccaagctcgccgagagcgtcgcggcggagatcggcggcatttccgttgtctgcgacgtcgcggatgccgcggcagcagaagcagcggtcgcggccgccgccaaggcgcacggtcccgcgcgtgtgctggtgaattgcgccggcatcggcgttgcaaagcgcgtgatcggccgcgaaggcccgatggcgcttgccgacttcgacaaggtgatcaaggtcaatctgatcggctccttcaacatgctgcggctcgcgaccgccgagatgtcgaagctcgaaccgctcgcgaccggcgagcgcggcgtcgtgatctcgaccgcctcggtcgcggcctatgacggccagatcgggcaggcggcctattccgcctccaagggcggtatcgtcgcgatgacgctgccgatcgcgcgcgagctcgctcagttcggcatccgcgtgctgaccatcgcgcccggcctgttcatgacgccgttgctggccggcctgccgcaggaagcccaggactcgctcgctgccgcgatcccgttcccgcgccggctcggccaggccgacgagttcgcttcgctggcgctgcacatgatcgacaatccctatctgaacggcgaagtggtgcggctcgatgccgcgctccggatggcgccgcgctgacgcatgatccggaagagcgtgaacgctcttccggatcgccatgctcgatcgaggaaaaaccatgttcgtcaaccggcgtgacgtgcagatccagtggggcgattgcgaccccgccaacatcgtttactacccgcgctacttcgcgatgttcgacgattcgacctcgatcatgttcgaggccgccggctgctcgaaacaggacctggtccacaaatacggtctggtcggcattcccatggtcgatacgcgggcgaaattccacatcccgtcgacccatggcgactggatcaccatcgagagccggatcgagagcatcaagcgctcgagcttcgaggtggtgcaccgcgtgttcaagggcgagcggcttgcgatcgaggcattcgaaaccagggtgctggtcggccgccacccggacgatccggccaagctcaaatcggcaccgtttccgcaggagatcatcgaccgcttcatgaagggctgactcgcggtctctcatgactcgactttcggagcatgatcctcccggaaaaccggtttccacttttccggatcatgctctaaagaaggggctgaattggcccgcaaaaccggtttaaacccaaaaacatatccgcagggaggaatgaatgaggaaagccactcttgccgcagcagtgctcgcagcaggttttatgctgccgggcatgaccgcgcaggcgcagaccaatgaaatcaccatcggcatctcgatctcgaccaccggccccgccgcggcgctcggcatccccgagcgcaacgcgctggatttcgtgccgaaggagatcggcggcgtgccgctgaagctgatcgtgctcgacgacgccggcgatccgacggctgccaccacaaatacccggcgcttcgtcaccgagtccaaggccgacatcatcatgggctcctgcatcacgccgacgacgatcgcggtgtcgacggtcgccaacgaggccggcatcccgcatttcggcctcgcgccgttcccgatcaacgacgcccgcgcgaaatggtcggtcgacctgccgcagtcgattccgatcatgggcaaagtgctctacgagcacatgaaggcgcacaacatcaagaccgtcggctatatcggctattcggattcctacggcgacctctgggtcaacgacttcaaggcgcaggccgtgccgatgggcctgaccatgaccgacgaggagcgcttcgcgcgtccggatacgtcggtcgcgggccaggtgctgaagctcgtcgctgccaaccccgacgccatcctggtcggcgcctccggtaccgccgcagcgctgccgcagaccgcgctgcgcgagcgcggctacaagggcctgatctaccagacccacggcgccgccacgatggacttcatccgtatcgctggtgcctccgcggaaggcgtcatcatgtcggccggcccgatcatgtcgccggagacccagcccgacagcgcgctgaccaagaagccgggccttgcgctgaacacggcctacgaagccaagtacggcgccaacagccgcagccagttcgccggtcactcctacgatgcgttccaggtgctgaaccgcatcatcccggtggcgctgaagaccgccaagcccggcacggtggaattccgcgaggcgatccgccaggcgctgatctccgagaaggagatcgtcgcgtcccagggcgtctacaactggaccgaaaaggaccgctacggcctcgacgaccgctcgcgcatcctgctgacggtcaaggacggcaaatacgtcccggcgctgtgagccggccgcgatctgcgaaacgaaaagccggtcccgatccggggccggctttttctgcaggcaggattgtagctgagcgggtgagcgcgggcggtagctaacaggccgtccaaagcgcgccggaagttgggttgaggtaaacgccttgctatgttgactaccttagatagatcgaattagatcgcataattttgacgagttctagtccggtttgatcatgattgttgttaggtcggaatttcgggtagtccggggatttttgaacagacttgcggtgttctgtccgggcgcgcctctcaacggagaccctccggcacccgaatcgatcgcggcgaatttctacgccaggcaggggagcggcccgagacgctcagcttcgcttggcatcgacttgtctgacgttgaaataatcagtcttggcctccgcctgagactacaattagatcaacacagattgttcgaccatctgaaaggtacgtcaaaatttgaaatacttcgtgtgctcgcattgggcgaacagttttgcggggaccctattgatcgtcggcaacttgaagctctcgacgatatcgactactccatcgtaaattcgcttctcctctcgaatatcgttcgatcacctggctactccagactgtcagggtttctgcttcgtaagatcgatcatcatttagatagagcgatcacttcgagcattgacgactgtacatcgctctcggccgcgatgagctcctttggcttaagcaccgagttgcaatcgctagctcagctaagcgatgctttctacgctctgaagcaactcaagtggccgctgttcgggtccgacctattggtgcttttgcaggcgctatctgattcaacttggtccctgagcctcaagcagctagaaattttggtccctattgcaggggtgtggagactcaagaccattgtgagtcggctgatcgtattgaggtctgtgaacaacttcagcggtgaaagtgaatactttaagcgtcactcggatgaggtgttgatcgagtcaaagctgcccaaccatttgaaagcctacattgcgcgggggttaagcgacggagatttcttcaggagagccaagcgctatattacagatccaatagaaggatctatcgtattctcacttcaattctattcgtatttggaaagacaagaattcaacaagcttctaattttggtccgggatcaatatgagcgtgatcctgcttcgctggccttcataaactgggatatgtttcatgagctagcgcccgtaggctggggacagcagtacttactgaacatcttgttgtcggtgattctactttctccacagatcatatctcggttcgagagcgtcgagtttagctacggagaaggcttcgttactaaccagctgatcaactacgtaaattatctcaaatcccataatcaaggacttgcccagttcgcgcgtagtatctccaatatgagagagaaagcgcgaggcgttgtagctgctttcgttcttcagaagagcgtcattgaagtttacgcttacgcatttcgggacaagccagtcggttcgaagctgaacataccaatggctgatctggaggtttgtcatgcgcgaatgcgcttggcttacctcttccgcgaaagcgagacgctgccggccgactattgtgatcggataatcgcggaggaatcggcctttcgaaaaatgtaccgatttcaagcagtgtttcggagcagtcggattcgaattgattggaaatatctagagatggaaattgccgatacgattgatgcggatttcggcttcttgttcagaacgattcgtgtcgtcggagcgcctgcgacaggctcaacggccgatatcatggcgacgatcatcgctcaacgtgtctgtgaacttactctattcgaatcagcaacaagcctagagagggcgctcagcaataatttaaggcacggcgtcgtgatacctcgttttctgaaggtttttacggatgcaatatcaaatcagacttcgtcgaaaccgctcagcgggcaaacaaaccgggcgtggtatgaggcaactttcgctcttggggggagtcggcttttcaagctcgaagatgagataatttcactcatcggcgactaccaagaggaatggctgaaggtaaatcgagatggacgcttctatcaggaattggttcaagctgttgctactcttattatcaaacacattgcgaaggggcacaacttccgcttcgacgatctcgtcggccaactgatcgagcttcaaaagcgagcaatttccgacatcttgggggcctcacgcaatcacctggtcggagagattaggcctcttatcgagaagctcgttggtgtggctaacgtcgacatcaggccgctgaatgatatcggctcgagtgagtttttggacagcctaactatcaatctgcacaacgctttcaatcaggtttctggatggatctctctcgtcgatttcgaagaaagtagattgatcgaatttgagataggagaccttatcgacgaagagtccaacaccttcattatctcggaccgatcaaaggctaggattaagtttgagtgcgtcgatcggcgtagcaatcgcccgattcgcattaaagatatcaaggtgtcgggaagagcattcgaactgttcgatcaaatcattcacaatggcctttcgaatgcgcgcaagagaagcgtgcttagaaatgataccgagattctgattagagtgacgcgggatgtatcagatttaactatctggataggaaacaactttgcgaaggggcaactgggcgcaatgcgaaagcatcaagctcgagccaaaaaaattgtcacgcgcgccactagaccgcggaagtcgaagggcaaaagacgagtgaatagctacaaggagggagggtatggctttctcaaggtgatcgatgcttgtgaacggttgcttaaagttcctcccgtttttaactttccgatcattagcgccgaggatggccaattcattgtcgagattaagctgcccggcgccgaggctcttttggtatgaggcacgttctgatcgttgaggacaatgttctgaaggaggcccggataagggatgtcctcagcttgattccagagattgagttcactgtctgtaggtcggttaaggctgcatatccgttgcttgaggtgcagcaatggaatctcattttgctggatatgagctttcaagttagtcctgacagcggcaccgagattaagaagaagccattggctggccggcagatactccagtttatgcgagctcgtaatttgatgctcccggttatcgtcgttactcaacacgcgtcattctcagagggacagactgtcattgcaagtatcaaggatttggacacgaagcttcgacgttattttccgggaatctaccaagcaactgtctacgtcgatctagctacggacggctggcacgatgagttaattagctattctaagagagcgatctatggctagtaggttcaacatcctagtcatcgaggatgcacacgagaaaagcgatgcgattcgccttggattgctcgatcgggtttccgagcctgagttgacgatagagctagtgtcgaatttggttgaggctctgaagctcttagaggttaactactacgacttggtcatattggatatactcatcccggcaaccgaccgtggctctccgcgaactgaaaactcgagagcgatcattgaacagctcgcgtctggtagcctggtcatgcccgcttgtgtcgttgggctcactgcgtacgaacaggagtatcaagctgagcttcggtactatgcggagaatctattttcgatagagcagtttaggcctgacagcgatgattggctcaaaagcatcgtcagtaagatcaaattcatcgcaaaatggaaggcggcttatggccgagctcatagtgcgagttatgactatgacgtggtcttagttacggctcgttttcagaatgagtacaagccgattgtggatagcattcaatgggccagcggacccaacgatgacattcagctctttcgagataggcgtctcaaaacgggggcaattcggtttggagagcgtgttttgcgggctgctgtgtattgcattgagggaatggggttggcgcccgccgcggctgtggccgagcagcttattggtcaacttagaccgaagcttctggttatgttgggcatgtgctgcggctttaggcaggaaaagtgtcaaaatcggagtgcgttgggggatgttatcgtggctcggcaggctgcatgctgggatgagggaaagtacggggagttggctgaggaagggttcttctttaaccgagcgctgccggtatctgttgatggtcatctggaccgcctaatttcctcactgttggagtcggaaggagaaatcttcagatctgcggttagcgaggtgtggaacgaacgagggtcaaagaatctaagaaagaaatttaaggcggacgtgggtgactatcccgatgtgaagtacggactattgctttctggtagtagcgtcgtggcgcacgacgtgaagggggacgagataatcaaccgcttcccgaatgctctcgggctcgagatggaaatattcggcttcttcaaggccatagaattagcggtgggtgctaagcctgcaatgatggctgtaaagggcgttgctgactttggtgatggatccaagcacaagctatttcagccactagctagtaggctttcgtactgtgtggcgagcgagatcatctccaactactttaataggattgacgggcagtccaaaaagtaggtatcgaacggctcgttccatgctccatgccatccgcaaatagctctaaatcgcgctttagccttcgtgctggaagccgagatagctcgcggcgacgcccttgttggcggcgatgtcctttgcggagcctgacagcacgaactcgccgagctccatcacataggcgcggtcggcgatctgcagcgcggcctgggcgttctgctcgaccaagagcacggagacgccggctgcgcggagctcgccgacgatgcggaagatgtcggcgacgatgatcggggcgaggccgaggctcggctcgtccaacatcaggagtttcggcgcgcccatcagcgcacggcccatcgcgagcatctgctgctcgccgccggatagcgtgccggcaagttgcttgcggcgttccttgagccgcggaaacagcgtgtagacccgctccagcgaggtggcagcgacgcccttcgcgatccggaacgcgccgagctccagattgtcctcgacattcatggtgccgaacaattcgcgatgctccggcacgaggctcaggccggttgcgacgcggtcctcgatatccagcggcgccatgtcgacgccggcgaaggtggtgcggcccctcagcggcagcacgcccatgatggcgttgagcagcgtggtcttgccggcgccgttggcgccgatgatggtgacgatctcgttgcccgcgacctcgagcgagacgccgcgcaccgcctcgaccttgccgtaggaaatgtggacgtcggtgaccgacagcagcgcggtcatgcggcggctccgagataggccttgatcacgtcgggattgcgcttgatcgtggccggcgtgccctcggcgatcttggtgccgaaatcgagcaccacgatgcggtcggcgagatccatcacgaaacccatgtcgtgctcgaccagcagcaccgacatgccgccgtcgcgcaactgccggagcagcgcggccagccgctgcttctccatgtggcgcagtccggcggccggctcgtcgagcagcagcagcatcggatcgacgcacagcgcacgcgcgatctcgacgatgcgctgctggccgagcgacagcgaacccgcgagctgatcgatctggtcggacagcccgacgcgcgcgatctgccgtgcggcttccgccagcagtttcgcctcgtcagcgcgatcgagccgcagcatgctggagatcgcgccggaattgccgcgcagatgcgcgccgatcgcgacgttctccagcacggtcatgtcgggcaccagcttgacgtgctggaaggtgcgtgcgacgccgagcttgaccacttcctgtggcggcgcgttcgcgacttcgttgccgagcacggcgatcttgccactggtcgcggtcagcacgccggtgatcaggttgaaggtcgtgctcttgccggcgccgttggggccgatcagcgcgacgatctcgcgggcgttgacgtcgaacgagacgtcgttcaccgcgagcacgccgccgaactgcttgcgtgctttatcgatatgcagcagcaccggggacgttccgggcgcgcgctcacgatgctccaatttaactgaagtatccggcgtcttgcgtcccggcttgaacggcagcttcgacatgagccagggccaaacgccctgcggcgccagttgcaacaggagcacgagcatgatgccgaacacgatggtctcgagctggctctggccgccgaagatgtagggcaggtaactctgcagcacctccttcaggatcacgacgatggcggcgccgagcacgccgccccagacgtaaccggcgccgccgaccacggcgatgaacagatactcgatgccggcctgtgcgccgaacggcgtcgggttggcggcgcgttggaaatgcgcatagagccagccggacaggccggccagaacagcggcatagatgaacaccagcagcttggcgcgcggcgtctgcacgccgaacgcttcggccgcgacatggccgcgccgcaacgcgcggatggcgcgcccggtgcgggagtccaacaggttcatggtgagcagcgcggcgagcagcaccgcgatccagatcgcgtagtagatcgtatccgggctcagcatcttgaacgcgccgatcgagagcggtggaatgccggagatgccgtcgttgcggccgaggaattcgagtttgctgaacagatagaacaggccgatgccccaggcgatggtgccgagcggcagataatggcctgacagccgcaccgtgacgaggccgagcagcaccgcggcgatgccgctgaccacaagcgaggcgggcagcgtcagccacggcgagacgccgtaggcggtggtcagcaccgccgtggtgtaggcgccgaagccgcagaacgcggcctgtccgaacgaggtgagaccgccgacgccggtgagcagcaccagccccatcgcgaccagcgaggcgaggccgatattgtcgagcagcacgatccagaacggcgggatgcccggcagcagcgggatcaccgccagcacgagcgcgaagatgatgagaggcagccgctgcgccatcgcgctcaatccttctcttcttcgacctggggcgccgcgagcgagcgcagcaccaggacgggaaggatcagcgtgaacacgatgacttccttgaagttgctggcgtagaacgacgagaaggcctcgacgatgccgaccacgatggccgcgaccgccgtgaggggatagctgaccaggccgccgatgatggcggcgatgaagcccttcaggccgatcaggaagccggtgtcgtaatagagcgtggtgatcggcacgatcaggatgccggagatcgcgccgatgacggaagcgagcaggaatgcgatctggcccgacagcgtggtgcggatgccgaccaggcgggcgccgaggcgattgaccgcggtggcgcgcagcgccttgccggtcttggtgtagccgaagaacagccacagcgcgatgatgaagccgaccgtcaggccatagaccgcaaggctttgtccggtgaagcgcagcggacccgcggtcaccgcggcattcgacagcgccgggccgcgcaggccttcggcgccgaagaacacgaggcccaggccttgcagcgccaggtggcagccgaccgaggcgatcagcagcaccagcaccgaggtgtgcgcgatcggctggaacgcgatgcggtagaggaacagcccgatcgccgccacgatcagcagcgccagcgcgatgttgacggcgatcggcgtgtgcggaccgaccagcgcatagacgaggccgagcagcgccatgggaaaggcgatgttgagcgcgaccgagcggatcaccagccgcgcatgcagcgccctgcgggcgaagaacaggtcgagggcaaaagcgaccaagcccatcgcgaccgcaaggcgcgcggtgccgggcacctggccggtcgccagcatggcgtagctcagcgcgccataggtgacgaattcgccctgcgggatcaggatcacccgcgtcaccgcgaacaccagcaccagggcgagccccagcagtgcgtagatcgcgccattggtgatgccgtcctgcagcaggaacagcatgatcgtcgtgttcaaggccgagcgctccccctcaagcgtcgggccgccgcagccggctgtgccggtccggtcggccgatatcggctgttgatagccgccgatattagatatagcggataacaattattagatataatctcaaggtccccgagcgtcccgcggggttttgtaccgggattgcgagcctggagcgatgactgtttcaaagaccgcctccgatgccgtccgttcgtcgcgcgccctgcgccgggaaccggtcgatcctgccggggacgacagcatgctgcaactgggcgaactgtccgggttgctcggctattcgctcaaacgcgcgcagctcaaggtgttcgaggacttcctgcgctgcgtcgcgccgctgcagctgacgccggcgcagttctcggtgctgctgctgctcgacaagaatccgggccgcaaccagaccgagatcgccaacacgctcggcatcctcaggccgaatttcgtcgcgatgctcgacgcgctggagagccgcgacctttgcgcgcggatgcgctcgaccaacgaccgccgctcccacatcctggtcctgaccgacaagggccgcgcggtgctggcgcgcgccaagaagctggtcggcaacaagcacgaggcgcggctgatcgaggtgcttggcccggccaaccacgccgcgctgctggagatgctggcgaagctggcgcaggagttttgaggtctcgtcattccggggctcgcgaagcgagagcccggaatccattgcgccgcaggcgtcgtggctgaatggattccgggctcagcccttcgggctgccccggaatgacggtgaactaatccaccaggatcacgcgcacatcgttgacgttggtcagcgtcggcccggtcagcagcaaatcgccggtctgcgcgaagaagccggtggcgtcgttgttctcgagataggtcttgggatcgaggccgatcgctttcatcttcgcaaacgtcacctggtcgatcacggccccggccgggtcggtcgcgctgccggcgccgccgtcggcgccgtcggtgtcggcggcgagcgccgcgatgccgggcgtgtccttgagcaggccggcgagcgccagcgcatattcctggttgggtccgccgcggccgttgccgcgcacggtcaccgtgagctcgccgccggagacgatcgcaacgcgcttgccctcgctgcgcgccttcaatgcaagcctcgcatgttcggccgcgacctcgcgggcctcgccttcgagatcggcgccgagcgcgatggtctcgtagccggcgtcctgcgcgaccttcaccgcggcgtcgatcgaggccttcggcttcgccagcaattcgaacgtcgcccgcgcaaaggcgggatcgccgggcttgcagctctcgttgctgggatcgtcgagcgcgcggcgcaccgcgtcatcgacggagagattgtatttggcgaccagcgcgcgggcatccgccagcgtggtcggatccggcactgtcggccccgaggcgatcgcggaggggtcgtcatgcggcacgtccgaaatcgccagcgtgacgatctcggcggcgcgctggccggcgcgcgccagccgtccgcccttgatccgcgacagatgcttgcggacgatgttcatctcgccgatcggcgcgccggagcgcagcagcgcgcggttgacctgctgcttctgggcaaagctcacccccgcgaccggcgcgatccagttcgccgagccaccgccggtcaagagcaccagcagcagatcgtcgggtgtggcttccgccgccagccgcagcgtatcgtcggccgcgcgcaggccggcttcatcgggcaccgggtggccggcctcgaccaccttgatgcggcgggtcggcacgccatggccgtggcgggtggtggcgatgccgaccagccgcgacggttcgaggccgagcgtgtcgagatagtgccgttccgccgcggcggccatggcgccggcgcccttgcctgcggcaaggcagatcacgcggcctttcggcgccggccgcagccgcgacgccagcacgacatcgggatgtgcagccgccactgcggcatcgaagatcgaacgcaggaagggacgacggtcggtcatggctatgcctttgtgagacggatcagttgccgccaatttcgccgctgatgacgtcgccgaacaactgccagcgctcgcccttgaactgcatcagctgcaattgctcgatcggctggaagtcgttgggcccggtcgacagcgtcacgccgggcagcaggccgccttgcggaaactgcttcaggctcgccgcctgcttcatcacattggcgcgggtgaggtcgtccccgcagcggcgcagcacctcgaccatcgtggtcgccatgttgtagccggtcatcgccgaggcatcggcgcgattggtgtcgggcaaatatttggcgagcagttcgtcgaacgccttcatgccggcgtcgtctttccactgcggatcgctggcgtccttggcgtaggccgccgagatgacgccctgcgcattgtcgagcccggccggacgcatcaccgtcgcggtggaggccgagacgttggagacgatcgtcaccggcttccagttcatctcgccgagcttcttgatcgcctgggcgccgaatttcggcgtggtgaagaagatgatgacatccggactggaggatttcagccgcaccacgtgggaatcgatggtcggctcggcgacctcgtagctctccttggcgacgatccgcgcgggatcgctggcgaagccgtcttccaggcccttgaggtagtccttgcccatgtcgtcgttctggtagagcaccgcgaccttggcggcgggtttctccttgagcagatatttcgcgtagatccgcgactcgctctggtagctcggcagccagcccatggtccaagggaaggtcttcggatcgttccacttggtggcgccggtggcgacgaacagctgcggcaccttcttggcgttgagatatttctggatcgcggtgttggacggcgtgccgagcgtgtggaagatcagcagcacctcgtcgctctcgaccagcttgcgggcctgctcnnnnnnnnnnnnnnnnnnnnnnnnnnnnnnnnnnnnnnnnnnnnnnnnnnnnnnnnnnnnnnnnnnnnnnnnnnnnnnnnnnnnnnnnnnnnnnnnnnnnnnnnnnagcttgcggccgttgatgccgccgtcgtcgttgaccttcttgaacaccgccgtcatcgccttgccgaccacgccataggccgatgccgggccgctatagggcacgatgttgccgatcttgatctcggtatcgctcgctccggtgtcgtatttcttctgcgccagggcggcgctgccgcttgtcgcgagcagggccaggccgaaaacggcggttgcggcacggtgaaggacgggcgtggacaatttgcggatctcctgttcttgcgcgcccggcgggaggcgctcggcttcttgttggctctgccgtacctagagcacgatgagatttggttgaatagcgtatcgtccgctgaagtgtaaacggcccgtgtccttcggttttccggatagagcgatagcaaacgaaaggcaaagaaaaacccctgcgatcgggtcgcagggggcagatttttcacgatgcgggaaagttctcagccgccgacgtcggcgctgatgacctcgccgaacagttcccatttgtcgcccttgaacttcatcagctgcaactggctgatcggggcgaaatcattcgcggcggtattgatcttgataccgggcagcagcacttcggtgcggaagtcctgcaggctcgcggcctgcttcatgatgttctcgcgcgtcagattgtcgccgcactgcttgagcacctggaccagggtctgcgccacgccgaagccgaccacggtgccgccgtcgagcttgtcgccctcggggaagtccttggccatgaaggcgtagaattccttcatgccgggatcattgtcccattgcttgtcggaagcgtccttcagataggcggcggagatgatgtcctgcgcgttctcgaagccggccggcttgatcacgctgccgaccg

SEQ ID NO: 53 - DNA, 34602 bp, Bradyrhizobium enterica
gcacaacggcctgagcgggctgcgcttctcgatctgcgcttcggcgccgtcgaactggcccgaccgcaaaccaagttcctgcgccatctgccgaaaagcctacccttgatcctggtcgatgtgcgcgagatcgagccgcaggccgggatcgagccgctgcactggcggctgctcaccacgcatccggtgacgaatgcagaagaggcctggcgcattatcgaatggtacaagcggcggtggctgatcgagcagttcttccgcatcttgaagacacaaggcctcaagctcgaagacagtcagatcgggaccgccgagcggcttctcaagctggtcgcgatcgcggccaaggcggcagtcatctcccttcagcttgtgcaggcgcgcgatggtcgcgacaaccagtctgtccgaattgccttcaatgctggggaagtcgctacacttgccgccctcaatcgcaacctcgaagcccaaagcaagcggctgagaaacccgcacccgcctgacagcctcgcttgggccgcctggattatcggccggctcggcggctgggacggctatccatcgtccaaaccgccgggccccatcactatgaaacacggcctgcaatacttccacgccgcagccgctggatggtccctcagagatctgtgcatgccctagggctttcgccgggacgacggggaatttattgcgacaaattcctcaacaacaactccagcgccgccttcgcgaacgcctgcatgttggcctgccggtcgctgcttccggtctccaatgtgatcacctgctgcctggaacctgcgaccgccatgcagctgtagccggcggcatcgccgtagcggttcccggtcgggccggcggcgccggtctccgacaagccccaatcggtcgacagccgttcgcggatctggcgcgcaagcagctgcgcatagggttcagacgacgagcggagcccgcgcattgcgtcgtccggaatatccatcaacgcgcgccgcgcatcgcgggtgtagatcacaccgccgccgaggaagtaggccgacgcgcccggtactgcgagcagcgatgccgagatcagcccgccggtggatgattccgcaaccgcaatcgtctgcttgttcgcgatcagtttggcggcgacctgttcagcgatggatgtgagtgcgttcatcggcgctctttctcgttgcttgccatgaaattcctggagggcgttctgccttcctagcacatcacatcggtccctgccgagttgcggatcgcggcccggcctgcttgaatatcggacaataatcaagctgtgcctcacaaggtgttgtgagcgtgcgcggagccgaggaaacaccatgacgtcgccgatcgcgggcggcgtggattgcgatctgcatcccgccgtgcctcatctcaccagcctgctgccgtatttgaacgactactggcgcgaccaggtgacgacgcgcggcatgaccgacctgatctcgcaatcctacccgaccaattcgccgatctcgtcgcggccggactggcggcccgcacaaggcaagccgggctcgagcctcgccgacatgcagcaccaggcactcgacaggttcggcacggcctacggaatctgcaatccgctctacggcgtgcagatggtgttctccgaggacatggccgatgcgttctgccgtgcgctgaacgactggctggtcaaggaatggctcgacaaggacgatcgcctgcgcggctcgatcgtgatccccgtgcagagcatcgagaaggcggtcgccgagatcgagcgctgtgcgcaggacaagcgtttcgtgcaggtgctgatgctcgtgatgggcgacatgccgctcggcaagcgccactactggccgatctacgccgcggccgagcgacttggcctgccgatcggcatccatgccggcagtgcctatcataacccgccgagctcggtcggctggggctcctaccacatcgaggactatgtcgcgcaggcgcaggcgttccagacccagctcaccagcttgatcgtcgagggtgtgttcgcgcgccacccgaagctgaagatggtgatgctggaatccggcttcacctggctgccgccgttcctgtggcggctacacaaattctggcgcggcgtgcgcatggaaacgccgtgggtcgaccggccgccgctggagattgtgcgtagcaacatccgcttctcgctgcaaccggtcgatgctccgccggaacctgagacgctgaatcggctgttcgaccatatgcagtcggacgaattgctcctattctcatcagactacccgcactggcaattcgacggtgacgaggtgctgccgccggggttgtcgcccgacctggtccgcaagatcataatcgacaatccgcatgcgacctatccgcgcctgaaggtggcgcatgataccgaaaagcggcccccggttttcggacaagatcatgcccagaactgacaaggagacgacgcgatgaacatccagattcgggaacgcccggaagccgcatcgtccaccggcatcaagaccgcgatcgcggattgtgacatccatccggcacgcgcgaccaaggacgagttgtatccttatctggccaagcgctggcacgcgcatctcgaaaccttcggcatccaggcctatcagggcatgatggaagggccgccctatccgaaggcgcaaccgaacgcgtcgcgccgcgatgcctatccgccggaaggcggcccgcagggctcgtcgctgtccttcatgcagaagcagcatctcgatcccaacaatgtcgcgctcggcgtgctcaacccgctcgccaccggacagggactccgcaaccaggatctcgccggcgcggtctgcgcggcgatcaacgactggcagatcgagaaatggaccagcaaggactcccggctgaagggctcggtcgtcgtcgccaatgaggatggcgcctcggccgcggccgagatccgcaagcgcgccggcgacagcaatttcgtccaggtgctgctgctgagccgcaatgtcgagccgctcggccagcgccgctactggccgatctatgaggcggcccaggaagtgggtctcccgatcggcgtgcatgccttcggcttcggcggcaacccgatcaccgcctcgggctggccaagccactacatcgaggagatggtcggccattcgcagtgccagcagaccgcgctggcgagcctcgtgctcgaaggcgtgttcgaacgcttcccgaacctgaagatggtgatggtcgaggccggcttcggctgggcgccgtcgctggcgtggcggctcgacaaggtgttcgcgcggctgcacagcgaggtgccgcatttgaaacgcaagccgtcggagtatatccgcgatcacatctggtggacgacgcagccgatggaggacccggagagccgcgaccatctattccagaccatcgagtggatcggctgggacaagctgttgttcgcgaccgactacccgcattgggattacgacgagccgtcgcgcgtgctgccggccggcgtcagcgacgccaaccggcaagcgttctatctcgacaatgcgaagcagctttacggtatctcatagatggcgcgtcatgtgattgccccggtggacgaactgccgccgggttcgcgaaagttcctcgagatcgacgggcggccgatcgccgtcttcaacgtcaagggtgagttcttcggcctgttgaaccgctgcccgcaccaaggtgcggcgctatgcgaagggccgctgatcgggctcgcgtcgtcctccgatccgggcgagatcgagtatacaaaactcggcgagattctgcggtgcccctggcacggctgggagttcgatatccgcaccggccagtcctattgtgatccgcgccgcttccgcgtgcgcgcctatcctgtcagtgtcgagccgggcaccaatgtggtgaagggcccgtatgtcgccgagaccatcaaggttgcggtggaaagcgactacgtggtggtcgacctgtagctaatcgtcattccggggcgccgcgaagcggtgagcccggaatccatttttccggttgtttgtgtggcctgatggattccgggctcacgccatccaagtcggctgttgccgacttggacacttaacatctgccgaactcgggtaaacccgagttcgggcggcgtgccccggaatgacgggagaagtcactccgccatcatccgccgttcccgggcatagcgcaccagcgcgacgaagcggtagatgccgtgaacgaatttgccgtagggcatggtgatgaacagcgcgaataccacgccgagatgcagcgccagcagcgggcccatcgcggcggtctcacgccacagcagcaaggcgaggccgctgatgctggtcaggaacagcatcaggataaacgcgctgtccatgcccttggcctgctcgtcgaccagcacgcggtcgcgcttccatttctccgacaagagtccaatgggcccgaccacgaggccgatgccaccgagcgtgccgagcaccaccggcaggtcccaccacgcatagggcgcctcgcgcgcgaaaaggtagtggtagagcgtgccgacgcaggtcgcggcgaagcacagcgcgaagccgtagaaagtgaagtggtgatacagcttgcggcggtcggtcggatggtcgtcctcgttgaagcagccgacgccgccgccgtcgagataacgtagctcgccggcgtcgcggactgcctgcaacagcgatttcgtatccgtcgtcatgccgaccggttcgccgatatcgcgccagaacgcgcgcacgcccatcgccagcgccaggatcgcgtacagcaaagcgaggccgaacagcagcgccatggcgttgtgcggcatcagtttgtagaacgcgccggggccggtgtggatgccggtgagcacgccgcggtcgttgagcgcggcgaagccgaagatgaaggccgcgacgctgagcgccgcgatcaagctgatgacgaggccgttgcgggcgaacgcgccggagaacgcgcgcggccaggcataggcagcgtaggactcggcgcgtgccaccgccagcgtcttcggcacgttgacgttgaattcatgcggcggcgagaactggcaatcggtgtagcaggcgccgcaggaatggcagagattggcgaggtagttgaggtcgccgtcggagaaggcgcggcgcatctccatcgcaggaaacaccgcgcacagcccctcgcaatagcggcaggaattgcacaccgtcatcaaacggtcggcttcctgcaatgtcctcgtcccgtgcatcgcgtgttgctctttgtttgacgcgttttcctgacgcgaaccggtgtccacttcgcttgaaaacgctatgttacttcttggtcagccctttgccttccagccatgtctggatcaggccggcgacctcggcattgttcttgtccatcatcatcatgtgcgaattgcccttgatcccgaccttgggcaggtcgaccacatccgcgctgccgccggcggcgctgatggcgtcggcgaaggcaccaccggtggcgcggatcttgggccagcgcgaatcccgctcgatgtaatcgccatagaccatcagcgtcgggatgttcttcaacgcgtcgaccttggcgggatcgccgacgccggccggctcgatcgcgatcagcgccttgaccttgtcgggccgcgcctgtgcaactttgaagccgaatgtgccggcctggctgtggaacaggatgatgcaggggccgacgcgatcgatctcggcgatgtaggccgcgatggtcgcgtcatcggtcgtggtccagcgcggcacgttctgcttgacgaaattctcgtagcccgcgttcgggaactggctgcctggcatcagcttgcgcttggcgggatccggatcataggagtcggggccgtcgccgatccgaaaccgctggaacggattcgacgtggtgaggaacaccggctcgcccttgaagatatcggggtattgcgcccagccggcgcggccgcgctcgaccgcgtccgaattgtagacgctccagcccttgcgcaggaaatagttcagccagccctcgcggccgtccggcgtcgtctcataggtgacgccggtcagtccgccgccatgccacagcagcagcggataggcgcctttttcgttttgcggcaggaagtactgcacgtacatctgctcgacctggtaggtgccgttcggatcgacttttgcgggcactccgccgggcgtgaaggtgacgtccttgaccggcttgccgctgatttcgacgagacggccgccgacgtggaacgagcccatgtcgcgcagcgcgatcggctcggcggcgtaggtcgcggccgatgccatcagggtaaccgcagcgattgcaagccgtgacatgtgtcctccgatcttccccttctgcccgcgtgcgggcggaaggtcgggatgagaggggctctcccagcaccgcgctcttggagactccccctcacccgtatcgcatcttcgatgcgatacgacctctccccgcaagcggggcgaggtaagcaaggtgcgagacttagttccgcgcattcttcgccgcttcccggccggcgacgcggccgaacacgctgccgatggtcatgccgatgccggcggcgtagcccttgccgagcacgttgccggccatgatctcgccggccgcgaacatgttggcggacggcttgccgtcctgcatcagcatgcgcgcctgcttgttcacgcgggtgccgagataggtgaaggtaatgccgggccgcaccggataggcgagatagggcggcgtctcgatcttgcgcgcccaatgcgtcttggccggcgtgatgccttcggtacggcagtcgtcgaggatggtgtgatcgaaggtgccaggctgcaccgcggcgttgaattcggtgatggtcttttccagcgcggcggcgtcgagtttgagcttgccggcgagctcggcgatggtcgcgcccgcgatcggcggaaacagcgtcggcatgaagctggtcaccacggtcgagtcgaaaatgatgtaggcgatctggtccggttgcgctgcgaccaggcggccccagatcgcatagcgcttcggccagatgtcctcaccttcgtcgtagaaacgctcggcatgcttgttgacgacgatgccgaacaccaccgagtcgtggcgcgtgatgatgccgccgtcgaacttcggcgcgcgggcgtcgatcgcaaccgcatggcactgcgtcggatcgccgatctcctgcacgcccttggccagcagcatcttgaggatcgtgccgcgattatacggcgtgccgcggatcaggaaattgtcggcggcctcgccccaatattgcttcagccattcgatgttggcctcgaagccgccggcggccgcgaccagcgtcgaggcgcgcacttcggtcctgccaccgaccggctgcttcagctgcgccgagaggaacatgccgtgctcgatattcagatcgatcacctcggcattgtagaggatgtcgacgccgagctcctcggcggtgcgatagagcgcgttcagcatcgcgcggccgccgccgaggaagaacgagttggtgcggccgaggctgagcgttccgccgagcgagggctgccaacgtacgccctgctcgacgatccagttcaggatgtccttggactcgtggatcatgaagcgggccagttcctcgtcggtctggccgccggtcaccagcagcaaatccttccagaactcctcttcggtgtagggaccggtgaggatctcggtcgccgcgtcatgggcgcagcgcatgttgcgggtgtggcgggtgttgccgccgcggtagaatttcggggcgccttccagcacgagcaccgaggcgccggcgcgccgtgcgctgatcgcagcgcaaagggcggcgttgccgccgccgatcaccagcacgtcgaacctgcgtgtcagatcaaccatgcgttcttgtgatcgttgttggcatggaaagcaacatgccggggcaggcgatcggcctgccccgaatgcatacgcgatctcaggccgcaactgtctcgcgctgctcgatggtctggccgccgcgataaacgatcagcgcggcgacgatgccgagcgccgcggcgcacatcagccagtagccgggcgaggccttgtcgccggtcttgtcgatcagccaggtcgaagcgaacggcgtgaaggtgccgaacaggccggccgcaagcgcaaaggccagcgagaagcaggtggttcggacatgcgccggcacgatctcgaccagcgcgccgagcatggtgccgctgtagacgccgaaatagaacgagaacatcatctcgaccgcaagcatcttgccgaaagtcggctcggtgacgagccaatgcagtgccggataggcggtcacgagggacagaccggcaatcgcgagcagcaccggcttgcggccgacccggtcggacagcgcaccgccaaccggattccagatgaagttggtcaccgcaaccagcagcgtcaccagcagcgcgtcctgggtcgacagtttcagtacggtcttgccgaaggtcggcgtgtagacggtgacgaaatagaaggtcgtcgtggtcagcacggcgatcatcatgccgaggatgacgatgcgccagttggcgagcgccgacgcgaacacttcgcgtgcggtcggatgatgcttcatcgccaggaatgccggcgtctcctccagcgtccggcggaggaagaagatcaccggaatgatcaggcagccgacgaagaacgggatgcgccagccccaggccgcgacggtcgcggccggcatgctctcgctcaggatgaagccgaggatggaggcgacgaagatcgcgacctgctggctcgccgactggaacgaggtatagaagccgcgattgccgggcgtcgcgatctccgcaaggtagaccgacacgccgccgagctcgacgccggcggagaatccctgcagcaggcgcgcgagcagaacgatgatcggcgcggcaatgccgatcgtcgcataggtcgggcagatcgcgatcaccacggtgccgatcgccatgatcgacagcgtcacgatcaggcccttgcggcggccgatcttgtcgatgtaggcgccgagcacgatcgcgccgaccgggcgcatcagcgcgccgagccagaacacgccgaaggcgttgagcagtgcggcggtctcgttctcggaggggaagaaggccttcgcaatcgcctgcgcatagaagccaaacaggaagaagtcgaattgctcgaggaaattgccgctggtcgcgcgcaggatcgcgccgagacgtgacttgatttgcggtacttgcgatggactcgactgcgacatagcgccctttcctccccgtgacgaaacggccggcgcaaattgcttcgtcggccaaggcagttacctgccatatgcggcaatttggcacgccggtccggcgcgaccaacccgaaatctcgcaggagccattggaaaaaagccgtagatggaaatcgcctgaggcgcttacgagcgaagggggcgccgcatcacgacgccgagtgcgccgcggcgccgagccaggagcggaatgcggagagcttcggtgaatcagcacggccctgcggcgtgaccaggtagaacccggcgtcggccggcagcgcaatcttgaagggaactatgaggcggcccttggcgatgtcgtcctgcacataggaggtgcggcccatcgcaatgccgatgccgtcgatcgcggcctgcagcgtcacgaacagcaggtcgaaggtcacacccggctgcttggaaatgtcggtcggcaggcctgctgcggtcagccacagccgccagtcgtcgctgttggcgttgctggtgtgcagcagcacgtgatccctgaggtcctcggggcatttcagcggcttggttccctgcagcagcgacgggctgcacaccggaaacagctcgtccgccatcagccagtcggcgcgcaggcccgcccattggccgcggccatagcggatcgcggcgtcgaccttgtcgcgctggaagtcgaccaggctggtcgaggtggtgatgcggacgtcgatgcccgaatgcgcctcctggaacgccgacaggcgcggcagcagccacttggccgcgagcgatgccaatgtggagacggtcagcacgtgatcgtcgtcccggcgtagcaaacggtcggtcgcgagcctgaggtcattgaaggcggcgcggacgccgggaaggtattcggcagcctccggcgtcaggctcagcgagcggttctggcggatgaacaggcggacgccgagttcctcctcgaggcgccggatctgatggctgatcgcggtctgcgtcacgttcaattcggacgccgccagcgtgaagctcatgtgccgtgccgcggcctcgaacgcccgcagaccattcagcgaaggcagccggctggtcatcccctcaatgcctcccaatacatgactttaattcatgcgaagcggtacaaagtgtcgtttgtgaacgggccgaatggcgcagatattaccgccaacaggttaccgataggagccgcaaatgtccattttcacccatgaatcgatgacaaatcatcatacgctggatcaccaagcatcaggccttttgaatcaggtcggcgagacccttcacgtctggtgggagcgctatgagcgccgccgcgagctgtcgcagtggaccgagcgcgacctgcacgacatcggcatgtcccgcagcgacatcgtgttcgagaccgagaagccgttctggcgggcctgaagggccgccatcgccggcgctgcctctgtcgaggggcgccggctaattttcacccgaggagcgtgtcatgactgcgctgcatctcgacgatctcaagcaatactctgacgtgctgcgcgccaagaacggcagcgagatcaaggtgcgcttcgtcgagccgcgcgaccgcgaggagctgcagaactatatccgctcgctctccgcgggctcccgttacaaccgcttcctcggcgcgttgagcgagctgccgaagacggagctcgagcgtttcgttcatgtcggcgaggctgaccggttcacggtggtcgcgacgatgctggtcgatggtttcgagaccatcgtcggcgaagcccgctacgccttccatgccgatacgtcgagcgtcgagttcggcctgtcgatcgatgaccggtggcagggccacggcatcggcaaggcgctgctcaagaatctcgaatgccgtgcggcgtccttcggagccgagcgcatcttcggcgacacgctgcgttccaacgcgacgatgatcggcctcgcccgcaaatccgactacgccttcgcggcaagccccggcgactggaagctggtgcgctttgcgaaggaaatccatgtcgaaccgcaagacattccctgtgccagctggcggcttgccgccacttcccgctcggccgtgatgtcctcgcttgcggtttgattgactaggcccggttctggcccctccagaaccgggcccttttctcccgcgttacagcttctgcagatacagccgcatgataggccgttcgggcgatggcgaaggcacgtgtttgaaccccagccgttcaaacgtcgttacaaatcccgtgcttgatgaactgggagacgctgatcggtcgatcgggtacgcctcgatcgcaggtactccgttgcttcgggccaaatcgatcgcactctcggtcaagcgggcagcgatcccgtgccgacgaaaatcctttccgatgtagaagcaggaaatcgcccagacaggaacgtcatcaggtgaacgcagccgccaggactgttgcatgtagggcaacgcgtcgcggctgccgatctggcaccaacccgcaggttggccgccgacataggcgagaagtcccggcggcggccccttcctaacagtcttgttgaaggctgctcgattgatcgacggctgttgccggcggtaccgggcgccgatgcgccaatacatgcaccagcatcgccgtgtcacggcaccttcgctgaacagcttgtcgatatcggcccatcgctccggggtgaggactttgacggaggcgtccatgcgcacgcgaacgcgcctagctgccccggaacaccggcttgcgcttctcgatgaaggcctgcaccgcctccttgtgatcggcggtcgtggtgaggcggatcagacgctcggcctcgtggtcgcgcgcggtggcgaagtcgaacagcagtgcctcgtcgagattgtccttcatgtagcgcagcgccagggtcggaccttcggcgatcgacttcgcgagcgcgaacgcctcgtcctgcagcgtctcgtccggcaccacgcggttgacgaggccgatctgctcgcacctcgcggcatcgaccttctccgaggtgaacatcagttcgcgggcgcgcgaagtgccgaccaggcgcgtcaacagccaggccatgccgtaatcgccgctcagcgccacgcgcaagtaaccggtcgagacgaaggccgattgcgccgcgatccggatgtcgcaggccatcgcgatcgcaagcccggcgccgaccgcggggccgggcagggcggcgatggtcggcttgcgcaccgaggcgagcgcgccggtcagcaggcgctggcgctcctgcagatccgcgaccttgtcctcataggacatttcgagcttcttcgggtcgcggttggcgcccatgcccttgacgttgccgccggcgcagaacgccttgccggcgccggtcacgagcagcacgccgacctcggggttctcgccgcaagtccggatcatcgtgcgcagcgccggcgtcagcgtgtccgacagcgagttgcgggcatccgggcggttcagcgtgatgacggcgacgcggtcgcggattacgcagagcagttcgtcggtgccggtctcgatcttgatgtcagcggtcatttcgctccccatggtgctcatgtttggcttcgtagggtgggcaaggcttagtgtgcccaccaccgcgaccagagtgccgagagtgggcacggcgcaagggcgcccttgtccaccctacgcctgttgcatgatatccgtcatctcaaaacttctcaacccagggccgcaattccagctcccaggtccaggcgctgcgcggctgttgcagcacgttccagtagctcaacgcaatcgcgtcgggatcgagcatcgaatccggtttgtcggcgggctcggtgcgggcggcgctgcggatgccgccgtcgatcacgaaatgcgcgacatggatgccctgcggcgacagttcccgcgccatgctctgcgccagcccgcgcaatgcgaacttgcccatcgcgaacggcgccgattgcgcgtagcccttcacgctggcggaggcgccggtgaacaggatcgcgcccttcttgttagggaccatgcgcttcgccgcctcctgtgccaccaggaagccgccgaacgccgagaccgcgatcgcctgctcgacctcggacggaacgagttcaacgaacggcccgcgcgagcggccggaggcattgtagaccacgaggtcgggtgttccgatctcgcgctcgaccagaccaaacagacgctcgacatcttcggccttggtggtatcgcaggcataggccttcgcaccggtttcggtgcagagcgcgccgagcttctcgatgctgcgggcgcccagcgccacgcgaattccctcccgcgaaaatagccgggtcagcgaggcgctgagacccgcgccggcgccgacgatcagggcgatcttgtattttggaatatccattgggctttcctttgctcggccggaggaggatagtcgtgcccaaagagatgaggaacgcagccgggaattcaatgcagccgctcaagcaagatttgacttcgtcgtccgccagccagccgggcctgttggcccccgacacgacgggaatgaatttctaccgggccgatccggcgctgacggatcttctgaaactgcatctgcccgaggcgttgtttcgccacatcgagccgtatcttgatcggctcggcgaattggccggcggccatctcgacgaatgcgcgcggttggccgaccggcatacgccggtgctgcaccagcgcgacaagttcggccgcgacgtgcaaacgatcgagtatcatccggcctatcgcgagatcgagaaggccgcgttcggcgagttcggcatccatgcactgtcgatccgcaagggtatcatgggctggcccgacaaatatcccgtggtcgccaagcacgccttcaccttcctgttcaaccagaccgaattcggcatgggctgcccgatcaacgtcactgacggctgcgccaagctgctcaacaatttcggcagcgaggcgttgaaggcgaaatatctcgacggcctgacccagaccgacatgagcaggctgacgcaaggcggccagttcatgacggagaaggagggcggctccgacgtcggcacgctgaccacccgcgcggtgcaggagggcgaccactggcggctctacggcgagaaatggttctgctcgaacgccgatgccaaggtggtgatgctgttggcgcggccggaaggtgcggggccgggcacgaaaggcgtcggcctgttcctgatgccgcggttcctcgacgacggctcgccgaaccactaccggatcgtgcggctgaaggacaagctcggcacccgctcgatggcctcgggcgagatcaagttcgatggcgcgatcgcctatgccgtcggcaagctcgatcgcggcttcgtgcagatggccgagatggtcaactcgtcgcgactgtccaacggcgtgaaatcgaccgcgctgatgcgccgtgcctggcacgacgccatcacggtggcgcggggccgcgtggtgttcggccagcgtatcatcgatctgccgctggcgcggcgtcaactgatgaagatcatgctgccgaccgagcaggcgctgtcgatgagcttcctcaccgccgatgcgctcgatcgtgccgaggccggcagccaggacgccgcggcgctgctccgcgtcctgaccccgacgttgaaattccgcgccacccgcgatgcccgaaaggtctgcggcgatgcgatggagatgcgcggcggcatcggctacatcgaggaattcgtcaccccgcggttgctgcgcgatgcgcatctcggctcgatctgggagggcaccggcaacatcgtcgcgatcgatgcgctgaagcgcgcggtcgggcgccatggcgccgacaatgcgctcgccgccgatctgcatgcgcggctcgacgacagtcccaacgtgccgcaagcctggcgcaatcggctgcgtgagctcagcgatcgcgcgatcggatttgcgcgcgaagtggctggccgcatcgacaacgagggcgacgcacggcgcgcgacgagcctgctctatcatgtcgcgagcgcggtggcgctggcctgggaaggcggtcgcatccacgagatgcgcggcgatgcgcgacggctgttgctgtcgcggatggtggtcgatcaccgcgtgatgccgggcgatccgttccggcttgcggaaaataccgttcagcgcaggatgaccgagcatctgctcggcgatcgcgccatcggcatggccgaggttggcgaattgcttgtcgcagcgtaggctcgccgtggtcgttcgcgtagtctcacttctcccaaagggagcggtcggatcgcgcctgcgatccgggtgaggggttgcaatctatcgatagacctgaacccctcccccggaccgcatcttcgatgcgctccgacctctccctttgggagaggtggagagcgtacccaacaagaaacatgagaggaaattccgatgaaggccgccgtcctgcatgaagtcaatcagccgctggtgatcgaggatgtcagcgtgcccaatccggggccgcgcgaggtcctgatccgcaccgcggtcgcggggctctgtcattccgacctgcatttcatggaaggcctttatccgcatccgctgcctgccgtgctcggccatgaatcggccggcgtggtcgagaaggtcggctccgacgtcaactacgtgaagcccggcgatcacgtcgtgacctgcctctcggtgttctgcggcacctgcgacaattgcaccaccggccgcaccgtgctgtgcaccgacaccacggtgaagatgctgcccggcgcctccaaccggctgtcctggggccggaaggagaagctcaaccagttcctcaatctgtcgtcgttcgccgagcagatgctggtgcacgagaacgccatcgtgaagatcaagaaggagatgccgctcgatctcgccgcgctgatcggctgcggcgtcatcaccggttacggcgccgtcgtgaacaccgcgaaggtgaccgccggcgaaaccgtggccgtgatcggctgcggcggcgtcggcatggccgcgatcaacggcgcgcaaatcgccggcgccggccgcatcatcgcgatcgacaccaatccggccaagctgcaactcgcgaccaagttaggggctaccgacatcgtcgacccggcccgcggcgacgtggtgcagcaggtgcgcgaactcaccggcggcggcgtgcagcactccttcgaggtgctcggccgcaaggacaccgccgagcaggccttcgccatgctggccgcgggcggcaccgcgaccatcgtcggcatgattccgttcggccagaagatcgagctgcacggtttcgacttcctgcgcgagcgccgcatccagggctcctcgatgggctcgaaccacttccgcgtcgacatgccgcgcctggtcgatttctacatgcgcggcagactgcatctggaggattggatctcggccaagctgaagctctccgagatcaacgagggttttgccaacatgaaagccggcaagacgctgcgcagcgtgatcatgttcgatagctgaggtcgtcgtcccggcgaaagccgggacccatacgccgcgacttcgcttcgggctcgtaattggacgactttctttgctaaccacaagcaacagtggtcccggccttcgccgggacgacagttgagattagcgtccgcctttaccgcgccacatgcgcggacaccgcgagccatttcccgttctgccgcgcccagcagtcggtgtagcggccataggcctgctcgccgtcggcgtcgagatagctggtccgcgcgtggatgatggcgaagtcgccgaggatgcggatcttgacgtcctcggccttcaggcccttgatcttcaccgggatcgcggtctgcttcaggaaggcggcgcggtcgaccaggctcttgtcgggattggtgcagtagaaatcctgcgccaggatttcatcgaagcgcttgacgtcgcagttctggacggaatcgacgtagtccttgttgagtttcgtcagctcttcgaggtcgttgctcattggttttcctcccgtttcgctccatcgtcattgcgaggagcgcaagcgacgaagcaatccatcgctccgcacacgtggatatatggattgcttcgcttcgctcgcaatgacgatgcggcagctctcaatcgtcgaacgccttcggcggcacgaagccgccgaactcgcgctcgatcagctcggcgagcttcagcggcgtgcggtcttccagcatggggccgacgatctgcacgccgatcggcaatccgtcgggggcaaagccggtcgggatcgcggtggagggcaggccgggcagggtcgcgatgccgggccaggcgagctggtcggtgtagacgtgcggctcgccatcgatcaggatcttgcgctgctcctgatcgggcgaatgatcgtgcggataggccggcgtcggcatgatcgggcagatcaccgcgtcgaatgatttgaacagctcgcgccattgcgcgcgcagccgggctcggctgccgtcggcgatcacccagtcacggtggctgagcgcgatgccgcgcagccgttcggcctgcaggctggtattgctggccggcagcgcagccgccgcagcgcaggccccggcatagacctccggcgggaaggtcgcgcccaggaacgacagcaggatccgcatatagagccgcgaggaggcggcgaagtccggcagcagcgggctcgcgcgcgacactttggcgccggccttgtcgaggttgctggcgagcttgtcgatgctgccgcggatcaccttgtcggtcggcagcaccggatcgctgtcgatcaccaggatgcggaaatccttcaaggcggtgtggcgcgccgccggcaggtccagccggtaggccttgccggcttcaagcggatcggggcccgccatcacgtcgagcaccagcgcgaggtcggccgcgccgcgcgccatcgggccgatcacggacaggtcgcgatcgaacggcagtggcggcagcggcggcggggtgtggccgcgcgacggcagcagcgcgaaggtcggcttgtgcgcatagatgccgcagtggaagccgggcacgcgcagcgagccgccgatgtcggagccgagtgacagcgcgccgtagcctgcggcaagcgccgccgacgatccgccggaggagccgcccggcgtgcggccgaggtcgtaagggttgttggtggtgccgtagatctcgttgtagctctgccagtcggcgagcccgaccggcacgttggtcttgccgaggatcacgccgccggcgtctttcacccgctgaatcgagagcgcgtcctcggtcggaacgaagtccttctgcggcaggaagccccaggtcgtcggcaatcccgcgacgttgaaggattccttcaccgtcatggggatgccgagcagcggccggtgctcgccgcgcgcgatcgcggcgtcggcagcgcgggcggcagcgaggccgcgctcgaaatcgcgcacgcagaccgcgttgaccttgccgtcatgacgctcgatgcggccgatcgcatcctcggcgagctcgacggcggagacctgcttgttgcgcagcgcctccgacagttcgacggcggtcttgaaactccattgcgatttggccacggcgtgctccctgattttgcggcgatcatgcgcagaatggagcagccgggcaagaccggcttgatcgcaattgcgctactcggcaacgtcgacgtcacacatcgcctgatgcgaacgtgatcaccggattcgacgtgatgatgccgaagaggccgacgcggatctaatagggcgtgctgcgcgccgacagatgcgccattggattgatggccccgctcgcgctggcgcggtcgctgtcctgcttggtccctggcaccgggaaggcatatccgatgatggtcttgatgacgaaacgatcggatgcccgtgtcaggccgtagccgacgccgaagtcgatgtcgacatcgcccactttgaagtcggtcaccgcgaataaggtgtgctgctgctcggcaagcgggctgaagttgccgatcttgccgaaatcggcgtaatattccaggccgacatacacatcgtccttgatcttgcgcgctacgcgcgcggcgggcgcgaaatcggcttcgccatatctgccgaagccgacgtcgacgatcgggttgacgatgaattcatagtccgcattgcgcacgccgatgatcggccggatctcgaggccccagcgggtctgcgcgaatttcggcatctcgtagctgagctcgaagttgatgccgtagaacagattgcgcttgtcggcgttgggcgagacgaacagcgtgcgcagcttgaaggcatcggacaggaactgccggtcctgcacggcaaacggcagatagagcccgagctcccaccagtcggtcatgccataggcgaactccggcgtgccgttgaggctgtggttggacggaaagccgccggggaaaggcgggtctttctgcccgatgccgacatagttgagatgctgctggatggtgaactggccgactgccgcgatgccggcgttatagacttggatctcgtcggttgcctgcgcgcgagtgccccatccgagcagcgcagtagcaagcacggcgctggccaggtgtcggcgttgacggtcataccgcatctctgcctccgatcagtttgctacgccgcaccgatcaatatgccgaccgcgagcacgatcgcgccgcccagcacgatctggaacaccgcctgcaggaacggcgtgtccatgtagcgcgagcggatgaaggcgatcgcccacaactcgaagaacaccacgatcccggcaatcgcggtcgcgatccagaacgcgttcggccaggcatcgggcacgagatagggaatggtgtggccgaggccgccgagcgtcgtcatcaatccgcaggtgatgccgcgcagccagggcgagccgcggccggtcagcgagccgtcgtcggacaatgcttcggcaaagcccatgctgatgccggcgccgatcgaggcggcgaggccgaccaggaaggtctgccaattatgatgcgtggcgaaggcggcggcgaacagcggcgccaaggtcgagaccgagccgtccatcaatccggcaagccccggctgcacatattgcagcacgaacatccgccgccgggtgcggtcttcctcggcgcgcacgtcgggcttgaggatgtcgccggtcaggcggaccgcgagtttctcatggctcttttcctcctcagcgagatcgccgagcaggcggcgcacgccggtatcctcagccttctcggccgccttggcgtagaatcgctcagcctcgagctccatggtttcgacctccttgcggatggtgtcgagcggtaggttcttggtcagccagatcgggcgccgacgcaggaagcctttgacgtcgtcccgccggatcggcggcagatgcggaccgaagcgctgttcgtaggtttccagcagccgatggcgatggccgcgctcctcttcagccatttcctcgaatatctttgcggtatccggatagcgttcggcaagatcctcggcgaagctcatatagattcggctgtcctcctcctcggaggcaatcgcgaccgcaagcacctcgcgctcggtcagatcggcgaaattcttcacggcaacgccttcttcactaagtttagaattagaataattctaatattagctaagccggctcgggtcaatccgaacaccgtgtcgtcgtactgtttgtgatcacgataacgggaaccgggcgatcccacgcccgttcgagttccagttgttacgaccgggggatgacatggataccgtcaaatatcgcctaaacgacgcgcggctggcaccgcgacggaccaagctcgagattcctggctgggcgggcgctcgcgaaccgcgcaccgacggctcacgcgagcaggtctggcattgcgtaccgttctcggagggggcgcagtacgggatcgagctgttctacccctacgatttcgagctgcgcgtcaccacgcaggacgggcggttgcgcctcgatgcggattggggcgagccgccggacagtggggtgcagtggccacccttccgggatttcggcaccactttctacacctaccagatcctgctcgacctcaaggtcgaacgcggcatggcggtgcgcaccgagccgcatccgcgtttctacaccgaccgcaccgacaccgtgccgatcgccgttccggcgctgatccgcaactggtggccgatgatgttcttctgcgtgttcaaggcgccggcggaaggacgcacccacatcttccgcccgaacgagccgttcgcgcagatcatcgtgattccggaggaggcggatttccagctcgagccgatgggcgaagaggaggccgcggagcgcgaattgcaggcgcgccgcatctacagcaatcggcccaaactggctgccggcaccgaatggacctcgtcgaccgacacggtgttcgacggcacctatcgccatctccaccgcgccgcaaaggaaaaggcgcgcggcacttgagcggtcgccgccgtcatcgacccacaaaatagcaacggggcccgcagggccccgttgccgcatcgtaaatggcctgcggccgctcagtaatcgcgccggtagaagctgtggtgatgatggtggtggtgatgatggtgatggtagcgccgatagcgcggcaccacgatgacgggaggaccgtagccacgatcatagccgcgatagtagccatggtggtggtgatggtgatgatggtggtgatgatagaactgcgcgagttggacgtcctcgcgcaccggaggaggcgcagcctcgtccagagcctgcagctttgccgaggcgttagtgatcggctccagcagttctgcgtacgagctcgcttgcagcacgtcggtcggcgcgggtgccggcgcagcttgggcggccccgagcgcgcccagggatgcgaccgctcccaacaatccggcaatcttcttttccatagtcctcctccaaatcggtccgccggacaaaaccggccgactgcaacgccaggttccatggaatgttcccggaaatttccggaacatatcccctagcgcacgcggtctattgcgctgcacgcgcgaggaactgcagcagcagccggctcacttcgtccggctgttcctgctgcacccagtggcctgcaccgtcgaccagatggcagccgatcattttggtgcaggctttcgtttgcatcgcctcgaatacgccgggccgctgataggtgccccaatcctgcttgccggagatgaaggcggatggttggtcgatgctgcggccgctccaggtttgcaattccgccgtgaatgcgcctgatgtgccgcagcgataccattgcagcccgccctggaatccggtgcgctgatattccgcgctgtaataggcaagctcgcgatccggcagccaggtgttggcggcgatcgcttcgcgcgacggcatctcctcggcgaccgtcgcagccatgtccttggcgagatccatcacgtaataggtcggcagtttcgccagttcgcctgcggaccaggaatgcaatggatacggcgtgttgtctttccagtccgcgctcttgtgatggtagtaagcgcgcaggaagtcgtgcacaccctgcggcgcgcgatgcatgtcgtcattggccggtcgtgtcgaatagtaccattggtaatgtttgcgcggccgcggcagcgcggcgagctcgcgatgcacggggtcgtcagtcgcgggcttcgcgggttcattggcggtgttgaacggcagcgacggcggacccgagaacggtgcgctcatcatcaccacggtgcggaacacgtcggggcggatcagcgcgcaccacgccgcgaccgacgagccgaaatcgtgcccgatcacggcatcgacatgcgtgtagccgaacgccgcgaccagcccgagcgcgtcgcgcaccaggttgggcaggcggaaggcggcgaggtcgccgtcataatccgcgctccagcccgtcgtgcggccatagccgcgctggtccggcgcgatgacgtgatagccggccgcggcaagcttcggcatcaccttgcgccaggaaaacgccagctccggaaagccgtgcagcagcaacaggcagggccggcccgacgtctcgaagccggcttcgagcacatgcatgcgcaggccgttgatcccgtcgacatagcgcgagcggatggtggagggcagcgggacgtcggagagggcttccatctgagttcacctgttgggcatcgccgtacaaccagcgcatttggctgtatgctggcagtcgttgtcgtgacgatagcaactttgcccaggggatgcctaccgcatgcgccacgcgaggattgcagagctgcccggctggatggtgcgtctcggtctgaccatcatcgccgcgagcttcgtgctgatatcggccgtgcgcgccgccgacatcaagcaacttaccgaaaaactgccgcgtgcctatatcggcgagttcctgtgggacggcgacaccacggtgcagaacgtcgtcgttaccctcgacaaggtcaacgctctgaacgagcagaatgcggaagcgcgcggctgcggctcatatgaagttggtcgtcacgtaaccaagatcggggtgcggatgttcatccggctgtccgacctcgaggtcgagatcttcgagcaatcgccggacgacggcggggcgttcgagaccgacggcagccatcgcggcaagctgtcggatgatttgcagcagatcgacgcgcagtggaccaccacggcgtcaggcaagcacggccagctgcatctgcgtgccgcggcctctgccgcctgcgagccggcggcggagttgtaggccgccggtttgggcgcaagcggcgtcccgcgtgcgctcttcatcctcccctggaggacggcacggatcagttgcactatttcggaatattggaaatatctccctgagttgcccgacgtgtcaagctgtgttgtcaaacgcccggcagccgccagctcctttgcatggggttgtttttcgatattttggccgcgcgcggcggcggggccctccggacgggcgagccgcggttacgtcctggcaggcgccttcggccaatagcggtcgcgcagatggcgcttcaccagcttgccggtcggcgtgcgcggcagctcctgctcgaagtcgatgctcttcgggcatttgatcggcgacaggtgctgccggcagaacgcgatcagctcggcctcgagcgccttgccggccttgccgatgtcatgcggctgcaccacggccttgacctcctcgcccatctcctcgttcggcacgccgaacaccgccacgtcggacaccgcgggatgtgtgatcagcacgtcctcggtttcctgcggatagatgttcacgccgccggagatgatcatgtagctcttgcggtcggtcagatagaggaagccttcttcatccaggtagccgacgtcgccgagcgtcgaccagcccttggcgttgtaggccttcttcgtcttctcgggatcattgtgatagctgaacacgggcgcgtcggcgaaatagacttggccgatctgccccgtgggcgcctcctcctcattctcgtcgaggatcttgaccttgccgaccacggcacggccgaccgtgccgcgatgggtcagccattgctgcgaggtcgagaccgtgacgccgttgccttcggagccggcgtaatactcgatcaggatcggtccccaccactcgatcatcttggccttcacgtcgaccggacagggcgccgcggcgtggatcgcgcccttcagcgaggagacgttgtagcgggcgcgcacctcgtcgggcagcttcagcatgcgcacgaacatggtcggcaccagctgcgactgcgtcaccttgtgcttctcgacctgcttcaggaattcctcggcgtcgaaatgctccatgatgacggaggtgccgcccagcaccgtcgccatcatgttgaagcgcaagggagccgcatgatagagcggcgccggcgacagataaatggagtcggcattcatgccgcacatgtcggcggtgagaatccgcaggaacgggttcggcacgtcgatccggttgccttcgaattccttcttgatgcccttgggccggccggtggtgccggaggaatacagcatgtcgtagcccgcgacctcgtcggcaaccggcgtggtcggctgcgcggcggcctccttgtcataggagcggaagcccgctgcaggctcgtccatcatatagaacagcggttcgccgggttcgcccttgatcaggcccttcaccttgtcggcacactgcggcgtggtgatgaacaccttggcgccgcagtctttaatgatgtaggcgatctcctcttccgtcaggtagcggctgatcgccgtgtaatagaggcccgagcgctgcgcggcccagcagatctccatgaaggcgaggcggttctccatcaggagcgcgatgtggtcgcccgccttcaggccgagcgaacggaacagatgcgcgccctggttcgagagttcgtcgagctcgcgataggtgatggctttgcctgacgccgccatctggtaggcgatcttgtccggatggttgcgcgcgtggatggagggatgggtcattgatactcgcaaaaaacaaggtggtcgtcccggcgaaagccgggacccataaccaccgatctaaattgtagaaacgagctggggctccagccgccgtaaccacgcacatttgtggttatgggtcccggctttcgccgggacgacaccatcaacgtggaatcgctctgcctcttacagccgctcgacgatcgtcacgttggccatgccgccgccttcgcacatggtctgcaggccgtagcgcttgttgcgctgcttcagcgcatgcagcagcgtggtcatcagcttggtgccgctgccgccgagcggatggccgagtgcgatcgcgccgccattgacgttgaggcgggccggatcggcgccggtggtcttcagccaagcggtcggcaccgaggcgaaggcctcgttgacctcgaacaggtcgatgtcgtcgattgacatgcccgccttttgcagcgcgcgctgggtcgccggcagcggcgcttccagcatgatcacgggatcgccgcccatcatggtgagatggtggatgcgcgccatcggcttgacgccgagcgccttgaggcccttctcgttgacgaccatcacgccggaggcgccgtcgcagatctggctggcgctggccgcggtcagcttgccgttctcggcgatcagcttgacgcccttgatgccgtcgaggctgacgtcgaagcggatgccttcgtcgatatggtgggtatcggtcgagccgtcggcgcgggtaatcttcaccggcacgatctcgtccttgaagtggccggcctgcgtggccgcgatcgcgcgctggtggctgttgtaggaatattcgtcgagctcatccttcgacagcccgtacttctcggccatcatctccgcgccggtgaactggctgaagacgatgttgggatacttcgcctcgatgcccgggctcttgtagtggccgaagccgttcttggcgggcagcgaggaggcgagccccatcggcacgcgggtcatcgattccacgccggccgcgatcacgcagtccatggtgcccgacatcaccgcctgggccgcgaagtgcagcgcctgctgcgaggagccgcactggcggtcgatcgaggtcgcgggcacgctctccggcagcttcgaggccatcaccgcattgcgcgcgatgttggtggattgctcgccggtctgcatcacgcagcccatgatgacgtcctcgacctgcgcagggtcgacgccggtgcggtcgaccaaggcattgagcacggtcgcggccagatcggccggatgccagccggcgaggcgccctcccttgcggccgcctgcggtgcgagcggcggcgacgatatatgcctcggccatgtctgatctccctgaggtttctggattgggtggtctttaaagttgggccggatttaaggggcggctcagcatttagtcaatcaatcaattaactcttgagtgccgccccgccatgggcttatgtgcggcctcgatttaccgtcgtgtccagacaccaagcgggaccagagcgcagttgaataccagcgtaccgacgaaactcgccgcgggcagaaacgccactgccgacaagctattggtcgcagccagcgagctgatgatcgaacgcgcctcgatcgaggtctcgctgtccgacatcgcccagaagtcgggcgtcaacgctgcgctggtgaaatatcatttcggcaacaaggacgggctgttgctggcgctattggcgcgcgacgccgccaccgagatatcgcagctcgaatatttgctggcgcagccgatcacgccgtcggagaaattgcgcctgcatatcggcggcatcatccgcgcctatcaccagttcccctatatgaaccggctgatccattatctgctgcacgagagctcgccctctgccgcggacgaggtgtcgaaattcttcgtcgcgccgctgctggattttcaccgccggctgctcgcagaaggcatcaaggccggccaattccgcaagatcgatccggtgctgttctacaccagcctgatcggtgcctgcgatcacctgttcttcggccgccacgcgatgtcgcgcgcggtcggcgtcggtccggtcaccgacgaggtctgccgcgaatacatcaagcacatggaagccttgatcttcggcggcgtgctcaatcccgacaaggaaacggcagcggtcgccgccggataaaaaagttcaagtctagagaagaaacgcccaaggaaaggttgttctcatgcagttgaaagacgttgccgttctcatcaccggcggtggttccggcctcggcgccgccaccgcgcgcgccatggctgccaagggcgccaggatcggcgtgatcgaccagaacaaggaaaacgccgagaaggtcgctgccgaagtgaagggcgtcgccctgcacgccgacgtcaccgacgaggaagcgatcaaggcggcgatcgccaaggccgaggccgcgcacggcatcgcgcgggtcttgatgaactgcgccggcatcggcggctcgcagcgcattatcggcaaggacggaacgtacccgctggcgaaattcgtccgcatcatcaacgtcaatctgatcggcaccttcaacgtgctgcgcctgttcgccgagcgcctcgccaccgccgagacgatcggcgaggagcgcggcgtcgtgatcaacaccgcgtcggttgcggcctatgaaggccagatcggccagatcgcctattcggcctcgaagggcggcgtcgtcggcctcacgctgccggctgcgcgcgacctcgccagcctgaagatccgcgtcaacaccatcgcgcccggcctgttcctgacgccgctgctgatgggtctcaacgaagaagcgcgcaagagcctcggcgcccaggtgccgcacccggcccgcctcggcgatgcctcggagtacggcaacctcgcggtccacatcgtcgagaacccgatgctcaacggcgagaccatccgtctcgacggcgccatccgcatggcgccgcgctagcgcgggctgcgctctcttaccctcccccccttgccggggagggcggcagcgaaggctgccgggagaggggttctctccgcggccacccctttccgtagtgagcatgcggcatggccgcatatgccctctcccgcaaggggagagggcgcatcgattgtcaccgtatccgcagatgcaggagtgacgcgtgtctcaaccgctgctgatcgaacatcgcgatggaacagattgggtcacgctcaatcgtcccgagagcctcaacgcgctcgatccctcgctgatcgatgcgctcaatgtctatttccagggcctgcagcgcaatcgcgacacccgcgtcgtggtgctgaagggtgccggcgcgaacttttgcgccgggctcgacctcaagcacgcgatggcgcggcgcggcggccagaccgagccgccgagcgtcgctgactccctggactcgcagcgccgcatcgccgacatcgtgatgctgatgcggcgcgctccgcagccgatcatcgcactggtgcagggcgcggctgccggcggcggcttcgcgctggcgctcgcggccgacatccgcatcgcggcgaagaacgcgcgcatgaactgcgccttcatcaagctcgggctcggcggctgcgacatcggcaccagctatttcctgccgcgcctcgtcggcgtgtcagtcgcctccgaattgatcctgaccgggcgcttcatcaatgccgatcgcgcgcttgccgtcggcctcgtatctgaagtggtcgagcccaccgatctcgacgctgccgccaatccttacgtcgatgcgatgatgacggcctcgccggttggcctgcgcctctcgaaggaatgcatcaacatgagcgtcgatgccggctcgatcgaggccgtgattgcgatggaggatcgcaatcaggtgctgtgcagccgctcggaagattttcaggaaggcatcagggccttccttgagaaacgaaagcctgtctatatcaggcgctgagaacagatcctcaaaaggacaagaattccgggagacgcaaaatggatggagacgcggcgatgctgacgaaacccgccttccgcaaggtggattggctcgcgcgtgacatcgcggtcgaacggcgcgacgacggcaccgtcgtcctgaagtcgcggattccgctccaggcttatgagacgcacatcccggcctatctcgccaaatgggcggcgcaggccccggagcgcatctggctcgcgcagcgcggcggcccggaccggcggtggcgcaaggtctcctatggcgaagccaagcgcaccgtcgatgcgctgacccaaggcctgctcaatctcggcattgccgacggccgccccgtcgcgatcctctcgggcaattcgatcgagcacgcgctgatgacgcaggcggcgatgcaggcgcggctgccggccgcgccggtgtcgccggcctattcgctgatgagccaggatcatctcaagctcaaatacctgttcaacctgatcaagcctgccgtcgtgatggtgcaggatggcccgagcttcgagaaggcgctcagggcgatcgacctcgccggcatcaccgtcgtccacgtgctgcggccctgcgagggcatcaagagcgtggcctttgccgagctcgcggcaacgaaggtcacggctgatgtgggcaattcgatcgcgaagatcacgcccgagaccgtcggcaagctgctgttcacctcgggctcgaccggcatgccgaaggccgtcatcaacacccagcagatgatgtgcgccaacgcggcgatgatgatgcaggtgcgcccgcgcgaagccaacggcccgatcccgaccgtgctcgactggatgccgtggaatcacaccatgggcggcaacgctgcgttcaatccggtgctggtcgatggcggcacgctctatatcgatgacggccggccgatgccgggccaactcgaggagaccatcaggaatctgcgcgaggtgtcgccgacctattacgccaacgtgccggccggctatgccgccctcgcggctgcgatggagaaggacgaggcgctgtgcgagagtttcttcaagaatctctcgatcatggcctatggcggcgcccggctgcccgacgatctctatgaccgcatgcaggcactggcggtgaagaccacgggtgagcgcatcgtattctacaccggttggggttcgaccgagaccgcgccgacctcgaccggcacctattgggacaccgagcgcgtcggcttgatcggcctgccgttccccggcgtcgagctgaagatggtgccgtgcggctcgaaatacgagttgcggctgcgcggcgtcaatgtcacgccgggctatttcggccagcccgatctcacggcgaagatgttcgacgaggaaggcttctattgcatcggcgatgccggcgtgttcgtggaccccacggatccgctgcaaggcatcatcttcgcgggccgcgtggtcgaggacttcaagctgacgaccggcactttcgtccatgtcggctcgctgcgcaccgatgcgatcgcggccgcgacgccggtcgtgcatgacgcgctggtggcggggcaggatcgcgaattcatcggcctgttgtgctggccgaacctgcatgcctgccgccagctcgtcggcaatgcggacgcgagctatgaggacgtgatccggcatccggccgtgatcgcctgtctcgaaaagggcttgcaggcccacaacgcgtccaccaccggcagcagcatgcggatcgcgcgcgcgatgctgatggtcgagccgccatcgatcgacggcaacgagctcaccgacaagggctacatcaaccagcgtgccggcctcgagcgccgtgccgaactggtcgagccgcacggtctgcggttccatggattccgggctcgcgcttcgcgcgccccggaatgacggccaattgaaacgacaagaaccaagaaggtagcgccatgaatttcgatttctccgacgaacagaagcagatgcgcgacgaggcgcggaaattcctcagcgaacagtgcccgccgaaggccgtgcgcgaggtgctcgatggcaaggcgccctacgacaagtcgctgtggaagggcctcgccgagatgggtttcctcggtatcgcgatccctgagcagttcggcggtgcgggcgccggccatctcgagctctgcgtgattgcggaggagatgggtcgcgcgctggcgccggtgccgttctcctcgaccgtctatctcgccgccgaagcgctgctgatcgcgggcagcgacgcacagaagcagaagtggctgccgaagatcgcctcgggcgatgcgatcggcacgctggcgctgttcgagggcaagggcaatccgtcgccgaaggcggtcaaggtcacggccaatggcggcgtgctcaacggcgtcaagaagccggtcgcggacggcgcgatcgccgacttcgccgtggtcgccgcgcgcaccggctccagcggccgcgagtccgatatttccctgttcatcgtcgatctcaaggccgccggcgtcgaggtaaagtcgctgaccaacatcgatctcacccgtggccaggccgagatcaccttcaggaatgccaaggctgaaccgctcggcgccgccggcgagggctggagcgtcatcacccaggtgctcgatcgtgcggccgtgctgacggcgtttgagcaggtcggcggcgccgaccgcgcgctggaaatgggccgcgactacgcgctcgaccgtatcgcgttcggccgtccgatcggctcgttccaggcggtcaagcacatgctggccgacatgtatgtctcggcgacgctggcgcgctcgaactgctattacggcgcctgggcactttcgaccaacgccggcgagttgccggaggcagcggccgccgcgcgcatcagcgcgacgcaggcgttccagcactgcgccaagaacaacatccaggttcacggcggcatgggcttcacctgggagttcgactgccacatgtactatcgccgcgccaatgcggtggcgctcggtctcggcagcctgtcctattgggaagacgcgctgatcgatcgcatgcgcaagaagaacgcggcgtaagcggggaccgtcatgaatttcgacgacaccccgcaggaggccgcattccgcgccgaggcgaaagcctggatcggagccaatgcgccgaagcaatatgaggacgaactgcgcaaggcctcgctcggccgcgttgcgctcaagggcgccaacattctcgaggtcgcaaaagcatggcagaagaagaaggccgatgccggctgggcctgcctgcactggccgaaggagtatggtggccgcggcgcctcgccgatcgagcgcgtgatctggcagcaggaagagggaccgttcggccgcctcagctcgatgttcatcatcggccatggcatgtgcggtccgaccatgatggcgttcgccggcgaggagcagaaacgcaaatacctgccgccgctcgcctccggcgagaagatctggtgccagctgttctcggagcccgccggcggctccgacgttgcgggccttcggacccgcgccgagaagcacggcgacgaatgggtgatcaacggccagaagatctggacctcgggcgcgcattattccgactacggcatcctgctgacccgcaccgatccaacggtcgcgaagcacaagggcctcaccatgttcttcctggacatgaagagcccgggtgtcgagatcaggccgatcaagcaggcgagcggggcgtcggacttcaacgaagtctatttcaccgacgtgcgcattccggactcgcagcggctcggcaacgtcaatgacggctggaacgtgtcgctgaccacgctgatgaacgagcgcatgtcgatcggcgccggcgtggccaccggcttccccgagctgttcgatttctgcaacagcctgatgctggaggatggccccgcgatcgagaaccgcgcggtccgctccaagcttgcgaactgggcggtgaaggcgagcgggctgaaatacaccagcatgcgggcgatctccgcgctgtcacgcggtgagcgtccgggaccggagaactcgatcgggaagctggtcgccggctcgatgatccaggatgtcgcgacctacgctctcgacctgcagggcgccgccggcgccttgagcgggcacgaggatgccgaggttgccggcaaattccaggccatgctgctgcgcgcgccgggcacccgcgtcgagggcggcaccgacgagatcatgcgcaacatcatagccgaacgcgtgctgggcctgcccggtgatatccgggtcgacaaggatgttcccttcaacaagatcccgaccaagggccgcgcctgatcgcgcgtgaaatcaaaaagaggttcgccatgaatttcgatgacacgccgcaggaagccgagttccgcgccattgcgcgcaagtggatcgccgccaacgcaccgaaggagttcgaagaagagctctcgaagtcgtcgctcggccgcatcaggctggccaagcacgacatggtcgaggtcggcaaggcctggcagaagaagaaggcggaaggcggctgggcctgcctgcactggccgaaggaatatggcggccgtggcgccaccccgatcgagcgcgtg

SEQ ID NO: 54 - DNA, 31716 bp, Bradyrhizobium enterica
cttagtgcccgcgacgatcgagagcgtggtgttgtcggcaaaggtcacagcccgcgcgacatttgcggtcgccggtgtctggatcgccagcgtgccgccggtcacggtcaggttgccgccgagattgttgcttccgcccgcgctgccgtttccaaattgcaacgtcccgctggagacaagggtgtcgccggtgtagctgttcgtgccggtcaggatcgtggtgcccatgcctatctgctgcactgtgcccgtgccggagatattgccggagtaggtcgccatgtccgagcgattgaaggcgagcgtgccgttgttgacgacatcgccaagaagcgagccggtattccctccattgccgagttgcagggtgcccgccgaaatcgtcgtgccgccggtataagtattgttcgcgatcaaggtcagcgtgcccgcgccggtcttgacgacatcgccggggctcgacccattcgaaatcacgccgctctgcgtcacggtctggcccgcggcgacatcgaaggtgggatcgcccccgacggtgatcgcgtgagtgtaaacgccgccctgggtgaaggccagcgtcgtgccgttcagaagggcgagcgtgccgccggtgccgagattgccgtccgaggaaatgctcagcgtaccgcccgcgaccgtcgtgctgcccgtgtagctgttatttcccgacagcgtgagcgtgtccgttcccagcttcatcacggaaccgctgccggaaatggcgccggaaaaagtcaccgcgtcggagcggctgaaggcgagcgttgcgttgttgacgacattgcccgcgatcagaccgctcgtgccgccgttaccgatctgcaaaacgccagcggaaatggtcgttccaccggagtagctattcgtgccggttaggatggtcgtgcccgcaccgatctgccgcaccgcgccgctgccggagatgtcgccggaaaagatcatggtgttgccgcggttgaagacgagcgtcccgttgttggcgacatcgccaaggatcgaaccggtgttcccgccattgccgagttgcagcgtgccaccgctgatcgtggtgccgccggtataggtgttggtgccggtcaggatcagcgtgcccgcgccggccttggtcagcgacgagccgttccagccggtcgcgggattggcggcctggtcggtgagcgctgttccgaccgtgaatgtgtcggtcgcgttggtcagcgtgaaggtgccgcgggcgagattgttgccggcgaacctcgagagcgcggtgttgtcggcgaaggtcacagcccgcgcgatattcacggtcgcgggcgtttggatcgccagcgtgccgccggtcacggtcaggttgccgccgagcgtgttacttccgcccgcgctgccatcgccgaactgcaaccggccgccggagacgagggtgttgccggtgtagccgttcgcgccggtcaggatcgtcgtgcccgaaccgatctgctgcacagcaccgctgccggaaatagcgccggagaaggtcgctgtattgctgcgattgaaggcgagcaccccgttgttgagtacatcgccaacgatcgaaccgctggcaccgccgttgcccacttgcagcgtgcccgacgaaatcgtcgtgccgccggtgtaggtgttcgcgcccgacaacgtcagggtaccggtgccgatcttgaccagcgaaccgccgctacccgaaatgactccgctcaccacggtcgatagattgttcgagccgaccgttagttcgttggccccgagattaaaggtgccgccgcccgcgattgatcccgcgctcagcttgccatggccgttcgggccgaagctgctcgaaaagtcggtgacggccaccgcactgttggcgacggcggcgttgccagccgtgctggtgttattaaaattcagattgccgttgttggtgatagtggcgttgccggccgtactgctgttgttgaaattcaaaccgccgttgttggtgatggtggcgttaccggccgtactggtgttgttgaaattcagaccgccgttgtttgtgatggcgctgccaccggccgtgctgctgtcgttgaaaaacaggccgaaattattcgtgatgttggcgctaccggccgtgctgctgttcagaaaatacaggtagtgattgttggtgacggtggcgctacctgcgctcgtgccgtttctaaaaaaggtgatgccgctgttcgtgatggtggcgatgccgctggtgtcggcgttgacgacgttgaacgtgccgcccgcattcacggtcgccgcgccctggatggcgccagcgctgacggcggtgccgagttgcagcgtgccgccgttgatcgtggtgccgccgctataggtgttggcgcccgaaagcgtcagcgtgccggtgccgaccttgaccagcgagccgccgctgcccgaaatgatgccgctcacctcggtcgtggaattgttcgagccgactgtcagttggttggccccaagagcatagctgccgccacccgcgatcgaccccgcgctcagcttcccgtcgccgttcggtcctatgctgttcgaaaaatcgacggtggcattcacattgctattgttgatagcagcgctgcccgccgtgctggtgccgaagaattgcacgtatccgttgtttgtgatggtggcgctgccggccgtgctggcgtttttgaaaactaggccgaagttgttagtgatattggcgccgctggccgtgctggcgtcgacgaaagccaggccgttgttgttggtgattgtcgcgctgccagccgcgctggtgccgtagaaatacaggtagccgctattggtgatgacagcactgcccgcgccgctcgtgccgtagaagttcaggtagccgctgttgccgaaagcgatgctgcttgcgctggttccggtctggaagttcgtcgtgccgatgttcgtgatgccggtgatccaggaggtgatggcattggtgacgttgagcgtgctgcctgcgttcacggtcaccgcgcccgagaccgcgccggtgttggcggcggtgccgatctgcaatgtgccgccgttgatcgtggtgccgccgctgtacacattaatgcccgacagcgtcagcgtgcccgaaccggtcttgaccagcgagccggtgcccgaaatgacgccggtcacctcggtcgagagcccgttcgagccgacagtcaattggttgctgccgagcatatagctgccgccgcccgcgatcgatccggcgctcagcttgccgtcgccgttggggccggtgctggtcgaaaaatcggtggtggcgcccgcgccggtgatgatagcggcgctgccgcccgtgctgttgttgtagaacctcagggtgccggtgttggtgacgttggcgctgccagcggtgctactgttttggaaatacagataactgttgttggtgatattggcgttgccggccgtgctgctgttgaaaaacgtcaggccgaaattgttcgtgatggtggcgctgccggccgtgctgttgccgtagagccacatgtagttgttgttagtgatattcgcgccgccagccgtgctggtgtcgtagaaccgcaggtagccgctgctgccgttggtgatggtggtcgtggcggggccggcagtgctgctcccgaagaagttcacgttgccgttgttggtaacggcgatcgtgccggtgccgttgttcgtgatgcccgtgccccagaagccgagggttgcgttgttgttgaggttgaaggtgtagttcggcgcgcctgcgctgaaggtccagccggcgatggcgtaagttgtcggggtgcctggcgtgatcaccaggttggattgcgtcgaggcgccgaaaacggccgtggcggtctctccgttcggcaccaccccgccgttccagttggcggcgttggcgtagttgccaccggtcggagtggtgctccacgccgccgtctgcgcccgcgctgcgtatccggtgaccgtcagcgcggtcgaggccaacaaggccgcgcggaacaggccgtccatgacgccacgcggcgaagccgaaatcgttcgtgaagccattataaccagtcccccggcctaaacgcgaggggtgcggctccgtgcgtgttcaggcccctgccttcgcccgcgcattttgcgaccgtattccccgcatcatattcgttgtctcttcgtcttatgtcagcgcgtctcggcacagtcctgaagcagggccggtggagttctgagatttcgctgataatttctgatttcgagggaattcacatgatttttgaggattctgtgtgcttttggcatgatgccgcgattctgcggcttcgctgggaagaggggggatgagtgctcagattcgccgggttcgaaatcgatcggcagcgttccgaactgcgcggtcccggcggccagacgatcaagctgcggctgaaggcgttcgccctgctatcgctgctcgcggccaacccgagacgaatcatcggcaaacaagaactgatggaggcggtgtggccgggcgtccacgtcagcgacgatagcctgttccagaccatccgggagcttcgcgccgccctgggcgatgacaagcgtcagttgatccgagccgtttccggccgaggctatctgctggaggccgatgtgtccggtccgccggacgccgccgacattcctgcaaagccgctcccggacgccgacgccgtcgccccggaaaccataagcgaaccagccgaaagccggcctgggttcaggatgagccgccgcgccgccctcgtggccatggggggcggcgtgtcggctttggcggcggccacgaccctgctcccgcgtttcttcgctggctctccggcaaccatggccgtgatccccatgacaaccgtgagcaacgacccggaaaccgcccggatggcgagcggtgtaatccgtgaactggcggacggtctggcgaaaatcgagacgatccgcgtgatgacggcgccgggcgttgttcaaggcgccgatttcgtcgtcaacggcgatctcgaaaaaaccgaatcggcttggaatttgcgcgcgcgcctgaccgaatcgtccaccggcacggtgagatggacgacggcgctttcggtcgctctcgccggcgacgacatgcaactccagcagacccgcctcgtagccggcacgggctacccgctcgcactgagcatcaacgcgcttttgaggtcaggcaatcgctcggccgatggcttgccctctggcagcgccaaggccgctatcgaccaggcgacggccgcgatcaaccgcaccacgctggagcgctatcacgcagcgctggcgatgcttgaaaatgctcttgccgccgatgccggcaatgtcgatctgcaagttgcgctcgcggcattccaactgcgcggaattcagatggcctggtttcctgccgcagagcgcgaaccgacggaggttcggatcggcgcgatcatggagcacgcgttgcgcacgcggcccgactatattccggtgctccagacccagtgccggtttttgtcggcaaccaatagcttcgtcgaaagcctggtggtgtgcgacagagtgctcgctctcgatccatgggacgggatcgcactctatctgatggggctcgcccaggtctttctcggccgtttcaatgacgcgctcgcgacgtttgagcaggcggaccggttcgatacgcctcaggtcgcgcgctggacctgggcgatcggggtgggttggacctgtctgctcttggaccgtcctgcggatgcattgccctggctgcaacggtcgatcgcgatcaccccggcgagcggacgcactcatatgctgctggccgcggcttatcagcaattgggtcagaccgccgaggcgcgtgcagccatggcaaaggcgctggaactgaggccgggctcgacggcgcgtaccgcgccgcctcccaccaagaataccagcccggtttatctcaaggccaccgatcgactgataagccttatggtcgccgccgggctacccgagaactgacgcctcgcaagagtggcgccgatcgagtggcgctgcaaatccgagtgttttaatgcgtttgtcgctcactccgcagcgaacgccttgtcaaccggcgtccaaatctgccccctcatcggcgtccaattttgccccctttgcacggcgtggtttgctggtagcgctcgtctcgtcggagctggccgggagagcggaggcgagacgagcgcgggtgatgtgatcgtcgtctcggctgttgaatcgccaactgtcgtttccggtctcgacgatgtcgcagtggtgggtcagccggtcgagcagcgcggtggtcatcttggcatcgccgaacacgctcggccattcgccgaaggcgagattggtggtgacgatgacggaggcgcgctcatatagccggctgatgagatggaagagaagctggccacccgactgggcaaagggaagatatccaggttcgtccaggacgataaagtccatccgggtgagatgctcagcaagccggccctgccgtccgttgcgggtctcggtctcgaggcggttgatgaggtcgaccacattgtagaagcggccacgggcgccggatcggatgcaacttctggcgattgcgatggccagatgggtcttgcccgtgccagtaccgccaacgagcacgacgttgcgctgctgagcgatgaagccgccgctagcaaggtcgttgacgagcgtctggttgatcggtgtgccagtcgaactggaagtcggcgatatccttggcgagcggcaactttgcaatggtgagctggtacttgatcgaccgggcctgcttctcgttgatctcggcgttgagcaggtcaccgacgatgcgctgaggttcatgctgtcgcttgatggcggttgccatgatctcgtcgaaggcggccttcatgccgtagagcttgagctcgcccatgaggtcgaagatttgagttcgttccatcagttggtcttccggaggttgtcgtaacgggcacaatcggcgatcggcgcatggcggagcgttagcgcagccggcgtcatgatgtttgccggtggagcgggttcgcgttgcctggccaggatgttgagcacgacgtcgtcagagtggacgccgtggccgagtgcttcggcacaggcggcttccaccgccggcagaccgtcggtcagcaccgcgttgaggatgtcgaccatctgccgactgccatcgtcgatgctggcaagccggcgccgaatccgcccggcgatgccgggcgcattttgtcgccagttgcatgaaatccgcgtctggtgccggtctcaccagcccagttcacgcaagtaggccgcgcgggcggcgataccggtgtgggtgaagtccgtgaagacgccatccacgccgagacggaagaacttcaggtactcgaggctcggatcgttgcgatagtcggccgccaggtacttcttctcgttccggaacgtgaagacgtggacgaacaggccgagcttgtgcgcgtcggcgatgacgctggtggcgtcctgcgtcgatgcgtctgccgtcgagcccttgtagggcgtgccgtcggcattgctgtccttccacggcgagatcttgtacggcacgatataggccttccacgggccgatgccgtcggcataggtcttgatctcggcgaggccttccggcgtcagcatcgcatcgaaggtgcggctgtccccggcaaccgtccagtcatagggacgggaattggcgatgttgttgagcagcaccttgccggtcttgaagtcgacgccgttgccgtcgatcagctggacctgccgcgtttccagtccgtggctgcgcatgtatttcaggctgccgggctcgaagctctgcacgatgatcggcgcgtccttcgcattgaggccgttctccttgatgatcttgatcagggcatcctcgagcggatggctgccgggcgcgccgcagccgttggcgatcgcctgcgcgttgttccaggtcggattcttggtttccggatagaccgagatcgtgcgccccgtcgccttgctcttggccctggcgatgtcgatgatgtcctggaagctgatgatcgggaatttgccgttgaacagcttcggccgttcgttggccgcatcataggtggtgccggcgatccactgcctcagctcggccatggtgaaatcggtgatcgaccaatcgttggtgtgatcgtcgccgtcgacgatcagcgccttcagcaccgacttcggatcggccggatcgacgaggtcgctcggatactcagccggcccgctggtcggcgtttgcgcccatttcaccttgacgggcacgcccggcgtcgtgcgcttgcgcttggcgacctccgcgttggtctttgccacttcggcaacgttggtgttgtcgccgagccatggattgtggcgtgccaccagcacgcaatccttggtcaggtgcaggtcctcttcgagcgagtccgtgccgaggtcggcggccagctcatacgaggcctcggtctcctccggcaccaggcccggcacgccgcgatgtccgatgacgagcggcagctttccgtcgacggtcaggaagggctttgcgcctgatggtgccgggccggtctgcgccgacgccatcgacggcagcaggacggccgcaccgagcagcatcgctgcaaaatgtagtttccgtcccgaacgaatgtgcttcacggccaagtctccatctcttgtgcggcatcggggcgatgccgcaacggccgagccgaaccgggccgacgcggctatcttcttgtctcaatcttctgacagtccgatgactgttgggcaggcgcgggcggacaacgggccggcgtcccgcgtatcagcgttcgatccggacgctcatgccgggttcgagaccttctgcggcgccggcggggtcgaggcgcagccgcagcgtgttgcggtcgtgatcgccgatcacgcgctcggcctgccaggtggcgaacacgccgagcggccgcaactcggtgacgagggccttggtcgcgccgccgccggcattgcggttgacgttcacggtgcttccgatcgcaagaccgtcgagatggtcctcgcgcacgttgaacgagagccattgcccgccggccgccgcgaccgccatgatcggctgacccgcacgcacgttctcgcccagttccgcagcgatcacgctgaccacgccatcgaccggcgcgcgcagcaccatcttgtcgagccggcgttcgagcaccgcgacggcggccgcagcggcctgcacctgcgcgtcggcgatggcgcgctcctccttggtcggccccgccaccgcggcatcgtaattcgcctgcgccgccgccacgccagcgcgcgccgcggcgacgtcattctcggcctggtcgagcgcctgctgggtttcgaaattctggcctgccagcgtgttgatccgcttgaactgggtctcgacatagtcgaggcgcgagttggccttggagatcgccgctttcagcgaatcgacctgctcgcggcggacgccggcatagacattgttgcggcttgcgaccgcggcggcgagcgctgcccgcgcctgatccgcctgcgcggttagctcgacggcggagagcctggcaaggacgtcgccggcgtgcacctgcgcgcctttctcgaccgcgatcgacaccagctggccgttcacctccggctcgatcctgacctcggtcgagcggaccacgccgacgatcgcgggcgtcggcgtcgcgcggcttgcatagatcagcgtgcctgcgacgagcgcaagggggatcgcgatgacggcgacgcgcctagcgttgggcatcttgctgtcctctcttgaacaccagcgcggagatcacggcgagcgcgaaatagcccacggcgaggcaccacagcctgagccagtcatgcgagacctcccagatgctggcgccgagttggttgatgcgcacgaggccatcgatcgcggagtcggccgggaacagccggccgagcgcggtggccgcagcggggatcgcctcgcgcggccatgcgaagccggcggtgaagaattgcggcaggctggtcgccagcagcaggatggtggcgttctccggccgcgtgaaccaggcgccgatcgcctgtcccaggaagctcgtcgccagcaggaacacgctcgccagcgcgaagatctgcggcagatgcccgagcgtcgagaaaccatagatccgcggcagcacgatcagatagagcgcgagcgccggcagatagatcgtcaggtgggccacgccgcgcccgaacacgcccgcgaccgtgttgcgggaattcgccagcgccgtgccggtcagcatcgccgcgccgatcagcagcgtctgttgcaggatcaggatgaacgccgccggcacgatatagctcgcatagccgccgaccgggttgaagatcggttgcagcaggacgttggccgggctgaggctcgccagcttggccttgacaaggctgccgtcggcgcgggcgccgcgcgacaccaattcggatgtcagcgtgccgatcgcggtggcgacggcgccagcggtcgagcggaagatgaacagataggtggcgtcggcgtagaccgggatatgcgccgtgatgcccttcagcacgtcgcgctcggtgccgggcgggatctgcaccgcggcaaacgcttcgccgcgatcgatcgcgctccgcgcctccgccagcgtgcgtgcgcgaaccgtcacgctcaatgtcccgctggcatccagcgtctcgacgacctggcgggagagatcgctgagatcattgtcgacgaccgcgatcgggagcttgcgcaggatctggttcagataaggttgcgggtagtagatgccgtagatcagcggagccaggaacagcaaggtgaacgcactgcgcgttccgagcacgcgccgccactcccccaggaaggcgccgccgatgccgggcggcgtcgggccgcgctccggcgcttcggcaggctgagccatttcgaagaagcccttgcgcgtcaggctcgccatgcgcagccatgcaagaccggcaaacagcagtgtgagcccggcgagcgcagcgaagggaaatgcggattccgagactggtaacccgcgcgctgcctgtcccatcagcaccgccatgtaccagcgcagcggcagtatcgcgctccagacctgcgcaaacgtgttcatgccgatggtcggaaagccgacgcccgcatagccgaaggcgggggaggcgaccaggccggcgagtcccagccccgtcgcgaggtcgccgaccgcgagctgcaacagcgcaccgatcgacagataggcgatgatgagcagcgagccggcggcgatcatcagcaggatgtcgcccttgaacgggatctgcagtgcgccctccagcacgagggtcaccgccagcatgatcacgacgaagatgcagaacagcggcgccagcttgccggccagcgctgcgaccggatcgccgcctgcgcttgcgagccactcccgcccgttgcggcggcggaattcggagccgaccgagtagccggcggcgagcgtgatcacaacatggatgatggtcggcagcagcgcgcgcagcaggaactgggcgtagttcttctgcggattgaccagcgcgatggtctctgctgatagcgtgccgatcgacgccggcgctggggcggcgcggctggccggcgctgccgcgttcgccgcggcggacagggcatcgttgaggcccgacgaggcgatgccggccgcggtcaggaattgctggttgtagaagccgaccacctgcggacggcgatcggccttcaggtcgcgttcaaagttcggcgggatgaagatcgccgagatcgccttaccggaacggatgtcctgcacggcggtggcgagcgagccggaatcgtcgacgattttcaggctcggagacgccgccacgtgttgcgtcagcgcgcgcgaggtatccgacttgtcggtgtcgacgatcgtgacgccgaggccgcggatgaccggctggctgaacacggtcgtgagcaccgcgaaggcaaacagcggcacgccgaagatcagcagcagtgcgacgcggtcgtgcaacagccaccggcactcgcgctgtgcgacccgccagaatccgggcttcgacgccagcgtcattggcgcgaccgccagtcgagataggcgctcatgccgggccgcaactcgggcaccggctgcaccggataggcgcggatcgagaatgtccgcaagtcgaaatcgccggtggcgcgggtggcgcgccaactcgcatattcgcccttggtcgcgatcagcttgacctcgaccgtgacatggcggtcatcgagcgccggaatgcggacgtcgaacttgtcgccgaccttcagccccttgaccagatcttcgcgcagatcgaagtggatccacagatcggccaggttgatcagcgtcaccagcggcacgcccggggagacgaactcgcccggctcgacgttgcgctgatagacttgcgctgcaaccggcgcgtagactgcgagctggtcgatgaccgattggacgctctggatatcagcttcagccttctcgacgtttgccttcgcgatcgcgcgttcttccttggtgtagccgttgaccgcctgctcataggctgatttcgcctgatcgagcccgcgctcggcttcgtgcaatgcgtcggtggtctggtcgaggcgagcctgcggcgcgttgccttgctcggtcagcgtcttggcgcgatcgtaggtcttctgggccagcacctgcgcggcctcggcgcgctccatctcggccttgcgagcggcgatggtctcgacccgcgtgccgaccagcacattggcgagctgcgcatcggcgacggcctttgccgctcgcatctggtcctgcttggcaagcgtttccgggttgtcgatctgcaccagcacggcacccgcggtcacgttctgtccgcgttcgaccgggatgttcttgacgcgaccgtcgacgcgcgcggcgatgtcgagccgcgtcgcatcgacctcgccctgcaccagcagcggctcgggccgcagcagataataggcagacagcgcgacgatgacggcggcaacgacgccgacgatgatcgccggcatgcgcgttgaggcgtgcacattctcctggggcgttgcttgtggcggctgcggcgtgctttggctctcgctaccagaaggtgacacgtccatagctgaccccacattggctcatgaccaggatagtcattcactatggcgcggatgttaaatcctgccaacctcggccgcttgtccgatcttgctcgaatctgtccggttcaactgcgcgcgcattcgctgctgccatcacgtttcaatgttccagagcgattgcgatcactgccggttgatgcgacgtcggcgcgagcggtgcgatgcgaacaaaccggccttgccggccgcgcatggccgcgccgatcacacggatagttgaagccctggcacccgaataaatcgcatccgattaaatcgggatacttgaaggctggccgcgccatccctttatcaagcgcgagcgaattaatcgtgtacgatgtaaatcaggagcgttaccatgaccaccaggatttcctatctcgccgggacgttgaaaaccatcgcgctggctgcggcgctgtcggccatcgcggcgacggcggcctctgcccaggccgcgatctccgagccagccgccttccaggcgctctatccgtatcgggacgtgctcaacaacggtgcgccgacgcctgccgccaagctcgtgctcgagccgccggcggtgctgcagaggctccaggcgctggaaagcggtatcggcgtcgttgaggcgccgcgccgcatttcgcatcgtgcccggcgctgaggctctcgaatctgtgattgaatgatgattgtcatcctattgatcgcaagcttgcgccgactacgtcgaaatacaggactttcccttatgacggagacgttccatgaccaagcagatcgacgacctctcgaggttctatcgctttgaactcgtgcacggcgaccatgccgacttcattgcctatcaacgcaatctgggcgatggcgtctggcagacctattcgacctggatgattccaggtgcgaatggcgaatagcgcgggctgacggcccgaaatgaaaaacgcgcccggtatggccgggcgcgttttcattggctcttggcgggcgcgcattgcagcggacccggccgcttgccgcggcgtgcgtcagttcgacttcaccagcgggcagccgcccttgtcgagcgggcggaacgcttcgtcgccgggcacggtggcgatcagcttgtagaggtcccactcgttcttggattcctcgggcttcttggtctcgaacaggtacatgtcgtgcaccatgcggccgtcgatgcggatatggccgttcttggcgaagaagtcgttgatcggcgttttgcgcatctgctccatcaccttcggcgcctcgtcggtgccgacggcctcgatcgccttcaggtaatgcatggtcgccgagtagaggccggcctggatcatggtcggcatgtggccgaccttctcattgaagcgcttcgagaaggcgcgggtctcgtcgttcatgtcccagtagaaggcgtcggtgacgatcaggccctgcgtcgccttcaggccgagtgcgtgggtatcggtgatctccatcagcagcgcgatcagcttctggccgccctgggccaggccgaactctgcggcctgcttcaacgcggtggtggtgtcgccgccggcattggccagcgccacgaccttggccttggaggcctgcgcctgcagcaggaaggacgagaagtccgacgagttgagcggatggcgcacgtcgccgagcaccttgccgccggtctccttgacgacgttggcagcgtcgcgctgcagcgccatgccgaaagcgtagtcggcggtgacgaagaaccaggtgtcctcgccgcgcttgaccatcgccttgccggcgacgttcgacagcgcgtaggtgtcgtaggtccagtgcacggtgttgggcgagcaggcggtgccggtgatgtcggatgagccgccgccggagttgatgtggatcttgttcttctcgcgcgtcagcgccgagatcggcagcgcgaccgatgaggtcggcacgtcgaggatcgcatcgaccttgtcgttgtcgtaccagttgcgcgcgatgctgacgccgacgtcgggcttgttctgatgatcggccacgacgacctggatcggcttgcccttcaccttgccgccgtagtcggcgaccgccatctcgacggcggcgaccgagcccttgccggtggcgtccgcatagaggctcgacatgtcggtgagcacgccgagcttgacgacgtcgtcggagatctgggcgttggccgcggtgccggaggccgcaagcgcgaggctggccgccgctgcggccaagagcgatttcatcgtgtttctctccctggtttttcgtcgaagattgcttccacgggcaccttctatccggtgcggcaacctgtcgcaaaggcgactttttgggcatgcggcgggggagcgaggcacggcgggcgccattcacctctccccgcaaagagcggggagagggagagccaagttacagcgccggtagcgcggtgacggcggccttgatggtgccgtcggtttccacgaccacgcggagcgttttcgaatcgaaagcgatgctggcgaggcggatgctggtgacgtcggcatcgacccggatgccttcctcgttcttctgcaggtcggcgatggcggcggcgatcttgcgctgcgcgttgctcgcgaacggcttgaggtcgaccaccatccggtcggcgagcgcctgctgcagatgcgggatcgcggcgcgcgcggcggcgccgagcaggccgaacgcagcctcggactcgaccgccagctcgacgtcggcgagccgcagcgtctgcgccgcctggtcgagccgcggccggccccagatgtgcacggtcgcctcggcgccgaggccgaagaagctcttcttctccttggcgtgcaccagcagcgagatcagaagccggtcgccggaggcggcgatgctcgcgctcttgacggtgacgtcgaccgggccggagccgtcctcggggaaagtcttgcctttcagctgcgcctcgacgagctgcgtcagcgtcgtgaaggacatgtcgaccggcaggccgatcgcgacctggctcgacatcggcggcacgatggagagcttgtcggggaacgggcagttcggggtcgtctgtgcctcggtgatccgcgtctcggcctcgattcccatggtcaggatcaccgacgacgcatcgaccttgggctgggccgcgatcgcgcgggtcggccgcagctcgagccacatcggcggcatcgacgaggtgccgccggtgccctgcagcgggatcgaccggcaggctttggcccattgcgcgcgggcgctgttctggaacaccgggtcgttgcgcaaccgtgcctccaccacggaaatctggtcggcgaccgccttgtcgatcaccggcttgacctgggccggcacgctgatgcggacgccggcggccgacaggctggtgtcgccgagattgacctgcgcctgcaggttcggctcgatccgccaggacgcgccgagcttcggccgcgcagtcagcgtgacgctgcccttgatgtcggcgttggcgttgacgttcttgatgttcacggagccgatctgcctggcgacattgccgccgagcaggctgccgagcgcgttggtgacggcaccggtcgccttgtccgatagcgagccggtgaccttgagcgtgccgttgatcggggtcgtcagcgtcagcacgtcctgcgcgccggtggccgcgatcggcccgcgcgacgcggtccagccgatgtcggcattttgcaggatttgctggaccgggttgtcggccttgccgccgaaggtcttgggcgcgccgcgttcggcggcatcgcggatcgccgacagcgcgaccgagacctgcgccacgaccgtcgaggagcgcggcgacggcggcagcggcggcaattgtaccagtggcggcgtctgcacggtgacgctcggcgcgagccagtccatggctttgaggctgatcgcgaacgagacgaggaccacggtgagcccgagcgcgatcgtccttggatgcatcggtagacgcatcgtccccccggatgaaaatcaacttgacgggttgtacaggccccccgacgagggcgccagtgtggcgggatcacgctgcttcgggggcgggggccggcggcccgcccgggatcactcagacgttaacgatctggtcgttaacgaatatgaacgcgacaacggccccggcaagatgccggagccgtcgtcgatgtctggaaatgtccggctaaagcgcggcgcgacggtcggtcatcggcagcacgatcaccttggtgccgacgctgacccgcgaatagaggtcggtgacgtcctcattggtgaggcgcaggcaaccggaggagacatgggtacctatcgtctccggcgcgttggtgccgtggatgcgatacacggtaccgccgagatacatggcgcgggcgccgagcgggttgccggggccgccagccatgtgacgcggcagatagggctggcgcgcgatcatttccggcggcggggtccaatccggccactctgccttcttggtgatggtctgggtgcccgaccaggtgaagccgtcgcggccgacgccgatgccgtagcgcatcgcctgaccgcctccgagcaccagatagagataggtgtgcggggtgtctatgatcacggtgccgggcgcctcgcgggtcggataggcgacgacctggcggcgcaagcgcgcgggcaattcaaccgaacggtcttcctcctgcgcctgcggcatcgactgcaccgggggctgcacggccgcggtcggcggcgtcaggatgaaggggaacatcggcagcggagcggccgcggcggagttcgagaaggcaacggcgccaatcgccagcgcgccgaaggcggcggcagccagacgcgtatttagcatgatggaattgaacattgtcgacccctgttgtttgcgccctgcgcgccagttcggcgcatcgttgaggaaaccaatacaggggaggcgtttcaggacgtttgcacgaaatcgccaaaatggtttcgtggcattagggttttgtttcgttcgtgtttcgtcgcagggttaagggcgggttgccggcaagcgggcgacctcagaggtggatgtatccggccagtccgtcccacagcagcttggccgcggtaatgacgagaatggcgtagcagaggcggtacagcgcccgctggtcgagccgttcgtgcagccgccaaccggcccagacgccgaccggcacggccggcacgcaaagcgccatcagcatccacaggcttcgcgacggcgtggcgagcacgagccacggaccggccttcaggaggttgccgaccgtgaagaacaggctggtggtgccggcgtagagcgccttcgacatgccgagcggcagcagatagatcgcaagcggcggcccgcccgaatgcgccaccatcgtcgtgacaccggaagacaggccggcgaccgcggccttgaaggtcgagcgcggacgcggcttgatctcgccgccgccgatgaaccacagcgcggcgaacaccagcgtcacgacgcccatcacgatctcgacggcatggcggtcgagatcgcgcagcacgaaatagccgaggccgatgccgaccacgagcgcgggcagcagcatcgcgaggtcgacccgcgaccacgtattggggcgccagaatcgcagcgccgtgatgtccatgatgacgaacagcggcgcgagcagcgcgccggccgcgatcggatccatcgccagcgagagcagcgggatgccgacgatggcaaagccgccgccgaacgcgcccttcatgaaggcgatcaggaagacgccggcgagcgccaccgcgagcacgaaaggcgcaggcaggtctgtgatgatggacgtgatcatggtgtggtgcggagcgttgtggtcgtgctcatacatggccacgcgcgcatgcatgtgcaatccaaatattgctctcggtgcacattgctctcggtgcaatcggcgtctgtgcgctagccggtgcgcatccgcggcaggcccggcctgtcgccgttgagcgcggctcggcggtcggcgacggcgtgatggaattgctccagcgtcagcccgatcaccgacaagtcgccttcatcgatcgcgccgtcgtcgtagcaatcgagcgcctcgcgcagcagcgcgtcagcatcgctctgcatcgccgcgagctgctccgcggtctcggcgccgcgcacccgcgcgatcagcgtcagcagattgtcgcggtgggtgatgtattgctcacgctcgtcgcgcttcatgtagtggcgcagccaggcgccggccgaaccgaggccggagagcagcaggatgccgccccagatatagtcggagtatttttccaggaaggtgcgctcggtgccgtcgatataggcggcagcgccctgatgcgccggcaatgcggcgtccttgtcggtatccggcttctcgatcttggctgccgccggcaggtcgcgcgcgacctggaggcgctgcgtaaacagctgccggtccagcgcgccgacggttgcctcgtgcaggctgtgctgcgcgatgatcaggtggttgacgctgacggtctcgaccttgtcttcgggacgggccggcgacgaagagaagatgctgccggcgatctcctccgattcgtagagcggatgcttctgcgcgattgcttcggagacctcgatgggaatgaatttcggctcgccgcgcgcggccgccgtcgccgcgatcgcttccgccgtcaccttgctgtcgagcgggccgaccgtcatgtaggcgtcgagcgacggatcgcgcgcgaggtccgcgatcttgttgacggcgaactggctgaccgcgaccttgtcggggttgacgccggactcggtcaggatcacgcgcagcagcgtgacattggcctgagtgctgccgaccacgccgaccttgtgcccggcaaggtcgtcgatgctcttgatcttggcggaccgccgcttgcctttgccgcccgagggcgcccagagcaccacgacattcttgcgcaggaccgcgaccgactcggcgctcgctggcagattgaggtcgccgcgcaccaccgcgagatcgaccttgttggcagtgaacagcgcgatgctttcggcggcgccctgggtcgggaccggcttcaatcgcaccgggcttccgctgtgcgcgaaggcctgggcgaagccctggacgagcttgacgtcctcactgccggtcgggccgaccgcgatcaacagcgtcaccggacgtagcgcgtagagcagcgcgcccgcggcgccgccgaacacaaggatgccgatcgccaggatcaggagcgacgagtttcgtcgtttgagcctgcggcgcgtggtgccgggattttcactctgctctgacatctgattgtcacgttacacgaaaaaccggccgtttgccccgaaaaacaacctaacatttcgatgacgtcatacgtttgaaacatccatgtcagaacgtcgtgcgagcagaatcaagattaacggtttggatctcctgcaatgcgcatactcgttgcgaccgatgcctggcatccgcaagtcaacggcgtggtccggacgctgacgtcgctggcgcgcagcgcagcgacgctgggcgccgagatcgaattcctgacgcccgacggtttccgttcggtcggcgtgccgacctatccggggcttcgggtggcgctgccgaaccggcgcgagatcgcgcgccggatcgaggaggccgcgcccgaggcgatccacatcgcgaccgaagggcccatcggctgggcggtgcgcggctattgccagcgcaacaagctcgccttcaccacgtcctatacaacgcgcttccccgaatatgtttcggtgcgcaccggaattcccgacagcgtcggctacgccgtgctgcggcacttccatgccgcaggctccatgacgatggttgcgaccgactcgctgcggaccgagcttgccgagcgcggcttccgcaggctcggctcttggacccgcggcgtcgacaccaagatcttcaatccggatcagccggccgtgctcgatctgccgcggccgatcttcatgaccatgggccgtgtcgcggtggagaagaacctcgacgccttcctgtcgctggagctgccgggctccaaggtcgtggtcggcgacggcccgcaacgggcggcgctggaacagaaatatcccgacgcgattttcctcggcgagaagaagggccaggatttgacctcgcacctcgctgccgccgacgtcttcgtgttcccgagcctgaccgacacgttcggcgtcgtgcagctcgaggcgctggcctgcggcacgccggtcgcggcgttccctgtgaccggcccgaaggacgtcatatcggaccatccgatcggcgcgatcgaccatgatttgcgcagcgcctgcctgcgcgcgctgaacatgtcgcgcgcggactgccgcaattttgcgttggagcgttcctgggaaaacagtgcgcgtcagttcatcggcaatcttgccacgctgcagccgagccgcgcgccgcggcccgcccgccgcgtcgccggccgcagtgcggttccgaattaacagctcaatcgaacgaaagacgagagactctctatggctgaaattatcaagctgggcgccgaccgttccatggacttcgaccgcgagacggtcgagcaggcctacgaccgctgggcgccgatctacgacctcgtgtttggcggcgtgttcagcaagggccggcaggctgcgatccaggctaccaacaagatcggcggccgcgtgctcgaggtcggtgtcggcaccggcatctcgctgccgctctacggccaaaacgtccgcatcttcggcaccgacatctccgaggcgatgctggagaaggccaagaagcgcgtcgccgagcagggcctgaagaatgtcgagggcctggcggtgatggatgccgagaagctcgaatttcccgacaattcgttcgatgtcgtgatggcgcagtacgtgctgtcggcggtgccgaatccggaagccgcgatggacgagttcgcgcgcgtggtgaagcctggcggcgaattgatcatcctgacccgcgtcagcgccgatgccggcgtccgccgcttcatcgagcagacactgcagccggtggtgcgcccgctcgggttccggaccgccgaattcgcctggtcgcgctacaccaagtggctggccggcgcgcgcggcatggagctcgcggagcgccgcctgatcccgccgctcggccatttctcgctggtccgcttccgcaaggcggacgtcgccaaggcggcctgaggccaggcagctccttccgggtgaggtcgcgcacagcgcgggtccgaaccgggaggctacgataccctccgcctcatccgcgcaaatcgccgggatgaggcgagaccttctccagtcgcgtcaaggtgtcgctccgcattgtcatatgtcattatgatgatgtcacacgcggtacatcgaagccctgtaaatcctgtcccgaaagatgttgggggaaccaatgatcaagaattttctgcaagagctgcgtacccagcgctgggatgaccatcgcttctaccatcacagccggatcaaccagagcctgcacttcgtcagcgcgctgagcttcctgttcgcctatgtgatgctgttcttcgatccggtcgtgtcggcgctggtcggctggctggtctcgatgacctcgcgccaggccggtcacttcttcttcgagccgaaggggtatgaccacgtcaaccaggcgacccacgagcacaaggaagacatcaaggtcggctacaatttgcagcgcaaggtcgtgctgatggcgatctgggcgctgtcgccgatggtgctgtatttcgatccgacgctgttcggcctgttcaagccctgggtcacgatgggcgacttcacccgtcaggtcgccaagatctggcttgcggtcggcgtcggcggcctgctgttccgcaccatccacctgttcttcatccgcgacgtcgagaccggcctcgtctggatgaccaagatcgtcaccgatccgttccacgacctgaagctctatcacaaggcgccgttgttcctgatgaagggcgagctgatcgatccgggtctcgagaagcacgtcaggcacgcctgatcgttgctcccagcgtcttcaaactgcgtgatgcccgggctcgtcccgggcatcaccgttcttagggccatgcaagaagacggcttcgccttgaatcttctcgaccacgcgctgacttcacctcgccccgcttgcggggagaggtcggattgcatcgtagatgcaatccgggtgagggggactctccgcgagtccgtctatcggtgctctcgtcgagagtcccactcaccccgactctctccccgcaagcggggcgagggagcaaacggacggcgccagccgtcagcgcccgaacttcacggcgaccatctccttcaggatctgtcgcttgatgttcttgttggtgaggccttccttgtgccaccaccagccgtcgcgcttcatcttttcggcggcggcgacgaaacgatcgctgacctcggcgaagtcggcgtcggtgtaattcagggtgaagatcaggcggccggtgccgacccagctcagcgccaggccttcggcccgcaggtaatattgcagcatccagttgtagcgggacggctcggtgtaatagacggtccagatcgacgagatgttgccgacgcgaaccggaaggcccgcggccgtgaggcggtcgttgagcgccttggcgcgtccgttccaggtctcgtccagcccgttatagatcgagcggaagttcgggctggccagccggctcaggaactcgtccatcgacgtcatgacgtaggggtgcgagttgaaggtgccgcgcgcaaagcagatgtcggcgggacgatcgtcgcggaagcgccgcatcagatccttgcggccgcacaccacaccgaccggcaggccgccggcgaggctcttgccgtaggtcaccatgtcggccttgacgccgaaatattcctgggcgccgccggccgcgaggcggaagccgacgaacacctcgtcgaagatcaggacgatgccgcgctcggtgcagacctcgcgcagcttcttcagccattcggtgtaggcggcgcggtcgtatttcgagctgcgcgacgaatcgaccagcgcggaatcgccgggcgcgttggagttcggatgcagcgcctgcagcggattgaccagcacgcaggcgatgtccttgcgggtgcgcagcacatgcagtgtcttctcggacatgtcggcgagcgtgtaggtctcgtgcggcgacaccggattgccgacgccgggctgcacctcgccccaccagccgtgatagctgccggcgaagcgcaccaggtgcgtgcgcttggtgtggtagcgcgcgagccgcaccgcctgcatcacggcttcggtgccggacatgtggaacgaaacctcgtcgaggccggagagctcgcagagccgcttgacgttgtccgcgatgatcgggtggtaggggccgagcacggggccgagcgcttgcgcccgcttctcaccctcggcgatgcactccttgtagaagtcgttgccgaagatgttgacgccgtaggagccggtcaggtcgtaggccacattgccgtcaaggtcggtgacggtgacgccgctggaggcctgcacgaatgccgaggtgttcagatgctcgcgcaccaggcggctgtactggaacggcacgcggtaggattcggtgaactgcaggtcggagatgcgctccgtcacctcggcggtgagcgcgcggcccttggggtagcgatccccgtagaggccggcgaggcggaagaagccgtcctggcgctgcatcgcgatgttcttcggcgcgccgtcggagcagaagaactcgtcgatgtcgaattcgtagtgcggcaccatgcgcgcgaccatcttggacatcttggaatgtccggtcagcgagcggtgcttggcgcgcgacagcgcgatgcgggcctggatcttggggaaggctgcggcggcgccggcaagggcggcggcggacagcgagagaatcggaagggatgtttccatgacagaagcgctagcctcggcacctaacaaattcatgacagtcaagggcctgatctcggcattcacccagcaggaggacctcaatttcctgctaaccaaccggattccgcgggcggcgctgacccgcttcatgggctggttctccaaggtcgagaatcccttggtgcgcgatgcctcgatcgcctgctggaagctgttctccgacctcgatctgtcggaagcgaagaagaccgagttcaagagcctgcacgattgcttcacccgcgagctcaagcccggcctgcgcccggcggtggccgatcctgccatcatcgcgagcccgtcggatgccatcatcggtgcgcatggccggatcgaggacactcaattgttccaggtcaagggagcgccctattcgctgctcgatctgctcggcgatcccgcgctggtggagcagcacaagaacggccgcttcgtcacgctgcggctgacctcgagcatgtatcaccgcttccacgcaccgtatgatcttgccatcgacaaggtgacgttcatccatggcgacgtctggaacgtcaatccgatcgcgctgaagcgggtcgagcggctgttctgcaagaacgagcgcgcggtgctgcgcgcaaaactgccgaccggcgaggcgctgaccctggttccggtcgccgcgatcctggtggcaagccttcgcctgcatttcctcgatgtcacgctgaacgcgcagtcgcgggggccggtggatttcacctgcgacgcgcatgtgaagaaaggcgatgaactcggctggttcgagcacggctcgaccatcatcgtgctcgcgcccggcaatttcgagttctgcgacaatgtcgttgagggaacgcggatcaaatgcggcgaaccgctgctgcgaaagcctgtgatttgatcgggtttttccctcgcgtgtcattgtttgagcatgatctgcccggaaaactggtttccccttttccggatcatgctttagaatggcgttgatcgtcgagcgacgatcctaaatcgcaaacctttgggatatgagatggcgcggacgcctgttctggcggcgggaggcatcgtgctgcggcgggagacgccgccgcgctttgccgtcgtgcgcctgcgcaagcgcaatgagtgggtgctgccgaagggcaagctcgacgacggtgagacggcgcgcgccgcggccgagcgcgaggtgctggaggaaaccggccacgccgtcgaggtgcacgaattcctcggcacgctggtctatgagtccggcgggcgctccaaggtggtgcactactggcgcatggatgccggcggccgaccggtgcgcgagttgatgagcgacatcagggaagtcgactggctgccgctggacgcggcgctcgaccgtttgtcgcgcagctatgagcgcatgttcctggagaatgtcggcccgatcgcgctgcaggctgcggcgcaggcggagcgcgagcgccgtgcgcggctgcgggtcgccgccgccgaacgccgccgcgcgcgcgttgccgcggaagagccggccgttgacgcacccgtcgtcgtcgatacgcctgcgatcgctgatcggccggagttcactgaactgccggagttcactgaagtgcccgaggtcgccgagacgccgatcgcggctgacacgtcactgccagttgacgtgtcagtcaccccggagccgtcagatctcgcggagacaccgactgtcgatgccgagccggatcggccggccatggtgcccaaccatgcggcggatgctggcgaagtggtggagaccgagtatgtcgtggcggtcgctgcatcggatgagcagccgtcatccgcgcgcgagatcgaagccgcggccacggccgatcagcccatcctgcgcaagaacctgatcgaacgcgtgcgcgactggctgcgccgcgcggcctgacgcggcgcgcttccaatcaattgtggcgcttgctcttgggcggcggctttgccgcgcgcggtggcggtgcgcgccgttgctggaaggccggacgcgcctgcgctgcgggccgttgcaggtccggacgcgcgcccggtgcagcctgctgaaggccgggtcgcggctggccaggtgactgcggcaccggctgggccgtgccctgtcgcggcaggcccggttgcacgggctggcgcacgccgcccggcgcctgcgtgcgtccgggctgctggccgccttgacgtgccggcggctgttgagcgccgggttgcgtggcgccgccttgtcgcgccggttgctgtccagcaggctgctggccggccggcgtctggacgccgggcgcatgcggcagcgtcgtgccgccgggctggccgggcagcgcgtgccgtgcgccgccttgctgctgcgtgcccggctgctgcgagcctggctgttgcgcaccttggcggccgggcgtgcccggttgctgcggctggccgggacggttcggctgaccgggctgctgcaactggcccggccgattctgctgagccggcggttgcgggccgttgcggttctggcccggcagaccgttctggcgctgcgggttcggctgcaccggctggccgcggttcggatagggcgcggccggattggtgcggcggaaatcgggattggctctgcggaagtcgcgctgctcggtcacgacctggcggcccagcgtctgcgcggaatgcaccgcgcgcacgaaaccctggtcgcgcgtcatctgctgcggcgagatcgtcaacggcaccgcggcaaagcgcgcgccgccggtgccgggacgaatcgcaaaaccgctggcgccgcgcgtcagtacgccgagcgaggcgccgctgcggtcattgacctcgatgcggccgacatgtccgtcggcgtcgggatagagcttgatgccgacattgttgctggtcgcacgcgcgccttcgggcacttcgacaaggccggtggtgccgcggatgccgagggttgcggtcggcgtcgagatcttcatgttgccggtcttggcgacggcggcggcgacgaacgccgccgttcccttggcgacgttgaacagcgcgctgttctgctggccgccatcctcatagacgtaattgtcgatcgtgatcctggcattggcgcgcaggttgaaggtggtgccgtcgttgaaggtgatgccgagcgaggaggttgccgatgtggcgacatcgtcattggcgaatatgtcgtcgcggatctgcagcggcgtcgtggtgttgttgcgcgtgaccgtcgcggttccggtcagcgtggcgacgttgccgatcggctcgggcgcggtggcctgcggcgtcgcggccggagcagcggttgcgggcgcggccggcgtcgcgctcggcgccgcgccaggagcgggggccggagcaggctgtgcttgtgcaagctgcgtcagctcgggcgcggcatcggcggttgtatgccaacccatggcgacgccggcaccaagcaggagcgcaaagagaaaggtgcggcgcatcaccatcgattcccggggaggccttggggatcggcaattgagccgcgtcaggctgaatgccgaatgaacggtcctgccttgttgtcatggcggaccagaacgatcaagcaccgcgcccccgacaggaagcgcggtgcccggtcgctgcttggggttttggttatccgcgcttgtgaggagtgatgttgagtggcttcgccggcttggccgcgggggtgtagcttgcgggctgcgcggccgccgcagggggcacgtagtggaagacggccttgcagccgtcgctgagcagcgcgcgctggcgcaccatgcaggcggtgacgcgatcgacatccgggatttccgaactgcacagccgcatcgcgtcgccggtgcacatctgctgctgctcgtcggtgtaggcataggacgcggacgtcaacagaccgagcgtgaacgccgttgccgccagcagtttgccgtgacggagcgcggaagcggtgaaagccatcttgtcccccttgtggtgatcgcgccgatgcagcgcgtcgtcgggagcatcactaggcaggcttggtttcagcgattcttcatgcgcccggcaaaatggtttcgtcgcgcgccggtttgtttcgttaaccactcgcggacggcgtgagatcggccgtgacggcagcgcgggcctccggagcacgctcgagcgcgagcacggcttcgcgttcggcctcgggcatggcgcggatgcggcgccttgcggtgaggcggagcgcggcaaagccgccgaggaacaccacgaccttgctgacgatgccgaagatcggcatcacgacggcccaggtcgtgatctcgcaggtcagcgcgacgaaggcgttgaccgcggcggaggcgaacatcagccccgaccagacatagccgaccttgacggcgacatcgggcacgactttctgtgcgatctcgggcagatagcggttgagccagccgcgcttcagcatcacgacgccgacgatggcgtagatcacgctgggcttgaacagcacaaagcgcgggtcgttggtgagcagcgtcgcggtgcccgcggtaaccaccaggaacaggctcagccattccatggtatcgatccgcctgccgcgcatgatctggaggccgatctgcacgacgccgaacgcgatgccgaggccgaccgagagcgcggtgttgtgggtcaccaggaacagaacgagaaagacaagggtcgacgccaggtcgagggccagcagcctagccgcggtgaggaaatgcttcatcggtggtcgcgctccgcttgccttgtcatgcctgatcacgccttgccgcgacgcggcgcctgcgtcggagcagctaggcagattgtggggctgcaagcctatcgatttctgaaatcgaggagcgaattctcaccccgaccgcgcgatttccgccgcatccgcggtttgcccggcgatcgcctgccggcgaaactcggtcggcgtcagcccggtgtccgccttgaaggcgcggttgaacggcgccaacgactggaacccggcatcgagcgcgatcgtcagcaccggtacctcggcctggcccgcatcggcgagcgccgccttggcctcgtcgagccgatagcggttgaggaaggcattgaagttccggtggccgagcccgtcattgatcagggtgcgcaatcggtattccggcatgccgagcttgaccgccagcacgccgatggtcagcccctcctgccgataggttcgctcggtcgccatcagatgcctgaggtgattgagcgcggcctggctcgaggccggcgggccggcatgcgcgagcgggcgcgcctgccgcgcggccggtccgtttcccgcgccggcgacggccggctggttctcgggcggatcgaacagcatcatccagatcgcgatcagcgcgaatgcggtaagggcgagtgcggcgctgaggtcgatcgagcgggtcggaagcgctgcccacccggccgcggcggcgaacgtcatctggagaccgatgccgacgaccagcgcgatcaacagccgcccgcgtgccgtcgtcacggccgtgcgccatcccctcggcagctgcgccatcccgagcagcgcgaacacgatcgtcgccagcgccagcgtgcggccgcagcctgctgcgagcgcgggcgacatggtccagccgctatggctcacgacgccgaggccggcgaccagcgtccacaccgccgcgtgccaagggcgcagggcaaaccgctcctcgaacatcgcgcgcgcccatagccagaagatcaccggagaccccatcgcgaaggcgacgaacggtgagctccagccgaatgatgatgcgggaaagaagggggcggtcgtaatcgcataggccgcgccggccgcgcccatcgcggcgccgaggcttgcggcgcgattgactgccgcgtagcgcagcagcagcaccgcgcaaaccaccaggaacagcgcgaccaccgcgcctcgcagaccgagttcaagagccgtcatcgccatcgcaagccgcctgcaggttcaaatcaacctcgacactgcgacgcttatagcgcgcccggcggtccgcatgaagcgaccgccggggcaaccacaaaaatctgatgtcagttgcggttcagctgacccgcttccaggtctggccgccgcagaacatgccgccgaaggcgcagccctgcacgcgcatcgcattcgggcccttcatcgcgatcgtcgagtcgtagttgcggccggagtcgggatcgtggatgcggccgctccatttgccgccgtcgggcttcatgttgatcagaatgcgttcgttggtcttctcggaatagccgcagagactggcaccgcaggcttcgacgcggacattgcccttgttctcctccgtggcccagacgccgatcggtccggtcggcgccgttgccggcgctgaggcaaccggcgcggcctgcggctgcggcgaaggctgcgctgcgaccggggccggtgcggtcgcagcgggggtggcatcgaccggcgcaggggcggcggtcgcaaccgttgccgggggcggaggaggcggc

SEQ ID NO: 55 - DNA, 30419 bp, Bradyrhizobium enterica
ccttcaggctctccggcacgtcgccgttgaggatgcgcgacagcacctggatggtgcggcgaatttcctcgtcgcggccgatcaccgggtcgagcttgccgtcgcgtgccgcctgggtgaggtcgcgggcgtatttcttcagcgcgtcataggcgttctcggcggacgcgctgtcggcggtgcggcccttgcgtagcgcgttgatcgctgcattcaggttctgcggattgacgccgcccttggcgagcagcttgccggcgtcgctgtccttgtcggccgcaagggcctgcagcagccgttcgaccgacacaaaactgtcgccggccttgtcggcggcctgttccgccgcggcgaagccgcgcgcggtctccggcgccagatagatctgtccggagccggcgccgctgaccttcggcaccttcgccagcgcgtcctcggtcgccttgaggatcgcgcgcgaattgccgccggcccggtcgatcaggccggccgcgaggccttcggggtcgtcgagcaggactttcaggatgtgcagcgtcgagaactgctgatgcccctcgcgcgtcgcaagcgattgcgccgactgaatgaagccgcggacccgatcggtatatttttcaatgttcatcgtggcacctcaaggcagcacaagctcgtcgcgatcggtatgccatgcattgccgccggcgacagatggcggaacgatgacatccatcatgcggcagctcagtgcatgtgcgccggcggaaaaccgcgcgcccgacgctgccgcgggtcgtatcgtgtggtcgattcagaggtgtgtcaatcgccgagcgcgccgccggcactcgtccggaggcagtgctggagcgatcgcggtgctctgcaaggcgcgcaacccggcgagcccggatcgttacaatcgtgcgacagccaagatcggattcgcgctttcggaaacgatcacctcgctcgccacgaagtgtacctgttgatgctggtgaacatcgcgcgcgatgttccactgaatcacgcgatgctgcatcaccgcgtactctgaaccgtcgatgaatggcagcgcgcgtgcgtttccaatcgcgtcgatgcgtttcaggctcgtgtaaggtcaagcagctagcgatgaagtatgtcggtgcgttgccgatgcgcggaacttttgttccggctgttacgttaacgggctcgtgctcatcgaagaggctcccaatgaccactcgtctcctttcgaccgtgtcgtgtgcagcgattgccacggcgctgttctatgtctccgccgtgccggcaatcgcgcaggacgcggcatgtgcgccggtctccgcggtcgacaccgcgccgccgccgctgccgacctacgatcagccgccggttcccgggcccggctacatgtggtcgccaggcaattggtcgtgggacgaggatcgcggcgattactactgggtcccgggcacctgggtgcagccgccgcgggtcggactgttgtggacccccggttattggggcgcgttcggcggcggcttcattttccaccagggctattggggcgagcgcgtcggattctacggtggcatcaattacggcttcggctacggcggttcgggctacgaaggcggccgctgggatcacggcaacttcttctacaatcgcaccgtgaacaatctgcagggcgcgcagatcaccaacgtctacgagaagaacgtcacgatcaaccagaccaccgtcaacaacgtcagctacaatggtggccgcggtggcattgaagtgcggccgacgcctgccgagcgcgcggtcgccaacgaacagcatttcgcgccgacaccgttgcaacgcaagcaggtcgagaccgcgagccaggatccgagcctgttcaagcgcgccaacaacggcgtgcccgccgtcgcggcgacggcgcgtcccggcgagttgaagggaccgggcgtggtccatgcgcggccggccggcgaggcggtgcccgccaccgctgcaaagccggcagcgggggaaccggcacggccgggggctgcagccgccgcgccggcggagtcccatgcgctcccggtcccggggaaggagattcctcccgcccagcagaacaagcccgcggccgaggagagacgcgcaaccactgctccggagaccaagcttgagccgcatccggcagcgcctgcgcctgccgggtctcatgcgcttccggcacctgagaagggcgtcgcggggcatccaccggccgaggcgaacaagcctgcggtcgaagagaagcgcgcggcgcccgccgccgagcccaaggtcgagccgcgtcccgcaacggaagctgcgcatcccgccgtgcaggagaagcgacccgaggaagtgcgccgggaagagccgcggcccgagccggccgcgaagcccgtcgcgcggccggagcaggcagcaaggcccgaaccgcggccggagcctgcggcgcggcccgaggcacatccgcagcaggcggcccggccagagccgcacgtccaggccccgccccatgttcaggcgccgccgcgtcccgcgcccgcaggtcatcctgcggaggagaagcggccggagcaacactgagccatgatcgcgctccgccggctcgttccggcggagcgcgatatctgttttgcccgcgcgcaagcaatcatcactggagatcggtcatggcacagagtcacggtggcgacggacagctcgacgacggcaagccccgcctcagcgaggacgatatgcagcgggccctgctcgggccgagaggcgtgccgggcaagccggacaccgccaagatgacgccgcagcaggaaaagaacatgccgaaatatctggatcccgggcatacctcgtagcggctgcgatctgagtacatgccgcgtcgcctgttgcggagcgacgagcgagcgcacttgcaaatcgcccgcttttgcgccctcatgatcgcaggtgcactcacggtgttgcggagctggttgtgagaaatccgtacgaggtccttggcgttgccccgacggcgtctgcggccgacatccagaaagcctatcgcaagctggccaagaagctgcacccggatctcaatccgggcgacaaggctgccgaggacaagttcaaggaagtcgccgctgcgaacgatctgctcggcgatgccgacaagcgcaggcgcttcgacgccggcgagatcgacgaaagcggcgccgagcggccgcagcaccgctactaccgggatttcgccaccgcggatgcggggcatccttatgccgacagctccggctatgccgactacatggaccaggacgacgccttcgccgagttgctccggcgcaccgagcaggcgcgcgccaatcggcgtggccacgacctgcactacagcctcgtgatcgacttcgccgaatcgatcgccggtgcgagcaagcggctgacattgcccgacggcggcacgctcgatgtgacgatcccgccgggcctcatcgacggccaggtcatccgcctgcgcggcaagggcatgcccggcagcggcaagggtggccccggcgatgcgctgatcgaagtcgatgtccgccccgatccgcgcttcacccgcgacggcgacgacatctcgctggaattgccgatctcgctgtcggaagccgtgctcggcggcaaggtcaacgttccgacgccgaccggcgccgtgaccatgacggttccaaagggctcgaacaccggcacgaccatgcggttgcgcggcaagggcgcgcccaaggtcggcggcggccacggcgatgaactcgtcaagctcaaggtggtcctgcccaagggacccgatcccgcgctcgaggcgttcgtatcgaactgggatcgcaagggcttcaatccgcgcgaggacggtgcaccatgaacaagcagcaattcctcatcgatgcgggtctcgaggtgcagaccctggaattctggatcgagcagcaatggctggttccggagcagtccgctcacgacgtcagcttctccgacaccgatgtggcgcgcgcgcatctgatcagggacctcaagggcgatttcggcgtcaacgacgagggcgtcgacgtcatcctgcatctggtcgatcagctgcatggcttgcgccgtgcgttcgaagaattgcacaaggatatcgcgtcatcgccgcgctagtccatgatccggaaagtgcgaagcggctttccgaaaagatcatgctcaaacaacaagctcgtctgagtcgaacgtcagacccgggagacgatcatgacggacaagccgacgccgctggcccatggcgagatcgacgttctcatcctgcaggcattggtgcgcaagctgatcgcaaagggcgtgctgacgccggacgacgtccgcgcgatgctgttcgaggcggcgaagaatctggacctcgtcggcagcgagctgaccacggaagccgccaacatcatcgtgcaggaagatctggcgccggcgtttcttggcggttgagccgtcaggtctggccgctgcggctggagaccagccggatccttgtgacctggccggcattgccggcgagataggcctgtgcgtcgcggaccagccgctccaccccggccgcatcatagctcggatgacgcgtgttcagatgcaggtcggtctcgatctgcatgacgttcgtcgtcgcctgcgcgtcgatctcgatcgagaacgacaccagcgaaacgtgcgggctcttgaacgccatctgtgatctccatttgtcgtgttatcgcgcgcaaggcctcggcatcaccgcgtgcgccgtgacctcaggctgcggaatcttccctggcggccggcgcatgttgcgtgcccacggctgcgtgtccccggtcgagctcctcgatcataccacgggcgatctcgcgctcgcccatgatcacgatgtcggccccgagccccttcagatgatcgacctcggcgtcggaatgcgcccgcgcgatgatctggatgccggcattcgctgcgcgtgcctgctcgacgatctgtccggcctcgaacgcctcgggaatggcgatgaccagcgaccgggcgccggccggattggttgcacgcagcacgctggcgcgggcggcgttgcccatcagggcctcgatgccgcgctgcttgagctttgccaccatgtcgtcggacgcctcgaccgcgaggaacggcgcgttgcgctggtgcagggcgtcgccgacgatgctgccgacccggccgtagccgaccaggatggtgtggtcctgcaagtccgtgaccgggatcggctccgcggttgcggccgtcggcgaggcggtctgcggcatctcgagccgggccgtcagccaatcgaccaccgcgaacaccagcgggttgagcatgatcgaaaagatcgcgccggccaggatcaggtcgcggccggccttcggcagcaggttgagcgcgacgccgagctcggcgaggatgaaggagaattcgccgatctgggcgaggctcgccgagatcatcagtgcggtcgccatcggatgacggaacaatacgacgatcagcagcgcggcgagcgacttgccgaccacgatgacgaacagggtcgctgcgaacggccagggctcgcgcaccacgctgagcggatcgaacagcatgccgaccgagacgaagaacagcaccgcgaaggcgtcgcgcagcggcagcgtctcctgcgcggcgcgctggctgagcggcgattcccgcagcatcatcccggcgaagaaggcgccgagcgccagcgaaaccccgaacagcttggtcgcgccgaacgcgatgcagagcgcgatcgcgagcacggtcaggcggaacagctcgcgcgagccggtgtgcgcgatgtaatgcagcacccatgggatcagccggcgtccgaccacaagcatcagcgcgatgaacaccgcgatcttgacgagagtgagcgcaaccacgccgggcagcccgaggccgaagcgggtggcaagcggatcggaggcgagcgccacgccttcgccgctctggaagctcgccaccgccgggaacagcaccagcgccagcaccatggcgaggtcttcgacgatcagccagccgaccgcgatcttgccgcgttcggtgtccatcaggcggcgctcctgcagcgcgcgcaacaagacgacggtacttgcgactgacaatgccagtccgaacaccaggcccgcgccgacggtccagcccatcaggagcgccaggccgagccccagcagcgtggcgaccgcaatctgcgcgatcgcgccaggcaccgcgatcgcgcgtaccgacagcaggtcgttcagcgagaaatgcaggccgacgccgaacatcagcaggatgataccgagctcggcgagctcggtggcgagcgcctgatcggcaacgaagccgggtgtgaagggaccgacggcgacgcccgcgagcaggtagccgaccagtggcggaacccgaaagcgctgggcgatggttccgaagacgaaggcgaggccaaggcccgcgacgacggtcgcgatcagaggtgtgtcatgcggcatttcgccttgtcgcacagcatcctcggcggtgcaccgcgaccatttgaggcgcggcattccgcgcgggaatcgtgatctattgctcatcatgtgagcatatgatctcatggcggaatggatccgcggcttcccgagaccgatctggtcatcttcgactgcgacggtgtgctcgtcgacagcgaggcgttgagttgccgctgcctcgccgaggcgatggtccgggccggcatcgagatcagcacggagcaggtgctagaactcttcctcgggcgcagcaccgcggccctggtcgactattgccggggcgtgggaaagccattgcccgcgacgttcctgcctgaactggcgctggatgtgcgcgagaccttccgcgcccggctcaagccgattgccggcatcgcggcggtgcttgcggagttgcggctgccatattgcgttgcttcgtcgagcgatctcgagcgggtcaaattctcgctggagctgaccggccttgcgccgagcttcgggcaacggctctacaccgcgcaaatggtcaagcagggcaagccggcgccggatctgttcctgcatgcggcaagcgcgatggcagccgacccgcgccgcacgctggtgatcgaggacagcgtcagcggggtgacggccgcgaaggccgcgggcatgaaagtgtggggatttgtcggcggcgcccactaccgcttggcggacggcagtgctctgctgcgacaggcgggagcggatcgaatcttcgccgcgatggctgatttctggatggaaggctgacacggcacgatggttgcgcccgacaacgaaaagtcccgcctcgacgatgcggcgcgcgccggctggctgtacttcatcgccgggcacacccaggatgaaattgcaaaaatgctgcaggtgtcgcgggcttcggcgcagcgccttgtgtcgctctgcctggcggagcggctgatcacgtttcgtctcgaacaccccattgcggcctgcatggagctcgcctcccgtctgaaggcgcggttcgatctggtgcattgcgacgtcgtgccgactgatccagcggcgccgctgtcgaatgccggaattgccgagcgcagcgccaatctgctggagatgacgctgcgctcggaaacgccggtcatcgtcgcgctcggcaccggccgggcggtacgcgcggcggtcgagcgcgtctcgccgatcgagcggcccgatcaccagatcgtctcgctggtcggcaacatctccgccgacggctcggcgagcttctacgacacggtgggccggctcgccgaccgcaccggtgcgcgtcactacccgatgccgctgccgtttttgatgtcgagcgaggacgagcgcaaccgcatggtccgcatcgatccgatcgcgcgggtgagggcggtcgccgccaaggccgatctgcggctgatcggcatcggccagatggaccagaaggcccaggttcatgtcgacggcttcgtcacccgcgaggagctgctggagatgatgcggctcggtgcggtcggcgaggtgaccggctgggcctacgacgccaagggccgcctgatcaagggcggcaccaacaagcgcctgaccagcatcccgccgcagatccccgcggtctcgaccacgatcgcggccgccgtcggcgtcgccaaggtgccgtcgatcaaggcggcattggcgggacgggtgatcaacggcctgatcaccgacgaggcgacggcgcgcgccgtgctggatcgctaagaggtagataatcgaatcgggccatgcactgcactttacctcgccccgcttgcggggagaggtccggaatgcatcatcagatgcattccgggtgagggggagcctccacgcattcctctggctccgtatgcgccgagagagcccctcaccccaaccctctccccgtaagaacggggcgagggagcgcggtcccgctgcggcgcaattagccctagcttcctggcgctcaacgccccgttcgcttccgcaacaactccattgcagcgtgcaatggaactcgccatcgcgcgggacggcgcacccgcgcgcttgacaaattttaacgacgggatgaacatacgctcaacacgtgggcatatgctcaacgtgacataagggaggttaccttgaaaaacgtcctttgcgccgttgcgggcgcggctgcgcttttgatctctgccccctcgatcgcccagaccacgctgacggtggcgaccgtcaacaacggcgacatgatccgcatgcaggggctcaccagcgaattcaccgcgaagaatccggacatcactgtcaaatgggtgacgctcgaggagaacgtgctgcgccagcgcgtgacgaccgacatcgcgaccaagggcggtcagttcgacgtgctgaccatcggcacctatgaggtgccgatctgggccaagaagagctggctggtgccgctcgacaagctcggcgccgattacgacgtcaatgacctcttgcccaagatccgcgacgcggtctcggtcgacggcaagctctacgccgcgccgttctacggcgagagctcgatggtgatgtaccgcaccgacctgttcgacaaggccggcctgaagatgccggacagcccgacctgggatttcgtggtcgatgcggcgaagaagctgaccgacaagtcggccggcgtctatggcatctgcctgcgcggcaaggccggctggggtgagaacatggcgttcctgaccgcgatgtcgaattcgttcggcgcgcgctggttcgacgagaagtgggagccgcagttcaactcgccggaatggaagaagacgttgacgacctatgtcgacctgatgaagcaggccggccctcccggtgcgtcttccaacggcttcaacgagaaccttgctctgttcaacgccggcaaatgcgcgatgtggatcgacgccacggtggcggcatcgttcgtgaccaacccggcgcaatccacggtcgccggcaaggtcggcttcgcgctggcgccgaacaccggcctcggcaagaacgccaactggctgtgggcatggagtctcgccattcccgccggctcgaagaaggtcgatgcggcggagaagttcatcgcctgggcgaccagcaaggattactccaagctcgtcgcgtcgaaggaaggctggtccaacgtgcctccgggaacgcggacctcgctgtatcagaaccccgaatatctgaaggcggcgccgttcgccaagatgaccctggcctcgatcgatgcggctgatccgagccacccgaccgtgaagccggtgccgtatgtcggtgtgcagtatgcggcgattccggagttccagggcatcggcaccgcggtgggccagcaattctcggccgcgctctcgggctcgagcaccgtcgacgcagcgctcgctgcggcccaatcctcgaccgagcgcgaaatgaagcgggcgggctacatcaagtagcgcaaacagatagcctcgacgcgatctgatcggcgtcgcggcccttcgaccagctcaagacctcccgagctggaccactcgcgaccatcctgtcccgcagcgggatggtcgctcctttccctaaagcatgatccggaaaagtgcgaagcggttttccgaaaagatcatgctcaaacaaagagccaaagcgcgatgacgattcaaccaaatatcatcgcgctttagagaaggaggcggggatggcgacccagcagacccaactgctcgcacgcacgctgctcacgccggccgtggcgctgctgttcatctggatgatcgtgccgctggcgctcacgatctactttgcgacgctgcactacaatctgctcgatcccggctccgaatcgttcgttggcttagagaacttccgctacttcctcaccgatccggccttcctcgcctcgctgcagaataccttggtgctggtcggctcggtgctcgcgatcacgatcatcctcggtgtgccgctggcgctgttgctcgaccagcaggtggtcgggctctcgatcgtccgcctgatggtaatcgcgccattcttcgtgatgccgacggtgagcgcgctggtctggaagaacctgttgatgcatccggtgtcaggcctgttcgcctggatcgcgcatctattcggtctgccggcgatcgactggttcaacgatgcgccgctgttcgcggtgatcctgatcatctcctggcagtggctgccgttcgcgaccctgatcctgctcaccgcgctgcaatcgctcgacgaggagcagaaggaggcggccgagatggacggcgcgagcgcgatctcgaccttcatctacatcacgctgccgcacctggcgcgcccgatcacggtggtgatcctgatcgagaccatcttcctgctcacggtattcgcagagattttcgtcacgacaggcggcgggcccggcctgcagaccaccaacatcgccttcctgatctattcgcaggcgctgatccagtacgacgtcggcagcgcctcggcgggcggcctggtcgcggtggtgctcgccaacatcgtcgcgttcttcctcgttcgcatcgtcggccgcaatctggaggcgtaacgtcatggcgcggatggtcacgacacggcgcaaggtgatctcgacggcagccgcctggctggtcggcttcctgatcttcttcccgatcctgtggatggtgctggcgagcttcaagaccgaactcgaggcgttcgcgattccgccatcgttcctgttcttccactggaccacggagaactacgtcacggtgcaggagcgcagcgattatttacaccatgcgctcaactcgatcatcattgcagggggatcgaccctgatcgcgatgctgatcgcgatcccggcggcatggtcgatggcgttctcgccgaccaagcgcaccaaggacgtgctgctctggatgctgtcgaccaagatgatgccgccggtcggcgtgctggtgccgatctacctgatcttccggaccgtcggcctgctcgacacccggaccggcctggtcttcatcctgtgcctcggcaatctgccgatcgtgatctggatgctgttcacctatttcaaggagatcccgaaggacatcctggaggcggcgcggatggacggcgccacgatcggccgcgagctgatctacgtgctgacgccgatggcggtgccggggctcgcctcgaccctgctgctcaacctgatcctggcgtggaacgaggcattctggacgctcaatctgtcgacgctggaggccgcgccgctcaccgtgttcatcgcatcctattccagcccggaaggcttgttctgggcaaaattgtcggcggcgtcgacgctcgcgatcgcgcccattctcgtgctcggctggttcagtcagcggcagctggttcgcggcctgaccttcggcgcggtcaagtagcagaaaggctttttcatgggtcagattacgctgcagggtgtgcaaaaatcgttcgggccggtccacatcatcaagggcgccgacctcgatatcgcggacggctccttcgtcgtgttcgtcggcccatccggctgcggcaagaccacgctgctgcggctgatcgcggggctcgaggacgtgaccggcggcgccatcctgatcgacggccgcaacgtggtcgacgtgccaccggccaagcgcgggctgtcgatggtgttccagtcctacgcgctctatccgcatatgagcgtgcgcggcaacatcgcgttcggcctgaagatggccggcatggccaaggacgagatcaaccgcaaggtcgaggccgccgcagcgaccctcaacctgacgccctatctcgaccgcaagccgcgcgagctctccggcggccagcgccagcgcgttgcgatcgggcgcgccatcgtgcgcgagccgaaggcgttcctgttcgacgagccgctgtcgaacctcgatgccgcgctgcgggtgcagatgcgcctcgaagtgacgcgcctgcagaagcagctcggcaccaccgcgatctacgtcacccacgaccaggtcgaggcgatgacgatggccgacaagatcgtggtgctgaacggcggcaagatcgagcaatacggctcgccgctcgagctctacgagaagccggcaaacctgttcgtcgccggcttcatcggctcgccgaagatgaacttcgtcaccggcgagctggcaaagcagcagggcgccgccaccatcggcgtgcggcccgagcatttgaaggtcgagcgcgacgggcagggcggctggcacggcacggtcgccgtcgccgaacatctcggcagcgatacgttcctctatgtcgatgcggggccgcaggggatgctgaccgcgcgctatatcggcgagctcgatttgcatccgggcgacaaggtgtcgctgatcccggatccggcgcgcatccatcgtttcgacgacagcggcaaatcgatccacgcgtaaggaagaagaaaatgtatctggaaaaattcaagctgggcggcaagaccgccatcatcaccggcgccgggcagggcatcgggctcgcctgcgccgaggcgctggccgaagccggcgccaaggttgtcatcggtgatcgcgacgccaaggcggcccacgacgcgcaggcggagttgaaggccaagggctatgatgcggatatcgcgctgatggacgtgaccgattccggccgcgtctcggcggtcgccgacgagctggtgcgcaagtacggcaaggtcgacatcctggtcaacaatgccggcatcgcccgcagcgagaccccggccgagaccgtcaccgacgagcattggctcaacgtcatcgacgtcaatctgaacggcaccttctggtgctgccgtgccttcggcaatcacatgctgaaggccaagtccggcaccatcgtcaatgtcggctcgatgtccggcttcatcgtcaacaagccgcaggaacagtgcttctacaacgcctccaaggccgccgtgcaccatttgaccaaatcgctcgcggccgaatgggccgcgcgcggggttcgcgtcaacgcggtggcgccgacctatatcgagacgccgctgaatgccttcgtcaagaacagccccagaatgtacgatgcctggatcggcggaaccccgatggcccggatggggcaggtcgacgagatcgcttccgtcgtcttgttcctggcctccgaggccgcgagcctgatgaccggaagcatcgttctggtcgatggcggctacacttgctggtaagctcgcgccgaaaataacggagcggccatgcggcaagcctatatcggggtggacgtcgggagcaccagcgcccgggcgggggtattcgacgaggcgggcaagctgctgggttcggcccggcatccgatccgggtctggcatgagccgggcgatatcgtcgagcaatcctccgacgacatctgggcggcgtgcgtcgcgtccgtgcgccatgcgatgcgcgaggcggcggttgcggccgagcaggtcaagggcatcggcttcgatgcgacctgctcgctggtcgtgctcaacaaggctggccggccgctcaccgtcagcccgtccggcgattccgcgcgcaatgtcgtggtctggatggatcaccgcgcgatggttgagaccgaattcgtcaacgcgaccggcgaccgggtgctgcgctatgtcggcggcgccatttcgccggagatggagatcccgaaaatcctctggctgaagcggtatctgccggcgaccttcgaggccgccgggcatttcttcgatctcgccgactatctctcgttccgcgccaccggctcgctggcgcgctcgacctgcacggtgacctgcaaatggacttatgttgcgggcgaaggcggctggagtgagtccttcctcaagcgcgtcggactggaggcgctcgcggccgatcgctttgggcgcatcggcaccgagatcgtgccgcccggttcgccgcttggccgcggactgtcggcggatgcggcgcgcgatctcggcctgctgccgggaaccgcggtcggcgcctcgctgatcgatgcccatgccggcggcgtcggcgcgatcggcggccgcgatggctccggcgccgaggtcgatgtctgccagcgattggcctacatcatggggacgtcggcgtgcatcatggcaacgacggtcgatccctgctttgtgcctggcgtctggggcccgtatttcgaaggcatggtgccgggcttctggctcaacgaaggcgggcagtcggcggccggcgccgcgatcgaccatctgctgaagtcgcatccggcccatgctgaagtccaggccgctgcgaagcgcgacggcgtcgatgtcatcgagtatctcgagaagcgcatcctgacgcgcagcggcaatgccggtgcggctgcgctgctcgcgcgcaacgttcatgttctgccggaattcctcggcaatcgttcgccctatgccgatcccggctcgcgcgcggtgatcgcggggctcgatctcgacaccgatgtgtcggcgttggagcggctgttcatcgccggcctttgcggactggcctatggcctcgccgacgtcatcgaggcgctacaggcccatggcgtcagcggcaagaccatcgtgatcggcggcggcgccagccgcagcccgctggtgcgccagatcatggccgacacgacaggctatgcggtggcgctgccgcagacgcaagaacccgtattgctgggcgccgcgatgctgggcgccgtcgccagcggcgcgcatcattcgatcaatgcggcgatggcgggcatgtcggcgctcgggcggctgagcgagccgaccgcgccggagctggctgatttccatcgccggaagcgcggcgtgcacaagatgctgcgggcgctcgatcgcgacagccgcgaggcgatgaagcgggcgcccggcgaggcgccggtttaaggtgttggcatgctgctgagttgcggagatgcgttgatcgatttcctgccgtcgcggacggcggatgggcgcgaggccctgacaccggcggtcggcggctcctgcctcaacatcgcgatcggcagcgcgcggctcgatgtgcccaccggctttgtcggcggcatcgcgaccgacaccttcggcaagatgatcgccgatcacgccgcagcttcgggcgtcgatctcagccgcgcgacgcgcagcgacgaccaggccacgctggcctttgcgcgcgtcaccggcaccgagacggagtacgccttctatgacgctgacaccgcagcgcggaactggacctaccggcgcggcgcgatcgcgctcaacggggtcacctgcgttcatatcggctcaactacgttggtccatgacaagggcgcggctgagacgctcgccttcatcgaggatatcagggcgaacgtgacgatcgcgctcgacccgaattgccggccgaacctggtcaaggacagggacgcctatcgcgcacgcatgctggcgttctccggcaaggccgacatcgtgaaaatgtccgacgtcgacttcgcctatctgttcggcgacgaggcctatgccaacagggccgaggcgctgctgtcgggcggtgcatcgctcgtcgtcatcacgcgcggcaatgacggcgcctccgcctggcatcaaaaggccggaccgatcgaggtcaaggcgccggtggtgaacgtggtggatacgatcggcgccggcgacagctttcaggcggcgctgctggccgcattgcatcggctggaccggatcgcgcggcagcggctcgccgacatctctgccgccgagctcacgcgcgcgctggcctttgcctgcaaatgcgccgccttcacctgcacccgcgcgggcgctgatccgccgcggagccaagagctgcctgccgattattggtaagccatgcgcccgaggtgatggacttgccgcaccgggcgcggcacgatgccgtcatcgaagaccgatgcgagcgcgttcccgaatgagcgacgatctgtgcctgctgtcagccactgaccttcgcgcgcgcatcgccgccagggacgtgtctccggtcgaggtcacggcggctgtaatcgcccgcgccgagcggctgcagccggaactgaactgcttcatcacgctgtgcggcgaggaggcgatggcgcaggcgaaggccgcggagcggcagctgatggccgacgagccgctcggtctgctgcacggcatccccttcaccgtgaaggatatcgtcagcaccaagggcgtgcgcacgaccttcggcgcggtgccttacaagaacaatgtgcccgaccacgatgccgtggcggtggcccggctccatgcgcagggcggaatattgctcggcaagaccacgacgccggagtttggcagcaagtgcctgaccgactcgccgctgttcggccgcacccgcaacgcgtggagtgccgagcgctccagcggcggctccagcggcggcgccgcggtggcggtcgcgagcggcatcgcgccgctggcggttgcgaccgacggtggcggctcgacccggattcccgcggcctgcaacggcgtggtcgggatcaagcagagcaacggcgtgatcccgcacagccaggtgcaggacgccttcggtaaccagacctatgtcacgccgaccacgcgcaccgtggcggataccgcgctgatgatgcaggcgatggccggcgaggatccgtccgatccctggtcgatcggtgtgccggtgcccgactatctcgaccatgccgcgccgcgcggcgatctcaggggcaggcgcgtgctgttctgcctgtcgccgccgggccgcccggtgacatcagacgtcgccgctgccttcaaggcgagcctcgaccggctggccagcctcggcgccgagctcgaggagttctccggcgatggctttgacatcgagccaatctggcgcgccatcaatcacacggtctggcgcacccgcttcgacaagctcgcggccgatcatcccgatgacctcagcccgaccttcctgaagcagctcgcgcgcgccgctgatgtgagcggcgtcgactaccagcaggcgatgttcgaccgcaccgcgctattccgccgcgtgcagtcgctgctcgcgcgcggcgacctcctggcgatgccgaccctgacccgcacggcactgccgatcgatcaggatctgttcggcaccatcgagatcgacggccggagcttcgacagcgtgcggccgcactggtttccctggaccatgctgttcaacatgaccgggcatcccgcgatcagcatccccgcaggtttcggccgcgatggcctgccgatcggcctgcatctggccggccgcttccgggccgacgcggaactgttgcgcgtcgcggcgctgttcgaagcggcgagcgatctgctcgggcgctggccggccttgccctgacggtccgaactgcgcgatgcttgcattcggctgcgaacttgttgaaacgtgaccgtgaacatcaggggtgatgaaggttgattgaatcggttcgaccgcgggctcggtctacctctccccagcggggagaggtcgatttgcgcagcaaatcgggtgagggggtgctgctccaacgagagaccgcaacccctcacccggcgctacgcgccgacctctcccaagggagaggtgaaccgccgttgcggtaccggcttggcacagccacaccctgcacgtgttgctggcgggcatgagcgtattctttctgcggcggatcctgaccctgctggcgacgctggtcgcggcctcgctgatcattttcctggtgctcgacgcgctgcccggcaatgccgcccagatgctgatgggcgccgatgcctcgcccgatgcggtgcgcgcgctcaccgtcaagctcggcctcgatcagccgctcaccatacgctacctgctctggctcaagggcatggcggtcggcgacctcggcaacagctacgtctatggcacgccggtggccggactgatcgcggagcggctggtgctgaccatcccgctcgcgatcatgtcgatgctgatcaccgtggtgctggcgctcgccgccggcatctacactgcggcaaatcacaacaagctcggcgatgtcggcgtgatgtcgctgacccaaatcggcatcgcgctgccgaatttctggttcgcgatcctcctgatcctgctgttctcggtgaagctgcaactgttgtccgccggcggctttgccggctgggatgacggcatctggccgggaatccgctcgctgttgctgccgtcgatctcgctcgcggtggtgcaggccgcgatcctcgcccgcgtcacccgctcggccgtgctggaggtgctgcgcgaggactttgtccgcaccgcgcgcgcgaaagggctcggcaggcgcgaggtgctgtggcgccatgtgctgcgcaacgccatgatcccggtgatgaccgtcatgggcctgcaattcgccaatctgctggccggcaccatcgtgatcgagaacgtgttctatctgccgggcctgggacggctgatcttccagtcgatcgccaatcgcgacctgatcgtggtgcgcaattgcgtgatgctgctggccgcgatggtcgtgatcgtcaatttcgtggtcgatgtgctctatgccttcatcgacccgcgcatcaaggtcgccaacctgtgagcacgccgctgaccgcagccgccggcaccgcggcaatcgcaccgggcgcgcggcctgtgaccggcttctggcgccgcgcgctgcgccatcgcagcttcgtgctcggggcggtgctcagcctgttcgtgctcggcgccgcgctgctgtcgctgctctggacgccgtggtcggctaccgacatcgatgtcgcgtcgaaactgcagccgccgacggcggcgcactggctcggcaccgacgtgctcggccgcgacatcgtctcgctgctgctggtcggcgcgcgctccaccatcatggtcggcgtcattgcggtggggatcggcctgagcttcggcgttggcctcggcctggtcgccgccgcgcgcaagggctggaccgaggagctcatcatgcggatgagcgacttcactttcgctttcccagcggtgctgtcggcgatcatgctcgccgcggtcgccggccccggcatggtgacgtcgatcaccgcgatcggcatcttccagatcccgaccttcgtccgcgtcacccgcggctcggccaatgcgatctgggcccgtgaattcgtgctggccgcgcgcgccgcgggcaagggctcattccgcatcacgatcgagcatgtgctgccgaacatcctctcgatcctgatcgtgcaggcgacgatccagttcgcgctcgcgatcctcgccgaggccgcactgtcctatctcgggctcggcacccagccgccgcagccgtcctgggggcgcatgctcaacgatgcgcagaccctgctgttccagtcgccgatgctcgcggtctatccgggcgccgcgatcgcgatcgcggtgctcgggctcaatctgctcggcgacggcctgcgcgatctgctcgatccccgtctggcgcaggagcggtgagcatggccaaggaagacgcgccgctgatcgaagtgaaggaccttggcgtcaggctcaacaccagccgcggcccggcgcaggcggtgcgcggcgtcagctttgcgcttcgccgcggcgagacgctcggcctggtcggcgaatccggttgcggcaagtcggtcacggcgctggccctgatggggctgttgccggacagcgccgtgatcagcggcagcattcggctcgaaggcgcggagctggtcgggctgcctgatgcggcctattgcaggctgcgcggcaaccgcatcagcatgatcttccaggagccgatgaccgcgctcaatccgatgcacacgatcgggcaccaggtcgccgagcccttgctgcgccacaccggcgtctcggcggcgcaggcgcggcaggaggccatcgccttgctcgatcgtgtcgggctgcccgatgcggcgaagcgcgtcgatgcctatccgcaccaattctcaggcggccagcgccagcgcatcacgatcgcgatggcgctggcctgccagcccgacgtcctgatcgccgacgagccgaccaccgcgctcgacgtcaccatccagggccagatcctcgatctgatcgccggcctcgtggcggagcgcggcatgtcgatgatcctgatctcgcacgatctcggcgtgatcgccgagaatgtcgagcgcatgatggtgatgtatggcggcaccgtcgtcgaaagcggcgagaccaatgccgtgttcacgcggatgggtcatccctacacccagggcctgttccgcgcccgcccgcggctcggcgcgcgcaaggggacgcggctcaagaccatcgccggcacggtgccggagctggccgacctgcccgcgggctgcacctttgccgatcgctgcacgatcgccgaggcgcgctgccgcgcggcgctgccggtcgtggtcgatgtcggcgccgcgcatggcgtgcgttgcatcaggaccgacgtctcgatggctgctgggagcgtcggcgcatgacgatgccggaccagccttcacccggaacgccgctgctcgcggtgaaggacctcgcgcagcgctacacgctgccgcgcgatagcctgttcaagccggcggcgcaggtgcacgcgctcaacggcgtgacggcgcaggtcatgccgggcaggagcctcggcgtggtcggcgaatccggttcgggcaaatcgacctttgcgcggctggtgatggcgctggagcggccgtcggcgggcacggtctcgctgctcggccgcgacctcaaccggatcccgccggatgaattgcgccgcgcccgccgggatttccagatggtgttccaggatccctatggttcgctcgatccgcggcagaccatcgcgcgcatcgtcgccgagccgctgaccgcgctcggccgcatcgatcgcgggaccttgcgcgaccgcgtcgccacggtgctgcggcaggtgggcctgcgcgatgccgacatggacaagtttccgcacgaattctccggtggccagcgccagcgcatcgcgatcgcgcgcgcgctgatcacccagccgaagctgatcgtcgccgacgagccggtctcggcgctcgacgtctcggtgcaggcgcaggtgctcaatctgatgcaggacctgcaggacgagttcggcctgagctacatcctgatcagccatgacctcgcggtggtcgatctcatctgcgacgagatcgcggtgatgtatctcgggcggatcgtcgagcaggggcggcccgccgatctgttcgcgcactctgcccatccctatacgcgtgcgctgctcgatgcggttccgcgggcgcgcgccgggggcgtccggcggcgccgcggcgcgcagccggtcggctcgcaggcctcggccgcggtcggatgcccctacgcgccgcgctgtccgctggccgaccagcattgtcgcgcgaccgcgcctgcgctacgcaatgtcggagacgcccatctggcggcctgccatcacactgatgccgtgatggcgctgccgccggtggtcgccgaggccggttagtcttttgtgaagggttagcctaacgcttgatgagattaggttgatctggagcagcagtgggaattcacctctccccgctggggagaggtgaacgaaccttgcgagtctaactgactcgaccaaaactcatcatgctctaggctgacaagagcatacgtccggggagcagaccaatgttgaggaaattgtgcgtcatcgcggcggctgccgcactcgttgccgcgccgctgccgagcctcgcgcagggcaagaaggacagcgtcgtgatgggcatgacgctggagccgccggggctggatcccaccaacgcggcagcggcggcgattgccgaagtcacgctctataacgtctatgagaccctgaccaagatcaacgaggacggctcggtgtcgccgctgctcgccgagagctggcaggcctcgcccgatctcaagacctatactttcaagctccgcaagggcatcaaattccataatggcgagccgttcgattccgccgcggtgaagttctcgttcgaccgcgccgcggcgccgacctcgaccaacaaggacaagagcctgtaccaggccttcgcatcggtgacggcgcctgatccggagaccgtcgtcgtcgcattgaaatattccgagccgaacctgccgttcctgctcggccaggcgacgggctcgatcgtcgagccgaagagcgcgccgaccgatgcgacgcagccggtcggcaccggcccctacacgctcggcagctgggccaagggttcgtcgatcacgctggtgaaatggcctgactatcgcaacgccgcggcgatcaagctcgccaaggtgacgatccgtttcatcggcgatcccgcagcccaggtcgcggcgctgctgtcgggcgacgtcgacgcctttccgcgggttgcggcggcgcgcagcctggcgcaattcaaggccgatccgcgcttcaatgtgctgatcggcggctcgcgaacaaaaaccatcgtcggtatcaacgagcgcaagaagccgctcgacgacgtcagggttcgccgcgccatcctggctgcgatcgatcgcaaggcgatgatcggcggcgcggtcgacggcttcggcacgccgatcggcagcttctatacgccaggctcgctcggctatgtcgataccaccggcatcaacccctacgatccggagttggccaggaagctgttggccgaggccggcgtcaagacgccgctcgagctcagcctcaggctgccgccaccgtcctacgctcggcagggcggcgaaatcctcgcagcccagctcgccaaggtcggcattattgccaagatcgagaacgtggaatgggcgcagtggctgtcccaggtcttcaccgggccgcacaattacgacctcaccatcgtcgcgcatgtcgagccgttcgacctcgtgaagctcaccgagccggattactatctcggctacaagtccgaggcgttcaacgcgctttaccagcagatcatggcgacgccggatcaggccgtccgggccaagctgctcggcgacgcccagcgcatgctggcgaccgatgccgtggccggcttcctgttccagccgcaactgatcacgatcgccagcaagaagctgaagggcgtgtggaaggaagccccgcagttcgagaatgatttctcggcctggtcctgggagtaggcgcgcgccggcggagatcgatggcctcagccggcgcggcttctcgcgcgatggcgccgcttgacgcctagtctcattttgcgtgctgcgcttgcgaaggcgtcggcgtcgagcgatgcgcgcaggcgccgcaagtcatcgatatcgctcggcttgatgcctgcccggcagcatagcgtttcgctggcgcgaacgcggcctgttccggcttcgcattgagcgcatcgattgtctttgtgaaggacagcgctaacatggaaccgtccatcgatacctgtcgttgtcattttgattatctattgcagcgcaaccggatcacgcgacgatgtgcgcttgctagggcggccaggcctcgaaggggaagtagcaaacaccatccctaatattccaaccaagaaataccgggggaaaatatgcatctgaaagggcttgcggcattcgccgcagcggtcggcgttggcctgttgtccggcgcggcgatcggacaggaagtcaagcaggagaaacagtcggtcgccggcaacgccaatgtctcgccggtgacccaggagcagctcaacgcagccgacaagaacgcgaaagacttcctgctgaccaacggcaattacgcccagacccggttttatccgggcaagcagatcagccgcgacaatgtgaagaacctgcacgtcgcctggatcttccagaccgacgtcaaggagtcgctcgagacgtcgccgatcgtcgtcgacggcgtgatgtatgtcacgacgtcgttcagccatgtctatgcgctcgacgccaagaccggccagcagctctggcactatgcccacaagatgggcccgatcacggtctattgctgcggtcccaacaatcgcggcgtccaggtgctcggcgaccgggtctatctggcaacgctggattccaagctgatggcgctcaatgccaagaccggcgaggtggtgtggaccaccaacatcgccgatcccgagctcggctacagcgagacgatggcgccgaccgtggtcaaggacaaggtcctgatcggcaccaatggcggcgaatacggcatccgcggcttcgtgcgcgcctatgacgccaagaccggcaagcagctctggaatttcaataccattccggagaactcggtcggcgtctgggcgaccaaggacgccaccggccgcgacatgcatcgcaacatccaggctgagaaggacatgctcgccaagatcggcgatccctatgccaagctcggcggcggtgtgtggcagaatccgtcggtcgatctcgcgaccaaccggatctacttcgtggtcggcaacccgtcgcccgacctcgacggctccaaccggcccggcgacaacctctacaccaactcgctggtgtcgctcgatctcgacaccggcaagtatgtctgccacttccagtacatcgcccatgacgtgtgggacctcgacgcggtcagcccgacggtgctggtcaatgtcaaggacaaggacggcaagaccattcccggcgtcatccatgccggcaagaccgggcacatctatgtgcacgatcgcaaggactgtagcctgatccgcttctccgaggcgatggtgccgcaggagaacatgtgggtgctgccgaccaaggaaggcgcgcgcatgctgcccggcgccaatggcggcgtcgaatggtcgccgatcgcgaccgatccgggacaggagctggcctacgccatcaacctgcaccagccgatgacctaccatgtcgagagctcggcctatccgaacggcaagctgtggctcggcggcgccttcaaggtgatcccgagcgagaagcagtcgggtaacatcacggcggtgaactacaacaccggcaagatcaagtggcaggtcaagacgccggagccgatgatcggcggcatcctcgccacggccggcggcctggtgttcaccggcgaaggcaacggcaagttcgcggcgtacaactcctcgaacggcaaggagctgtggagcttccgcgccggcgcgggcgtcaatgcgccgccgtcgagctacgtgatcggcggcaagcaatatgtcgtggtcggcgctggcggcaacacccagctcgactacaagcgcggcaacaacatcatcgctttcacgctcgactgagccggggcgggatgcataatcaacgtctaaatattgacggcgaggcgggacccggtcggtcccgcctctctttgttcggatgagcccatgttcggtaagctagtgatgtgctgtgccgtgctgctgctgatggcagcccaggcgcgcgcggagacgatcgaggacaaggtcgcagtctgcgccggctgccacggcgaggccggcaagccggtcgacaagaccattccgacgatctggggccagcaggccggctatctctatatccagctgcgcgacttcaagcgcggcgatcgcaagagcgagatcatgcagccgatcgcggcgcaattcgagcgcgacgacatgctggcgatcgcggaatacctctcgcagaagccgtggcccgacctcggccagccgcgcgcggccaaggacgtcgcggcgaaggcgcaaagtgccagcgcatcggtcggctgtccggcctgccatctcgatcgcttccagggcgacggcacggtgccgcggctcgccggaatgggacgggactacctcgccaagaccatcgccgacttccgcacccgcgcacgcggcaacaatcccggcatgtccgacctgatgctggcaacctcgcccgacgacctcgcggcgctggtggagtatctcgcggggctgtaagcggtacgaaggtcgcgcggcgttccggttgcatctccccggcttgcgggcaggccaatagcatatggcaaaaaaacttcgtcgtcccggacaagcgcagcgaagcggagcgcagatccgggacgcataaccacaggatttggtttggcgaagactcgtggtcgtttgcccgcgccgcaaccgctccctggggttgggtcccggctccgtgcgcaagcgcgcactcggccgggacgacaccgagattttcatatgcgattgccttgctgcaagcgggagagggggcgcactgccttcaggatgctgatatccggccgcttatgtctcaacgcggcgtcagctccgcgcgcagcgccgacaggatggtgagatcggcggcgtgcttgccggccttgtcggccagcgcggcatcggcgccgtgagccagcagcgctttcgcgatcgcgggatgattgccttcggcggcgatcatcagcgccgtgcgtccgcgcgcatcgcgctcgtcgaccctggcgcccgcgtccaggagatacgagaccacctcgagcgcctgcgcttccgccacggcctcgtcaggcccggcggcccacatcagcagcgtcagatcattggcgtagcgggcgttgacgtcgatatcgagcgcaagcaactgcttgacgatgccgagctgaccgccggccgccgcatagaccaccggcggcttgccggtgtcgtcggccttgcggccgtcggcgccgtgtgccagcagcatgcgcaccaccatgtccctgccggcataggccgccgccgcgaccggggaggcgccgctgcgcccggcgagattgacgtcggcgccgtggtcgatcagccgctgcacgatcgcggcgtggccgcgctcggcggcgaagtagagcgcggtcgaacccgcgaggttgcgggcatcgaccggcgcgccgcgcgccagcagcaggtcgaccatgtcgagatggccggagcgggccgcgtggctcagcggccttgcgcccagtcggtcccgcgcgtccaccgaggcgccgccgtcgagcagtgtggtggcaaggttgatgcagtcggcattggcggcagcgaacagcgccagcgagatttcgaccgcgctgagctgggccttgtcggtctcgtatttgcgggtctgctcgcggcaccgggccggatcggccgcagcaaagccggcgtggatgtggccgacgacaaacagcacggcgagggcgatgcggcgatacaagacgtgtcctccgtatagccctgctgagcgcagcgccattgggatcgaacgtcgcatgatcctcggttgctgccaagccgcgcagcgatgccaagccgcgcagcgatgttgtgccgcgcagcgatgttgtactgcgcggtggtgctctgccgcgctagccgctctgcccggcgctcgcattcgcgacggcgcgcgcgacattggcgatcacctcgttgcacttgtccatgggcgcgctggctccggtcaggtagaccgtcaccacgatcggcttgcggccgggcggccagaacacgccgatgtcgttgtaagtaccgcgctcgccggtgccggtcttgtcgccgacccgccagtcgcgcggcacgccggcgcgcagcctcgcgtcgccggtcttgttggcgaccatccagtccaccagcttctggcgcgaggcggcctgcaggacatcgccgagcacgacgcgctgcagattcttcagcatcgcgaccgggctcgtggtgtcgcgcggatcgccgggtacggcctcgttcagttccacctcccagcggtcgagccggctgacattgtcgccaatggtgcggaagaagctggtcaagccggcaggcccgccgatctcgcgcagcagcaggttggccgcggtattgtcgctgagcgtgatcgcagcctcgcagagttcggccagcgtcatgcccgacccgacgtgttgcttggcgacgggcgcgtaggccaagatatccttggcctcgacctgcatccgttgatcaaggctggattcgccgcgatcgacccggtgcagcacggcggccgacagcatcgccttgaaggtgctgcacatcgggaaccgctcgtcaccgcgccggttcgcgcgcaatcccgtctccatgtcgagcgcggcgacgccgagccggccgctggtcgccagctcgatgcgtgcaaactcctcctgcagccgttgcgccggcgcgcccggtgccgccgctgcactctgtcccgccgctgcactttgccgcagcagggtccaggaggccgcaaggcccagtgcgcgcaatcccaatgtccgtctcgtcagcatgtcccgtctccgttggcggcgcgaacctgccgaacggcgtgacggcgcacaaacgatcatttatacaacgaggcatgagaaaaacttggtcatgacgccatgcgccggcacctcccactgaacgctttgcgcgccttcgaggcctcggcgcggctgttgagcttcacccgcgcggggatggagctgcgcgtgacgcagaccgcgatcagccatcaggtcaagcagttggaggatctgctcggcgcgagcctgttccgccgcctgccgcgcgggctggtgctcaccgacgaggggctggcgctgctgccggtgctgtcggacacgttcgaccggatcggcgctgcgatcgaccgcatcgaggccaagggcacgcgcgaggtcgtcaccgtcggctgcgtcacgacgttcgcgaccggatggctgctgcaacggatcgaccgcttcaagcgcgcacatccctatatcgacctgcgcctgctcaccaacaacaaccgcgtcgacatcgcgggcgacgggctcgatctcgcgctgcgcttcggcgacggctcgtggcacggcaccgaggcgatccacctgctgtcggcgccgctgtcgccggtatgctgtcccgatgcggcggcgcggctgcgcaagccgtcggatctcgcgcaggaatttttgctgcgctcctaccgcgccgaggaatggccgttgtggtttgcagtcgccggtgcgccgtgcccgaagatccaggggccgatcttcgacagctcggtcggcatggccgaggccgccgcgcgcggcgtcggcgtcgggctggtgccgatcgcgatgtttgaaaacgagctggcgtccggccggctcaagcggccgttcgcggccgaggtcccggcagggtcgtactggctgacctggctgaagtcgcgcgtggtgacgcccggcatgcgcgccttccgcgactggctgctcgatacgctgcgagcggaagtggatgagagcgagaacggtgcatcggctccgcggccaaaggcgaggggcaaggcaaagcgcaagccggtaaagcccgcatcgaagaagcgccgtcgctagcggacgaggcgcaagctgcccgggccagcggtgctgatacaattttcggaatattagaaatctatccctgatttgcccgacgtgtcaagccgcccggtcggacgccggcagcggccactcctttgcatggggttgttttcgatatttttgtcccgcgcaagccgagcaagtcgaagccgcctgacgcctaagccagatggcacgccacaaagtgcccattgctgccttcgcgcaattccggcgcctcctggcggcagcgctcttcggcgatcgggcagcgggtgtggaagtggcagcccttcggcgggttcatcgggctcggcacgtcgcccttcaggcggatgcggtcgcgcttcgccttgggatcggccaccggcaccgccgagagcagcgccttggtatagggatgctgcgggttgcggtagaggtcgctggccttggcgagctcgacgatgcggccgagatacatcaccgcgacgcggtccgagatgtgctcgacgacggagagatcgtgggccacgaacagataggtcaggttcagctcggcctgcaggtccgcgagcggatcgagacatcgagcgcagacaccggctcgtcgca

SEQ ID NO: 56 - DNA, 29592 bp, Bradyrhizobium enterica
tgtccaacctcgacgccaagctgcgcgtgcagatgcggatcgagatcaagaaggtgcatcagaaggtccgcaccacgaccgtctacgtcacccacgatcaggtcgaggcgatgacgctggccgaccgcgtggtggtgatgaaccacggcaggatcgagcagataggcacgcctaatgagctctatcacaagccggcgacgcggttcgtcgcaagcttcatcggctcgcccgcgatgaacttcgtgccgtgccggctcgaggacgtcggcggcaagctcaacgtccggctgaccgatcgcctcgccttcgcgctgccgccggcgcgcgccgcgcgctaccaggccctctcgcgcaccgacaggctgctgctcggcatccggcccgagcacatcatggaggcgcggccgcatgccgagcccggcgtcgagccgttcgacgcagtactcgacgtcaccgagccgatggggatggagaccctggtctatttcacgctcgaaggcggccagatctgcggccgggtcagtcccaatgccggcgcgcaggatggcagcccgctccgattggctgtggacctcaacaatatgcatttgctaaacgaggtgaccggcgccgtcctttgacggcttacaagaaacctcaagggcaggaaatggccaccaacaagaagaagattttcatcacccagactctgtcaccgggggcacgggcgctcctcaacgagcgggacgacgtcgaactcatcgaatttcccaacctgatctcggccaaggacttccaggcgatgctggagcagcacgcgccggtccatggtgtggcgctcggcgccacccgcttcggcgaggcggagctcgaggcctccaagggcatgctggtggtgacccggatcggcgttggttacgacgcggtcgacgtgccggcgctgtcccgccgcaaggtgccgctgatggtcgcaggcaccgcgaactcgccgtcggtcgcggagcatgccttgttcatgatgctgacgctggccaagcgcgcgcaggaaatgcactcgatggtcaaggacggcacctgggcgagccggctcggcgtgctgcccttcgatctctacggcaagaccgttttgatcgtgggcttcggccggatcggcacccgcaccgccaagcgttgcctcgcgatggaaatgaacgtgctggtctatgatccctacaagcccgccagcgagatcaccgcggccggctgcgaggccgtgccgagcttggaggcggcgctgccgcgagcggatttcgtcaccatccactgcccgaagtcgcccgagaccgtcggcctgttcaacgccgcgcggatcaggctgatgaagccgaccgcctacctcatcaacaccgcccgcggcggcatcgtcgacgagaatgcgctgcacgacgcgctggtgtcgggcaagctcgccggcgccggtctcgatgtgttcgaggtcgagccgccgccggttggccagcccctgcacgccttgcccaacgtgatcatggcaccgcatgtggccggcgtgaccgtcgaggccgtcgatcgcatgagcgagcagaccgcgcgcaatatcctgagcgtgctggacggcaatccgctgcgccagaatgtaatcaaccaggacgtcctcggctgacctttcagctttctcgttggcgccgcggccgatcggcaggatcggcccggcgatgcggagtacccaaatggccttcaaggaattcggcaactacgatgcggtcggtctcgccgagctggtccgcaagaaagaggtgacggcgaaggagctgctcgacgaggcggtcgcgcgcaccaccgccgtcgacccaaagatcaacgcggtcgtcgtcaagcattacgactacgccgagcgccagatcgccaagggcttgcccgacggcccgttcaccggcgttccgttcctgctgaaagacctcgatctgctcgagggcacccgcaccacgtcgggcgccagcctgctgaaggacttcgtcgcagaccacaacgggacgctgacccagcgcttcctcaatgcgggacttgcgatcttcggcaagagcgcgagcccggaattcggcctgatgccgacgacggaatcgcgtctgttcggcccgacccgcaatccctggaatctccagcattcctccggcggctcgtccggcggcgccggcgctgcggtcgccgcgcgcatcctgcccgtcgcgcatgccagcgacggcggcggctcgatccggattcccgcctccgcctgcggcgtgttcggcatgaagccgacgcgcgcccgcaacccctgcggtcccgatcgcggcgaaggctggggcggtttctcggtcggccatgtgctcagcatcagcgtccgcgacagcgccgtgatgatggatgcgatccatggcccggagccgtcgagcctctacgtcgcgccgccgccggagcggccgttctcgcaggaagtcggccgcgaccccggccagctgcgcatcagcttcaccgacaagtcgccctatggcgatgccatcgacccggagatatcagcggcggtgcgcgacaccgccaagctgctggccggccttggccatcatgtcgaggagcgcgcgccgccgcttgcagccgatcccgccgcgctcatgaccacgatcgtcggcggcaacacggccctgaccattcgcctgctcgagcagcgggtcgggcgcacgctgacatctgacgacgtcgagcggctgacgctcgccagcggccagaactcggtgaagatgacgccggccgactatgtcgcggcgcagcttgcggcgttccaggtctcgcgcgggctcgcgaccttcttcgagggctgcgacgtcttcctgagcccgaccctgtgcgcgccgccgcttcgtctcggcgagttgaacacgatgtccgaggatctgagccacatcgcgccggtgctgcgccgctacatgccgggcacctcgatgttcaacatgtccgggcagccggcgatgtcggtgccgctggcctggaacaaggccggcctgccgctcggcatgatgtttgcggccaagctcggcgaggaaggactgctgttccgcctggccgcccagcttgaacaggttcgtccctggaaggacaagcgaccgccggtctgcgcctagctccatcaagcgaagcgcctagctgacaaaggatagtcagatcaggtagatagaaagggcgtcggcgcgattccgccggcgttgtgcctgggagaccgaaccgtgagcgacccgaccgacaatgcgcttgccgcgatcgcgagcattctcgatcagaccaagacacctcacgagaaggccaagtcgccggacgacacgaccgacggggcggctgagccgacgccgccagtctcgatcgcaatgccaccgcccctgccgacgtcgatcgaagtcgttaccgtcgagaccgtatccatcaagaccgtgaccatcgaggccgcgcccgccgaaccggcggctgtcgagccggagccgatcgaggagccggcgccgaccgaaccgtcacagccggtcgcacaggctgagcccagtgagccgccgacgagtgagcccgagccgagcgcgccggagccggagccgatccagccgccccaaccgatcgaggccgacggctattccaagtccggcccaggcccgatggctgcgctgcgcttccgctggacggtgcgccaggacggcgcccagtactatgtcgacgagaccgtcggcgaaggaacggccccactggtcaatggcccgatgggccgggatgccgcgatcaaattcgtcgatgatcgcgaagccgaagcgcggcggcgcttcgagcatttcaagcacgagatcgccagccgcactgcggccgccctgcggatgagccgggacagcaacgaggcctagccctgcggcggccgcggcggtcccagaaagtccttcttcgcgagatcgacgccggcgtgacgcaggatgtcgtaggcggttgcgacatggaagaagaactgcggaacgctgaaggtcaggatcagggacttgccggtgaatggcctggttgcgccgctcctgaacgtgaatacgacgttcatgtcggtcgcggcgtcgatcacctcccgcggcaggccctgcacaaaatcgatcgtagcggcaatccgcgctttcagcccggcgatgtcgattgacgcgtcagggaagaccggcggcgcacaccccgccagcaaggcgcagctcaggacgacgtgccggttcgcctccccgacctgctggcgaaggctgtacatgttcggcgcgagccgcattccgagcaacacgtctggatcgagcttgcgcgccctggcgtgcgcctcggcatgatcgagcagcgcggaaagattgcgcagatacggcacataaacaccgacggatgcgtcatggagcgagatggtcacttttgccccgcaatactggctcgatcgtcccatctggtctaaatgctccgcaacgacatgtcatcggaattgacggagaaatcagatgtttcgcgcgctggccggtctcgctctcgttctgctcctgtcggctgcgcatgcacagccggcgccatctcggctcgatgagatcgtcgcgcgcggcacgctgcgggtcggcatgaccggcgactatctgcccttcacggcgctcgacaaggagaccaagatatttcgcggcttcgacgtcgacatggcgcaatcgctcggcaaggcgctcggcgtcaaggttgagttcgtgccgacatcatggccgcaaatgatgaaggatttcgaggccgacagtttcgacatcgcgatgggcggcatctccatcacttacgaccggcagaagaagggcctgttctcgacgccgatcatgcgcgagggcaagacgccgatcgcgcgctgcgccgacaagggcaagttcgagacgctcgccgagatcgacaagcccggcacccgcgtcatcgtcaatcccggcggtaccaacgagcgctttgcgcgcgccaatgtgacggccgccgacatccgcgtcttcagcgacaacaccaaaatcttcgacgagatcgccaagggcgacgccgatctgatgatgaccgacgcctccgagacgcgctatcagcagaagctgcacctcggtgtgctctgcgccgtgcatcccgacaagccgttcgacttcgccgagaaagcctactggatgcagcgcgacgtcgccttgaaggcgttcgtcgaccagtggcttcacatcacgcgcgaagacggcagctacgcgaagatctacgctgcgtggttcgaataacctgcagcgtcagaccccggctccgaaaaattgatgcgcacggcctgaaaccgaaccgcgatccaatgctttgaacctaagccgcgaggacacgactcatgttctgaccgtgatctgggacacgttcaacgaggcagccaccagatagccttgcgaacgggattccctgcactggagatcgagatgaagaagcttctggcgatcgccgcgctcgtgctggcgagcaccgtgacagcgcaggcacaatacacattcgattacggcggccgcaccatccgcatcgatccggatcgtggaacggtttcgatccccggcgtctatgacaacaccagccgcagttccaaacgcaccaagcacagggacgccgagcagaagcgcgagacgacaccgaaagacgccaggacggattctccctctccgcccgtcacgccacccgctgccactgcatcacccgctccggctacgattgatcaggctgccgccccggcggcgccgtcagccgcaatgaccgagcccgcgaacacgagcgtcgcaccacctccggctacggcagcgaccgcaccgccaccaccacagccgccaccggtcgtgcagcaaagcgcggcgccggcggcgagtccggtcccagtgccaacggtcggtgtcgcatcgcctgcagcgaacccggtgcaggcagccaactcgccgctgggcgtctggttgactgaagagaaggaaggcaaggtccgcatcgagcaatgcggcgccaatctctgcggctactcggtcgacaagaagtcgaacgccaacggcgaacaggttctgatcaacatgaagccgggcaaggacaagtggagcggccgcatcttcgatccgaacagcggcagcacctacgattccaccatcgcgctgaagagccccgacacgctgcgcgtacagggctgcgcgttcggcggcatgttctgcggcggccagacctggacgcgggtgaattgattgcctgtcccgaaaaagtagaagccccgctcacaagcggggcttctgcctttggccggcaacgaccggtcagccgagcttgccgttgtattcctcgtcggtgacgtgctccatccaggtcgagaacaccccgtcgagcgcttcctgcatggcgatgtgggtcatgctgttgtcgggcgaagcgccgtgccagtgcttctcgttcggcggaatccagaccacgtcgccggggcggatttcccggatcggcccgtccttggcctgcacgcggccgatgcccgagatcacgtagagcgtctgcccgagcggatgggtgtgccaggcggtgcgcgctccgggctcgaacgacacccgcgaggcgttcagccgggccggcgccggggccatgttgatcggatcctgcagcacgctgccggtgaaatgctccttcggcgcgcggcgggtcggccgcgagccggaaacgtggatatccatcgggttacctccctttcttgacgttatttcttggatgcggcgtaacgcgccttggtatcggcattcatcggatacaggccgggcagctgggcgccgttgttcacctcgttgacgatccaggcttccatccgttcctgctccggcccttcggccagcacgtgatcgaggaatgcctgcgggatcagcaccgcgccgtcctggtccgccaccaccacgtcgttcggaaacacggcaacgccgccgcagccgatcggttcgccccagccgacgaaggtcagccctgcgaccgacggcggcgcggcgtagccgtcgcaccacaccggcaggccggtgccgagcacgccctcgacatcgcgcaccacgccgtcggtgatcagcgccgtcaccccgcgcttgaccatccgcgcgcaaaggatgtcgccgaagatgccggcgtcggtgatgcccatggcatcgaccaccgcgatgcagcccgccggcatcgcctcgattgcggtgcgggtcgagatcggcgacgaccacgattccggcgtcgccaggtcctcgcgggccggaacgaagcgcagcgtgaaggccggtccgaccagccgcttcagcccgggcttcaacggcttggtgccgcgcatccaaatattgcgcaggcccttcttgagcaggaccgtggtgatggtggcggtggacacgtgcgacagcgtcgcgatcgcctcagtggacagtgacatctcgagagcttgctccgatgggagggaaagaccggcgcatgttgccgggcaaagggcgtgcgtcaagggctgcgcgaaaatgctgcgatcagccaaatttatcgccggcatgccgattaatttattgaagttgctgcgtcattttgcacgaagcgaattccgttttgtcacgaaacacgctagcttgatggccgacgaagtccgcttgatccaaatggccgaacccttaagtcctccccgccttttgccgagtggcgatgccgccatcacggtggaattcagccgcaccatcgatgatgccgccaaccggcgggtgctcgcgctcgaccgggtgatcgcagccgagccgatcgccggcatcaccgagaccgtgccgacctaccgttcgctgctggtgcattacgatcccgtgcagatcagcttcgacgcgctcggcgagcagctgctcgcgcgcgccgccaaggcaccgccgaccgagaccggcacgcggcgctggcggattcccgtcacctatggcggcgagcacggcatcgatctcgaggatgtcgccaagagcctcaagaccacgcccgaccagatcgtcgcccgccatgtcgccggcgactatcgcgtcgccatgatcggctttacgcccggctggtcctatctcagcgggctggagacattcctgcacatgccccggcgcaaggatccgcggctgctgaccccggccggtaccatctcgatcggcggcatccagaccggcgtgcagtgcctggccggcccgagcggctggcacctgctcggccgcaccccggtgcgaacctaccaattgcatcgcgacccgacgttcctgctggagccaggcgatgccatcacctttacggcgatcgacgccaagacctttgcagaacaggaccgcgccgccgaggccggcgaggtcgtcgcggaactggtgacgccatgagcaagctcgtcgtcacctcgatcggcccggcaagctcggtgcaggacggcgggcgcccgggctcgcagcgttacggcctggtgccgagcggcgcgatggaccggctttcactggcggccgccaacacgctggtcggcaacgacccgttcgccgccgcggtcgaaatcggcccgttcggcgccgccttcaccgcacgcggcggcgcggtgcgcgtcgggctcgccggggcatcgcgcaacgctgacatcggcggccggccggtcgcgttcgacagttcggcgacgctcgccgagggcgagacgctcaatctcggcttcgcgcgcggtggttcgttcagctatctcgcgatcgagcacggcatcgaaggcgagccgatgttcggcagcctcgcggtcaatgcccgcgccgggctcggcagcccctacccgcgcccgctgcagagcggcgacgagctgacgacaaaagccgccagcgccgccgccgagcgccgcatcgagttgccggcggagaccgatgcgccgatccgcgtcgtgttcggcccgcaggacgacgagttcgccgaggacaacaagaagctgttcatcgacagcgagtggaagatctcggccaccagcgaccgcatgggctaccgtctcgagggtcccgtcatcaggcacctcgacggccacaacatcgtctccgacggcaccgtgaacggcagcatccaggtgcccggcaacggccagccgatcgtgctgatgcccgaccgcggcaccagcggtggctatccgaagatagcgaccgtgatcacggcggatttcggtcgcttcgcgcagctctcggccggccggccgttccgcttcaaagcggtgacgatggcggaagcgcaggccgaagcgatcaagctccacgcgctgctgcgttcactgcccgaccgcctccgcggcatcgaggattttggtctcaacatcgaagcgctgcgggatgcgaatgtcgcgggccaggcggtcagcgctgtggatgtatcgacctggcaagtcgcgttaccctgaatcaacacaacaaacggatcgatcgtcatgaccaaaaccgtcgacctcaattgcgatctcggcgaaagcttcggcccctgggaaatgggcaatgatgcggcgatgatcgagctagcgacctcggtcaacgtcgcctgcggcttccatgccggcgatgccgacatcatgcgcaagacggtcgagctcgcgaaggcgcgcggcgtcagcgtcggcgcccatcccggctatcgcgacctgcatggtttcggtcgccgtccgatgccggggctgacgtcctcggagatcgagaacctgatcgcctaccagatcggcgccttgcaggcgatcgcgactgcggccggccacaaggtcacccacgtgaaggcgcatggcgcgatttccaacgtcgcctgcgaggacgacatgaccgcgcgggcgatcgccaatgcgatcaaggccgtcgatccgagcctcgtgttcgtggtgctggcaaactcgaagctggtgcgcgccggcgaagccgccaacttacggatggcgcatgaggtgtttgccgatcgcgcctatgaggacgacggcaatctggtgtcgcgcaagaagcccggtgcggtgctgcatgatcccaaggcgatcgccgagcgcgtggtgcggatggtgcaggatggtgcggtcgtctcggtcaccggcaaggtgatcaagatgcagaccgataccgtatgcattcacggcgatacgcgcggcgccgtcgagatcgcgcagggcctgcgcgaagcgctgaagcaggccggcatcacggttgcgccgttcaagaccgcgcactgaacagcccacgcaatgaccgagggccggccaccgcgccggcccttttagattccgttaagagtcttcttaaacccaaacttgccgtttgattgctaggtgcagattccgagcctttgattgtcctctcaggaaattgggtacgaaagcatgttccgcaccagcctctccctcgccattgcggcggttgccaccgccgccttcaccagcgctgcatccgccggctgctacagctgctatacgccgccgccccagccctgcacgacctgctatcaggtgcagacggtgccgccgcagtatcgcaccgtgcaggaaaccgtgatggtggcgccgggccgcgtcgtcgcgcatcgcacccctgcgcagtatcgcaccgtgatggtgccgaagaccgtgatggtcgcgcccgaaggcgtcgcctatgagcggatcgcgccgcaatacgccacccaggaacgcaccgagatggtctcgccgggctattcctactacgccccggttcagcagacctgcaacacctgcggcggctacggctacggctacggccgctactgagcgatccacacccagccaatacaaagccgccgcctgatcacatcagacggcggcttttgactgttcagaaggtctcagaacgggtggacggacagcgtgccgaacacgatcgccgcgatcacagcaaaggcgctgtacagcgccgcggtgtgaattccggccccggactttcttgaaacttgccgcgcgtgaaagtgcaggcgggcttccgccgatagttcgcgcatggtcgatctccaacgccccattctcgggcatatggaatatcgttcgtggcgcaattcaagcgggtggcaaaaatagcgacgccacacccgcgaggaacccggttcccggaggaatcttcttcctctcgggctcgcccgagaatgttattcgtcgcaattcgaggcgtcgggaacccgcgccagtcccgcgtgaccgaaaatctcgaaaacaaccccatgcaaaggagtcggaggccccccgctggcgtcggccactacccgcactcagggcttccagcgcccgatcctgaatgcagccagatggccggggatgtcggccggatcgaacggtggaccggcgaacgcgccgatggcgtgggaggcgcctgccgggcgaccggacgcggcgtcgtagaggtcgggcctgaacaccgccatggcggccttcagcgcctccggccggtacggtgtctggccccatcgcaccatctgggcgtagagccaggccgcctgcgcgggatccggccgcgccgccgcctcgcgccccaccagcaaatagcgattgctctcgcgcatggtgccgtccggcgagatcttcaaacgaccatcgagcgtgcgctggatgacgctggcgtcgacgccgagccgctcgggtgagctaagaatgcgcgcgacctcgggccggttctccggttgctcgatgaactcggcggcgcgcagatgcgcgcgcaccagtgacgccacgacgtctggatgcttctccgaccagctctggcgcaccgcgagcaccttctccaccgcgctgagcaggatgtcggagacgaagtgcaggatgtggccgacgccgagatcaaccgcgatcgaattccaaggcgcgccgacgcagaacgcatcgacgtgcccgttggcgagactgtcgaccatgtagggcggcggcagcaccacgagctggacgtcctcatcgggatcgacgccgccggcagccatccagaatcgcaattgataattgtgggtcgagaacgggaaggtcatgccgaaggtcagcggctcggccccgctcttgcgccgcttcgcaaccacgcgggccagcgcctgcgcggtcgccatcggatcgaagcggtcaccgtcgatctcctccatcagcgcggcatgcagcgccggcgagaccgtgatggcgttgccgttaagcccgagattgaacggcgctgtaatcggcaccttgacgtggccaagcccgaggctcgaggcgatcgcgaccggcgccagcagatgggcggcatcgaacaggccgatattcagtttgtcgcggacgttcgaccacgacacttcgcggaccagcgtgatgtcgaggccctcagtcgcggcataacccttgtcgacggcgacgatcaatgcggcggcgtcgaccagaggaatgaacccgatgcgcaagggtgtggtcatttcaagagctccgacgccgtcaggatcgattgcgcgatctccccgattttctttttctcgcgcatcgcggtcgagcgcatcagcacataggcctcctcctcggtcagccccttcaccttcatcaggatgcccttggcgcggtcgatcaccttgcgctcctccagcgcgtgcttggtgcggtcgagctcatcctgcagcttggcgaaggcattgaagcgcgacacgcagagatcgaggatcggcttcatccgctccttcttgaggccgtcgacgatataggcggagacgcccgcctccaccgaggcctggatcgaggcagcgtcgctctggtcgacgaacatcgcgatcggccggcgcaccgcacggctgacctggaacatctgttccagcacgtcgcggctggggttctcaaggtcgatgacgatgatttcgggatcgagcgcgtagatccgcgacagcaggctctgcatctcgctgatatggaccacgtcggtgtagccggcctcccgcagcccctcctccaggatggccgcgcggatcgggctctcgtcgacgatgacgatcctgggagacgattctgcgctcatcgacaactcttaagccccggcgactgcatccatatcacgccagaaggtccgggaaagggttgtaattctcggcaattgggactagctcctgcccatcaatcaggcagatttgggacgatatgcaagaggccgccgcgccgaaagtgagctttgtgtccttgggttgccccaaggcgctggtcgattccgaacgcatcatcacccggctgcgcgcggagggctatgagctggcgcgcaagcatgacggggccgacatcgtcatcgtcaacacctgcggcttcctagatagcgccaagcaggaatcgctcgccgcgatcggcgaagccatggcggagaacggcaaggtcatcgtcaccggctgcatgggcgccgaacccgagcagatcgagagcgcctatcccggcgtgctctcgatcaccggaccgcagcaatatgagagcgtgctggacgccgtgcatcgggcgctgccgccggcgcacaatccgcatctcgacctggtgccgccgcagggcgtcaagctgacgccgcgccactacgcctatttgaagatctccgaaggctgcaacaaccgttgcagcttctgcatcattccgaagctgcgcggcgacctggtgtcgcggccggccaatgacgtgctgcgcgaggccgagaagctggtgaaggccggcgtgaaggaattgctggtcatctcgcaggacacttcggcctatggcgtcgacctgaaatatgccgagagcccgtggcaggatcgctcggtgcgcgcgaagttctacgatctggcaaaggagctcggcgagctcggcgcctgggtgcggctgcaatatgtctacccctacccgcatgtcgacgaggtcatcggcctgatgaccgatggcaaggtgctgccctatctcgacatcccgttccagcatgcgagccccgacgtgctgcgcgcgatgaagcgtccggccgcgcaggagaagacgctggcacggatccagaagtggcgcgagcaatgcccggagctgacgctgcgctcgaccttcatcgtcggcttccccggcgagaccgatgccgatttcgcctatctgctcgactggctcgatgaagccgggatcgatcgcctcggctgcttcaaatacgagccggtggccggcgccacgtcgaatgcgatcggcaacccggtgcccgacgaggtcaagcaggagcgctggaacgcgctgatggcccggcagcagaagatttccgcgcgccgcctcaagcgcaaggtcggcacccgccagcaggtgatcatcgacgaggtcggtccgacagtggcaaaaggccgttcaaaggccgacgcgccggagatcgacggcgcggtgtacctcagcagccgccgcccgctgaaggtcggcgaaatcgtcaccgccaagatcgagcgttccgacgaatacgatctccacggcaccgtcgccggattctgacctcggctaattggcggccggcggagccgcgagcgccggatccagcgtgcgcagtacccgacggatgcggaccgagctgccgatgcctgcgttgcgcacataggcatcgatgacctcctcgctctcgaccacgacgaggccgaacagcttgcggtcatcggtggcgtaggtgcacagccagtgcatcttgccctgcgttgcgatgattgcgtccagcgcaatgcgcgcatgccgcgccgcctgcgcgtcatcggtgacatcgaaattggcaggaagatctcgttcgatcagcagcttgatcacggcgccacctccaggattgcctggcggcagcctaacacgctccacgagccgcttgcgtgcgagatcacctcccgcttgacaccgccgccggttcggctgtatgagcccgcgccatgaagctgaaccggaccaaccgccgcgccacctgccagcgtcgtcgcaacgacgatgaagggtcgcgccatgtccgacgccagcgctgattagctaaaagcatcagctgaggttttcgagaaggccgcgcccccaaagcgcggccttctcgcttttcggcctgccctttttcccaacactgtccccagaggagatcgacatgaccaacgccacccatccgttcgacgcgctgatggacatcaccgcccgcccggaggtcgtgttcgtgcgcggcgccggctcctatctctgggacgccaaccgcaaccgctatctcgatttcgtgcagggctgggccgtcaatccgctcggccattcgccggtcatcgtcgccgacgcgctggcggcgcaggcccggcggctgctgacgccgagcccggcgttctacaacgagcagagcctgaaactggccaaggcgctggtcgacagcagctgcttcgaccaggtgttcttcgccaattccggcgcggaggccaacgaaggcgcgatcaagctcgcgcggaaattcggcgccaagtacaagggcggagcgcacgagatcatcaccttcgaaggcggcttccacggccggacgctcgcgaccatgtcggcctcgggcaagaaggcgttcgagccgctgttcgagccgaaggtctcgggcttccggaaagcgcggctgaacgatatcgagtcggtgcggaagttgatctccccgtcgacggtcgcggtcatgctcgagccgatccagggcgaagccggcgtctggcctgcgagcgacgcattcctgcaggagttgcgcgcgctgacccagcagcgcggcctgctgctcatcgtcgacgagatccagaccggcatcggccggaccggaaagctgttcggccatgagcatgccgggatcgcgcccgacatcatgacgctcggcaagggcatcggcggcggcgtgccgctggcggcgctgctcgcaaccgaacatgcctcctgcttcgatcacggcgatcagggcggcaccttcaacggcaatccgctgatgtgtgccgcgggtctcgtcgtgctcgatcagatcggcaagcccgatttcctgaaatcggtcaccgacaccgggctgctgctcgagcgtgaattgcagcggctatcggcgcggcacgggctcggcgagatcaggggccgcggcctgctgctcgcgctcgacctcaagatgccgatcggcgcagctgtgatggccgaggcgttagcggccggcgtgctggtcaactcgccgcagcccgacacgctgcgcttcatgccggcgctcaacgtcacacgggaggagatcgccttgatgatcgactgcctggatacggtgctgaccaaggtcggagcagcaaggcgggtggcgtaagaaccaacccgctcgtcatcgcgaggagcgcagcggcgaagcaatccatcgatccgcatgtgcggagataatggattgcttcgctcgcaatgacggcgagaactacggcctgagaattgccgcgccggtggtggcccggctttccaggtcgatatgcgccttcgccgcatccttcagcgcgtaggcgtggttgatcggcacgtgcagcttgccgttgatcacggcggcgaacagcgtgtcggcgccttcgagcagttccttgcgggtgccgacataatcgttgagcttcggccgcgtcgcgaacagcgagccgtggttgttgagctcggcgagcgggaacggcggcaccgggcccgaggcgttgccgaacgagacgaacaggccgcgcggcctgaggcacgatagcgatcccgggaacgtggtcttgccgacgccgtcatagaccacgtcgcagagctcaccgcggctgatctgcttgacgcgttcgacgaagttctcctcgttgtagaggatgacatggtcgcagccattggcgagcgcgagatcggccttcgccttcgagccgacagtgccgatgacatgtgcgccgagcgcccgcgcccactggcaggcgagcagcccgatgccgccggccgcggcgtggatcagtacccgatggccctgctcgaccttgaaggtcttgtgcagcaggtaccagaccgtgagccccttgagcatcagcacggcgccctgctcataggtgatgtggtcgggcagtttgacgagtttgtcggccgggatgacgcgctcggaggcgtaaccgccgaggttgtagtagtaggcgacacgatcgccggggtggaaattggtcactcccggaccgaccgccaaaacctcgcccgcggcctcgttgccggcaatgaacggcaggccgggcgccttgtagaggccggtgcggaaatagacgtcgatgaagttgagcccgaccgcatgctggcggatcctgacctcgccggtcccgggtgcgcccacctcgacgtcctcataggtcaggacttccggtccccccaccttgtgcacgcgcacagccttggtcatgtcgtcgctcccctcaaattctgacctgccgagcgaatgccatcggcaccttcttgtcaaccaagcggcctggagccggcccagagcaagatgtgttgggatcgaatcggttcggccacgcgcgacttcacctctccccatcggggagaggtcgatttgcgaagcaaatcgggtgaggggccgcagcgctaacgagggactataacccctcacccggcgctacgcgccgacctctcccaagggagaggtgaacctccactgccgatccacttcaacccaatctcatcatgtcttagcgcgcggccttcttgcggttgcgtttggccagcacgttgaacatctcgaccgcgaccgcgaagacgatcgcgaaatagatgtagccgcgcggaatgtggaatttgaagccgtcggctaccagtgccacgccgatcagcaccaggaacgccagcgccagcatcttggtggtcggatgctccgcgacaaaccgcgccaccggtccggacgagatgtacatgatggcgcaggcgatcacgaccgccgcgaccatgatctcgatgtcctgcgccataccgatcgcggtgatgatcgagtccagcgagaacacgaggtcgatgatgatgatctgcacgatcacccagaagaatgcgttggggctcggcttctccctctcctcgacgtcacgcgcctcgacctcgccgtggatttcgtgggtcgccttggcgatcaggaacaggccgccgccgatcaggatgatgtcgcgccacgacagtgagatgtcctgcactgatatcaccggttgggtcagcccgatcagccagaccaggatcgacagcagcagaatgcggaacaccagcgccagcagcaaaccgatctgccgcgcgcggttggcctgcggttgcggaatccgcgagacgagcaccgacaggaagatgacgttgtcgatgccgagcacgatctcaagcgcagtcagggtcaacagcgctgcccaggcttccgggctgctgatcaattgcatcatgctctgaaggctttcatccggcggatcacggtatcgctgccgacaatgtagacggcaatggcgcagagaccgaaggtgatgggcgcgccaaccacgaaatcgttggcgagcgtatacgcgccgagcaccgcccaggcgccgagcagccacagcgtcagccagcgcagccgcaccacgcggaacgggtgcagcacgtgaaacggcgcgaaggtcagcacgatcagcagcgcgaccacgatggtcgacagcaccggcggcagatgcagcaggaacaaatagaacgccgccgcattccacagcgccgggaagccgcggaaatgattgtcgtcggccttcatgcggcggtcggcgaaatacagcgcgctggagaccacgatgccgatgccgaggatcggcgcggccagcggcagcagcatgccgctcgcggtgatcgcataggccggcacgaacacataggtgacgaaatcgaccaccaggtcgagcacctcgcccgaccagttcggctgcagccgaaccacgtcgagccggcgcgccagcgggccgtcgatcccgtcgatgatcagcgcaaccccgagccaggcgaacatgttggcccagtgctcgcgcacggcctccagcatcgccagcagcgccaccccggcgccgagtgccgtgaaaatatgaacggagaatgcggcggtccgcatccgttctggcagcgcatccggctggctcgagtgctccatcggccgagtgctatcaggaatcggcccactttgcatatgcagtcttgcggcgttcggccgcgcaaaccgttggaaactcttggtggttaccgatggcttgaaaatcgggccaagcatgtcaaatgtccagatatgaccgacagctcgctcgattatgacgttatcgtaataggcggcggcccggccggattgacggctgcgatcgcactcgccgatgccggcgcgcggaccgcgctgctggcgcgccgcgcgccctatgccgacaaccgcaccaccgcgctgctcggcgcttcgaccgacatcctggaacggctcgacgtctggcggcgctgcagcgacaaggcggccgcgctcaagaccatgcgcctggtcgacgacaccggccgcctgatccgcgcaccggaagtgcggttcaattccgacgagatcggccgcgagcagttcggcttcaacatcgacaaccgcgcgctggtcgcggcgctcgaggagcgcgccggcgagatcgcagcgctgacgcggttcgacgacgaggccgccgcggtgcagccggatgatgccggggtcaccgtggtgacgcggcagggccagccgctgcgggcccggctcgtggtcggcgccgatggccgcaattcattgtcccgcgaggccgccggtatcgaggttgtcagccgcgcgctcgggcagtccgccctcaccttcaacatcacccacagccgcccgcaccggaacatctcgaccgagtttcacaccgagcacggcccttgcgtgttcgtgccgctcagcggcgaccgcagcagcgtggtctgggtttcgacacccaaggaggccgagcggctgaaggcgctcggcgacgaggaattgtccgaagcggccgagcggcaatcgcattcgattctcggccgcgtcgaggtgcagcccggacggcatgtatttccgctcgccatcgagcggcctcggcagttcgccaggaaccggatcgcgctggtcggagaatccgcccatgtgctgccgccgatcggcgcgcagggcctcaacatggggctgcgcgatgccgccgatatcgccgagatcgcgggccaggcgatcggccgcggcgaggatcccggcgcgccgaacgtgctggcacgctaccaggccgcgcggcggcccgacgtggccagccggacctgggcgatcgacatcgccaaccgctcgctgctgagcgatttcctcggcgtgcagaccgcgcgtgccgccggcctgcacgtgctcggcgcgttcggcccgctgcggcgtctggcgatgcgcgagggccttgcgccgtcctggcggcggtgagcatcatgcgcgcttagggaaataccagtcgcccgctctggatgaaccacatcacgctggtcagcgtgatcaccgaggcgaaggtgccgatcagcaccgcgaccgacgccggctcgatccaggtgtcgttctgccgcgcgatcacgaacacgttgagcgccggcggcagtgaggccatcagcaccgcggtcgccgcccaaggctgcgcgaacgggccgaacagcagcatcagtccgaaggccagcagcggatggatcagcagcttgatcgcaaccacgcccggcacctcccacggcacccgctcgaacggccgcagcgccacggtgacgccgagcgcgaacagcgccatgggcgccgcggcgttctgcaggaactggatggtgcggtcgagcgctgtcggaatcggaacgtgaaacgcggcgaccagcgcgccgaacaccgccgacatgatcagcgggttctgcacgatctgcttgagcaccacgccgaatgcgtgcagcagcgagggatggtcgcggtcggtgagctcgatcagcagcggcacgatcgagaacaggaagatgctgtcgcagcagaagatcagcgcggtcggcgccgccgccttggtgccgagcacggccagtgccagcccggggcccatatagccgatattgccgtaggcacccgacagcccggcgagcgtcgcctcgcgcagcgtcaggcgtccgatcagcttgcctgcgagcatcgccaggaagaacgcgatcacggttccgagcgtggtggcgatcaggaatggcgggttgttcagctccgcaaacggggtcttggacatgatcccgaacagcagcgccggcaacgaaacgtaaagcaggaagaaattcatccaggcgagcccgctctcgggcaaacccttggcttttccgcaggcatagccgatgaagatcaggccgaaatacggcagcgccagattgaggatatcgatcattctgaaagtagtttctcggccggttttcgggccgtttttgcaggtctggaatcggtaaacccggggttaattcgaagcttagcccctagcatcggccacaatgttggtctatcgacgaaccatgatcaaagcgcgcaccgccaaattccagatcgggcagatcgtccgtcaccgggtgttctccttccggggcgtgatttttgatatcgacccggagttcaacaacaccgaggaatggtggctgtcgattcccgaggacatgcggccgcacaaggaccagccgttctaccatctgctcgcggagaactcggagaccgaatacgtcgcctatgtctccgagcagaacctgctgcccgacgagtccggcgaaccgatccggcactcgcaggtcgcggagatcttcatcaaggacaagtcgggcggctaccgcccgcgcaatccgtcgctgaactgacccgccgcaccgcggctcggccggccgcgtcatatcccgtcacgtttggccagcgctgccgcgaccgcccagaccacgaaccccgccagcgccaatccggcgccgaccagcccggtcgaggtccagccgtagccggccgcaaccgccattccgccgagccacggccccagcgcgtttgcggtgttgaatgcggaatggttgagcgatgcagcgaggctctgcgcctcgcccgcgacgtccatcaggcgggtctgcaacacggtggcgagcgcgccgccgagtccgatcaggaagacgtccgcactcagcgtccagaaattcagtgccgccagcggatacagcgccagcgtggccgccgaccacagcaacagcccgcccgcggtcgccatcagcgcacggtcggcaaagcgcggcacgatgatgttgccggcggtcaggccggcaccgaacacgcagagcgtcaccggcaccagcgccggcgaggtgtgcgtcaccgccagcatggtcgaggcgagataggtgtagaccgagaatagcccgccgaagccgatcgcgccgatcgccagcgtcagccagacatgcttgcgcccgagcgcggacagctcgcgcagcgggctcgcattgctgttggcgacgtcgcgcggcgcgaacagcagaaccaggatggcggtgagcagcgcgaggcccgcgacgatcgcaaacgcccagcgccagccgatcgcctgccccaccccgttggcgagcggcacgccgatcgtcgtcgcaatggtgaggccgagcaggacgcggccgaccgccgccgtgcgcttgtccgtcggcaccagcgaggccgcgaccagcatggcgatgccgaaataggcgccatgcggcagcccggcgaggaagcgcagcaccagcatggtgtgatagtcgggcgcgagccccgacaggccgttcatcagcgcgaagaagcccatcagcgctatcagcagcgtccgccgcgtcatgcgcgccgacagcacggcgatgacaggcgcgcccaccacgacgccgagcgcgtaggcgctgatcgcctggcccgcctgcggctcgctgacatgcaggtcgtgggcgaaaaacggcagcaggctcatggtcgcgaattcggcgatgccgatcgcgaagccgcccatcgccagcgcgaggtggacgatgcccggatgaaacgcgccgggaacattgtcctggtcgacgcggccatcggccgaagcccggctgcccgcctgcaaagcctcgttcctcggccgggagagcggttcccgccgctgcttgctgacttgctgggacattggcgacttccatgactgcgaacggcggccagggtccgcgggagaaccacgcgcgctttggcgcatcgaaagcgcgcattccgcgcgttcgtctggcctcccgtgacggatttatgattgtgcttcgacgcccgaggatttgtccggacaaggcaaccgcgatgcggcttggcgcgatcgatttgccttgagtgaccatcgcacaccacctgcgcaatcaccaccgcagcaggctgccatcagccagtccgtatcgcatgacaaaaaaggcgcccttccgggcgccttttgatttgcgatgatctcgcgacggcgtgagcgcttgaacgcttacttggccgccgggttggctggagccggcgtcgcaccggcagcgcccgcgccttccagcttcttgcgctgctcttcggcacgcttctgcaactcttcctgcagcttcttcgagttttcctcgaacaccttcggatcggtcggcgggccgtcgaacgccttggcgaattcggtgttgagcggcagcggcagcgtcagcggcgcgccgttcgaattgatcgcctggaccacgaggttctggcccttcttcatgttggcgatcagctcgggggttgcttcatagtcggacatgcagccgttctggaagcagatcacgtagggcgcctgctgcggcgggttaccgtcgacgatgacgcgggtgccgtgcacgagctgcatgccgagcggcagcgtgacgcgcaggatcttcttcggctcgccttccggctcgatgatcacggcggcgatcacaggctggccggactcgatgcggccgtccttgccggtgaagcacacctgcttggcgttggcttcctggcccttcaggcagaacttggtccagggggcgtagatgagctggatctgctgatcctgggcgggctgctggccggcggccgcggcgggcggcgcacctgctgcggccggtgcctgggctgcgggcgccggggctgccggagccgccttcggagctgccttgggtgccgccttgggcgcggccttcggtgccgcgggcgccggcgctgccggctgctgggcctgcgcggcaggaaccaggagcgctgcagagaatgccgtcgccgccatcagggcaacaactcgcccatgcggccggaccggggcggccaagatacggaaattcattgcggaaaaccctttctgaacggcagcacccgaaaccgctgcaggcgccgacacatagccgcgaaacacagctgctcccgcggctgtctcctagtcaattgaggcggatacgtgacaggcgttcccgccttcgaattgcacgccttcaatacagcggcgcgcggaaagatcaatgccgacaaccgcatttgcgcctatgtgacgacgagtttcagcggcctgtgataaacctcggtcgtgacgtttcgcgaatcaaatccggcgcctcacgcacgtgttcccgggcacgttgggcgcgtcgcatcggccgccgtcccgctcgtcttggcattcgtcctggcattcgtcacggcactgctgacgggcgcacctgccccgacattggccgccgagagccgcgcgatcgcgatgcacggcgcccccgcgctggcggccgacttcacccatttgccctatgccaatccggacgccccgaagggcggtcggctggtcctgagcccgcgagaaggcaccttcgacagcctcaatccgttgatcgtccggggcctcgccgtgcagcagctgaggggctacgcctatgagcgcggctatgtctacgaaagcctgctggtgcggaacaatgacgagccgttcacgctctacggcctgcttgcccgcagcgtcgagaccgacgatgccagaagctatgtgacattccatatcgacccgcgggcacgcttctccgacggacgcgaggtcaccgccgacgacgtggtgttctcgctcgagttgctgcgcgatcacggccgtccgctgcatcaccagtattattcgaaagtcgcaaagaccgaggtgctcgacccgctcacggtgcgattcgatttcggcggtgtcgcggatcgcgaattgccgatgattctgggcctgatgccgatcctgccgcgtcatgccaccgacgtctccaggttcgaggagaccaccctggcgccgccgatcggctcgggcccgtatcgcgtgacggcggtcaagcccggcaccagcgtgaccttcacccgcaatcccgattactggggacgcgacctgccggtgaaccgcggcctgtggaatttcgacgagatcaggctcgactattaccgcgacgccaacggccagttcgaggcattcaagcgtggcctctatgacttcaggaccgagcccgaaccgctgcgctggcacgatggctacgatttccccgcagcgaaacgcggtgaggtgatccgcgaggccatcaagatcggcacgccgcaaccgtccgaattcctggtgttcaacaccaggcggccgaaatttgccgacgtcaaagtgcgccaggcactgctgatgctgttcgacttcgaatggatcaaccacaattactatttcggactctattcgcgcgccggcggctatttcgcgggctcggaattgtccgcctatggccgccccgccgacgaccgcgagcgcgaactgctcaagccgtattcgtcgcacatcccgcccgacatcctcgatggccgctatcgcctgcccgccaccgacggctcaggccgcgaccgcaccatccttcgcaacgcgctcgcgctgttgtccgaggccggctacgcgctcgacggcaccgtgctgaagcagcgctcgaccggaacgccgctgcggatcgagatcctggtgacgacacgcgagcatgagcggatcgccctcgcctaccagcgcgacctgaagcgcgccggcatcgacgccgcggtgcgggtggtcgatgcggtgcagttcgagcagcgccgggttgcctttgatttcgacatggtccctgttcgctgggaccagtcgctgtcgccaggcaacgagcagtggttctactggggcagccaggcggccgacgtgccgggcacccgcaactacatgggcgccagggatccggccatcgacgccacgattgccgccctgctggcggcgcgggagcggccggccttcgtctcggcggtgcgggcgctggaccgggccctgacgtcgggcttctacgctatccccctatttaacttgggagagcaatggatcgcgcgctggaatcggatagaacggccttcgaccacggcgctgacgggctacctgccggagacttggtgggagaagcccggcgcggaatccaaatagtctgccaagatagtctgccaagtaatctgccaaagtgttctgccaagcaatcgatcaggtgatgcgccccgacgcggcatgacctggtccgatcgaagcgatgcaaccgacgttgaacctgtgaaccagtcgatcacctcgcccaccctcgatacgctgttcaagcgcaccctggcgcggcagcccgaggcgctggcgctggtcgacccgctcaacaagcaacgcgtcaccggacagacccgcaagcgcctgacctatgcgcaggccgaccgcgcgatctcggcgatcgccgcccatttcgtcgagatcggattgccggccaatacagtgatcgcggttcagcttcccggcacgatcgaatttgtcttgacggtgctcgccgcccatcgggtcggcctcgtggtggtgccgttgccgctgctgtggcggcaggccgagctgacctccgtgctcaaccgcaccgcggcgcgggcgatcgtgacatgcagcaggattgacggcatctcctacgccgacctcgccatgaacgctgcggccgaggcgttctcgatccgccatgtctgcggcttcgggaccgatctgcccgaaggcatgtcgtcgctcgatcaggccattctcgaggactcccggacctcgcgcccgatgatccaggacggccgcaagccggcgctgatctccttcgacgttaccagcgatggctttcgtccggtgccgcgcgcgcatttcagcctgatcgccggcgggctcgcgatgtcgctcgagagcgacctggcgcagggcgcgaccatcatgtcggcgtttgcgccgatgtcgtttgccggcatctgctcgtcgctggtgacctggctgctgtccggcggaacgctcgtcatgcatcacccgttcgacgaggacgcgttcgaggcccagttcaacgatcacgcctgcgacacgctgatcgcgccggcgcagctcgcgctgcggctcgacgagcgcggcctgtcggagcggctgcccagcctgcgcaacgtgatcggtctgtggcggatgccggagcaggttgcctccagcgcgcactggatctcgcggcgggtgaccatgaccgacgtctatctgttcggcgaggccgggctgttcggcgcccgccgtaccggcgaggacggatcgccggccccgatcaagcccggtccgcacagcgcgccacgtgaagctcccagcgcatcgatcgccggcgaggtcctgctgaccccgaagggcacgctcggcctgcgcggcccgatggtgccggtcgcggcctatgcgccttcgtcgccgccggccgaaagcctgatcgcgccggcgccacgggattacgtcgacaccgaatatgccgcccggctcgaccgcacgaccggcgccatcaacatcaccgccccgccgtcgggggtcatgacggtcggcggctaccgcttcctggccgaggagttgcaggaatggtcgcgccggctcggccagggcgcgctgttgacggctttgccggaccgcctcagcggccaccgcctggccggacgggcgcaggacaatgcgcgggcccgcgacgccctgacagaacttgggcttaacccgttgatggtcgaagcatttcgcgaccgcagcggcaccggaatgccttaaaatcttatcattgcgttagtcttagcattgtgttgacgccgcattaagccaagccaactagcatcgcagccgttgctgttcttaagcattggtttcgagcgttcgaatgtctcaacaaggtccggttctcatcgtctcggcatcggcaaagccgccgtttgccacggtcctcgatgaaaccaagctgtttccggtcgtggtcaccgactggaacgaggtcgggcgcgccatcgagcaggtcaagccggccgcgatcatcgcggccgccgagggcgtcgacttcgtcaccctgtcggggcttgccaagcgcgccgccgcccgcgcgccctacctgccgctgatcgcggtcgatcccgcgaccaccctgcccgacaccgtgatcgcgttcttccagaagaagggcctgccggatcgcctggtggcccggctcaatgcgagcctgcgcgttcgcgcgctgcatgcgaccgtgatgcgtcggctggtgccgccggccccggtcgcactgacggatatcgatccggtcggcgaagccaccacgctgctgatcggtcgcggcggcgcctacccgacgctgtcggtcgcgctcggcgaacgggccggcgtggtcggcgcgctcagcatcgaggccgcggccaagcatctgtccaaccgcgacatcgacggcatcgtgctggccgagggattcacgccgcgggtgatggacgctttcctgactgttttgaccgaggatgtccgcttccgcccgctgccggtgatcgtcacctcgggcgagctgacgccgcgttacgaactgcccaatctcgagatcgtcacggccgggccgacgcgggtcgccgacatggcgttgccgatgatccggcagcatgccttcgaggcgcggctcggccgcatgctcaaggcgatcgacgccaagggcctgatcgatccccgcaccggactgctgaccaaggccgcgttcgagcgcgatttcgcgaccgccgtctaccacaccgccgagcgcggcggcgcgctctcggtggcgcgcttcaccttcgacaacgtgcaaccccgcgcgcaattcgacggcgcgcggatcatcagccggctgatgcgccaggccgatttcggtgccgtctatgacgaccgctcgctcgtcgtggcattcgccggcaccgatttgcgcaacgcgcaggcgatcacgcggcgattggcgagcgtgatgcgccatacccagaacggccgccgcgacgtcagagccgagcccgccgtcagcgtcgcaacgctgctgccgggcgattcaacgatgtcgctgcttggccgcttgttcgggacgccggagcgcgcggcctcgtaacaagctccatggcgcgtaccagttgccgcgatcgctgcgcgggcatcgcctgcatgcgaagccaccttatctcggtggcggctccgcacgcctcgtcttcaagccctcatgcgtgctgtggctgcgccagctgactgacctgcgtcgccggcggatcgacaaccagggtaccgccatggccatca

SEQ ID NO: 57 - DNA, 25936 bp, Bradyrhizobium enterica
aaagattgacagggcaaaccatagggttcgtacttcgttgaaacgactccacaatttcacttccgttgaaaatacaagcactgccacgggcggtaggctcgctggaccggctaaagcatgatccggaaaagtgcgaagcggttttccgaagagatcatgctcaaacaaaggtctaaagcgcgatgatgattcaaccaaatctcatcgcgctttagtgcgcgatgcactttagccttttgcgcatggtctcttcggaagaccgcttcgcaccgacgtcgttggaattggccggaccgaccgatgttcagctgtgtcgcgccagcgtctgcgacggacgctcgccaaaggcctcgaaataatgccgtgcaaaatgacttgcattggagtagccgcaagccagggcggtcccgataaccgtggtctccgaagtgggtgccgaaagcagctcgcgcgcccgttgcaggcggaccagtctggcaaactgcatgggcgagcggccgcgaaattggctgaacgaacgaaaaagcgtcctcgctccaacgcccgcgaccgcaacgagttcttcgatcggaaccaagcgagaccaattggcttcgatatattcctcggccttccgaacgtgatgaggcgccgcagcggcagccgcgccctgcagaaagcgactatgcgagtgtcggccggcctcgagagccgcaacgatgaccgcctgctccagctcgcgcaacgcaagcgaaggaaccttcgctgacgacgaccagttcacggtctcggcgagaaacagtgtcgtctgcagcaagcgctgcgagcgctcgagtgtcatgtccagcgacggctcaaaaacgagctcgccgcttggcattccgcccatcaaggcgctcaacttgcgtttgaacgcgtcaggagcaattcgtagcgcgagacgtcggtggccgccgcgcaagtgaagttcagagtgttgccccggcgggaggatacatgcgcgctgctcgtcgatttcggcgaatgcgtctgccgttgctgtcgtgccgctaccactaatcgcaaactgcaaacgaaaatgcgcctcttcggggaagctgcacgtgaagtcggtcgttgtcgccacatacaccaggccgagttcgttgagcgaaacgacactggcccgcacctcgaatggggctgaagacacgtgcaactctctgacgccgaagactgccagcgccgaccgtttgagccgatccatgtcggttgcaagaacttgaaagcgatcgagcaaatgcctttgttgctgcaacgaagacaattcgaacaacgagcctcgtagggcgggggcggtgtcgggctgcaggacttggtcgttgacccggcgagccagcccgacaaatacctttcggttttgcatcatctggcacgtgacgctgatctcgaccggataactcgagccgtctcgtctgaccgcgatctcgcggaaggtcatcgccattcctggctctgcatttccccacttcaccgcgttctcggcaggggtcgctccgatcgagatatcgttgatggtcatcgccaggagttcttcgcgcgaatagccgagatcgattgacgactgttcgttgatatcgagaaatcggccctgcgcgtcgtgcacaaagaaaccgtcgggtcgatcaagaatgagatcgtgacggtcgtcgtctttattcatccaagagcagccctgcaaatgttcgttcggcaaatgccgaataccaaatattcacggaacatccactggcgctgctcagaccattgtcgtcgccttcgctgcggcttcgcgtctatccaaccagtcgatcaatatcaaatgagcctccggcatctgttcggtaaatcaggacagctgtcaagccgcattcgtccctccgctggttcgcgccgtgtcatcgcgagagggctgagcagagtttgaaatgaagcaggtctgacccggatcgcgttcgtcattgcgaagcatgatgtcgacgcgccgcgctcgtgcatattcgccgaaaattgagcttgtgttgccgcgacttaacgaaaataaatcacgcggtgcgatcaagacgcgatcgcgccagcgtcttccgacgccgtgagttccggttcatgtgagtgcaacgctgcgtccgtgccggtgcttcggcagatttccagagtcgttcgcgatcgcgcgacgatcacatcgcttctcgatgcatggtgctcaggtgattcgacgccatgacgctcgatcgatcaagctggaacctttcgtcgtggcacgaaccggtccttcgtggcgctaacgggcttgcatgtcgcatctgttggttggcgcaggagtggtgcgacgcgcgagccttggcgcgatctggttcagtttgacgcgaacagggcagcagctccgttaagctctcggcggtagatgaatctaactccgcgaggcttgacgcggttacgtggtcacgaagaaatggaaccgtacgcgtgccagagaatgtcgtcagattccgcgcgaggcggatgcagctgtccgaaccggctgattcggagtcgcagttgcccggtgccgactcgatctatcttcggctcagtcaattgctcgaacgccagaggcaagagctgggccggtttcgcgccggcctggatggttccgtcgcacagggtggaatgtcgctgcaggagcaggatgcggcattcgtgagcctgctgatcgtggcatccgatattcaaaggatcgacaggacgctccgttcgctgtcggcgatccgcacgtaccggtgattgaaacccgtggtttccgagaggccatcctagtcaacatttccaacggcgcggcggtctcgaaggcctgaatttcatcgcgaatcgttggccaatccaatcaggaggacatcaatgtttggtcgcaaagagcgtgcggacgcgcaagccctgatcgatgcgctcgatcggtctcaagccgtgatcgagttcaacgtggatggcacgatcatcacggcgaatcgtaattttctcgacgccgtcggctattcgctggaggaaatccgcgggaagcatcacagcatgttcgtcgacgcgtcagagcgggacactgtcgagtatcgcgaattctgggcagcgctcggccgtggagagttgcgatcggcggagttcaggcgtgttgcaaagggcggtcgcgaaatatggattcaggcgtcctacaatccgatcgtcgacaagcagggcaggccgttcaaggtggtcaagttcgcgaccgacgtcacgcgggcgaaggcccgcaatctggatgcggccggcaagcttgccgcgatcaatcgcacgcaggccgtcatcgaattcgaactcgatggcaccatcgtcacggccaacgagaattttctcggggcgctcggctactcgctcgccgatatcagggggcagcatcaccgcatgttcgttgcgccggacgagcgcgacggatcggcgtatcgagagttctggtcacgcttgacgcgcggcgaatatcaatccggcgaatacaagcgtatcggcaacggaggccgcgaagtctggattctcgcatcgtacaatccgattctcgatgaccagggcaagccgatcaaggtggtcaagttcgcgaccgacataaccgaacaacggctcaaggccgccgatttcgccgggcagatttctgccatcggaaagtccgaggcggtcatcgagttcaacatggatggcacggtcatcacggccaacgaaaattttctgaatgcattgggctactcccttcacgagatccaggggaggcatcactcgatcttcgttgcgccggctgacagcggcagcgaggactatcgggcattctggaagtcattgcgggacggctgctatcaggccggagagtatctccggctcgggaagggcggtcgcgaggtctggatacaggcgtcgtacaatccaattctcgatctgaatggcaaagcgttcaaggtcgtgaagtacgcttccgacgtcacggcgcaagtgatcgcgcggagaaagagcgagcatgtccgcgggatgatggagtcggtcgcggcgggcgcggaggagctcaacgcatcggtccaggagatttcgtccgctatgtccaagtcgcgggaaacgacgatgacggctgtcggacatgtcgagggggcggacaagcaggcgcaacgcctgaccgaagcggctcaatcgatgagcgggatcgtgcagatgattcacgagatcaccggccagatcaatctgctggcgctcaacgcaacgatcgagtcggctcgcgccggagaggcggggcggggctttgcggtcgtggcggccgaggtgaagaatcttgccaatcaggcaaagcaggcgaccgacaagatcaaccaggagatcgaaagtctcaatggaatttcgaacgatgtggtcgaggcgctgagaacgatccgctcagccatccagcatgtcagcgagtacgtgacgtcaactgccgccgcggtcgaagagcagagcgtggtcacaaaggagatgtcgtcgagtatgcagcgtgcggcgtccgaagcggcggcgctgggctaatcggccgagccggtctgcggaggtgtctgccgctgaaagcgggcgaggctgagcggacgcattgaaggggctcccgatacgatcgtcggctggtcgggacctgcctgacctggagtgtctaatcatggagaatatcttgattttcccacgcaaagcgccaccgatcgcggtgaacagcggttcgatgccagatgccgcggggcccgacaatcccgagtgcggcaaccaacggcgattggcggcggagggcgcaaacgccgccgatgccggtggtcaactgcgggccagattgaccggggtgattggcctcctggagggcgcgctgcaggaaataaatccgttgcttgagacgttggcagacgaggagcgtcgtcaggagctggccttgaggatcgccgttgcgtgcctcgaggtagagcgtgcgaaatacaatgtcagtcgcctgattggtggctagcgattctggcgtgctgtcagcttggtgcgtgtgcgtcagcgacagagtgggtgtgattgtcgttgtcttcgtccggattctattgaggcaattggcgggtaggtgaggcgaacgacgcgacgctcggggaaaatcggcgtggcagtgaaaatcgccgagatcggttcgcctcaactcacccatctgcggccagttttgttggcgtgagagggggcttcagcgtgttggaatcgtcgcaagtcagaatgctgcgtttgtgcggttctcggtttgccggcacgcgcaaggcatgcgtgatggtcgtaaggaaggggctatctgcggcggtcgggctcctgtcggtcgacagcggaaagccaggcttgctccgtgcgcaactcgcggcgctctcgcgattggttccgttgctctacttcatccttgttgcaaacgcatgggtcgtctcatccaactttatcgggaaagcgcccgattggctgacgctcggtgttgccttgttgctcagcgtcgtttgttgcgtcaggctggtcgtgtggtggcgtaagcgagagctcgcgctgaccgacgagcgagcgcttcgtgagctgcgacggacgaacttgctggccgccattctcggcttggcgttcgctgcgtggggatttgccctgttcccgtatggtgacgcgtacgagcaagcctttgtcggcctgttcgagaccatcgtgatgctcagcagcatggtgtgcctgattcattcgcgttcggcggcagtgactgtcgcgctcaccgtcagccttcccttcgtggtgttctttgcgtcgactggggttcccgttttcgtcagcatggcagtcaatttcacgctggtgacggtcgctatcgttattgtcatatcgattcaatatcgtgactttacccggatggtcgaagcgcaggcgcgggcggagttgctcggcaacgagaatttgcgcctcgcgaatctagacagtctcaccgatctgccgaaccggcgggcatttttcagtcgcattggggacgtgctgcaggacgcttcgtcggatcaatcgcgtgtcgcccttgcaattatcgacctggatggattcaagccggtcaatgacctttatggtcacgcggtcggcgatcggttgctgatcgaggttgccaggcggctttccgatcaatgtgcgtccgaccgggatgtattcttggcgcgcctcggcggagatgaatttgcgtatgtcgtcgccaacgcgccgaaggacgaagcgcttgtcgcacaagcagaccagcttgcgcaatcgctgcgattgcctttcgttctgcccgaagcaaccgtgaagatctccggatcgatagggatcggagtttatccggagatggcatcctccgtagagcagttgttcgagcgtgccgactacgctctttatcatggcaagggcgccaaacgtggtgaagcggtgctgttttcctcgagccatgaagcgcagatcaatcgtgacgcccgcattgagcaagccctgaagctggctgactttgatgaggagctgacagtcctgtttcaacccatcgtcgacattcgatcgcaagcgacggttggctttgaagcgctggcgcgctggaccagcccgatcctcggcaaaattcccccggcgcagttcatcccggtcgccgagcgggcaggcatcatcgacttgttgaccaagccgctgcttcggaaggcgttggcggcggcggcccgctggtcgagcgatatccggctctcattcaatctttcagcccatgacctcaattcgtcccggaacacgttggccatcgtcagcatcattcgcaacagcgggtttccgccgaacaggatcgacctcgaaatcaccgagaccgcgttcacgcatgacttcgaggaggtccgcaactcggttgagttgctgcggctgcttggctgcggaatctcgctcgatgactttggaaccggatattcgagcctgtctcgcctgcatgcgctcccgctgacaaagatcaagatcgaccgaagtttcgtcaccaatctgaacgagaatcccgcgagctacaaaatcgtcaaatcgctgttggcgctcagccgcgacatgggtctcgattgcgtcatcgaaggtgtggagactcagcaggaactggacgtgttgaaagagctcgggcgcctcacggtgcagggctatttctattcaccgccgatcgccgaggccgatgtcttgggatttcttcggcgcaatgtcagtgtcgacccgtccaggcaagccgaaggggtttagcgcggccgatcgaacactgagcgtgcttcgaaggaagcgcgctcagatgccggatcaggctaggggctgctccagatcgtcggcagctctcagcccgcgtacgccctgtcgaggtcggcgatcacgatcttctgcatcttcagcatcgcctgcatgacgcggtccgcggccttccgatcggggtcgccgaggtagcggctcagcgcggtcgggatcacctgccaggacaggccgaagcggtccttgagccagccgcagcgcgattcctggccgccgtcggtgagcttctcccagaagtaatccacctgctgctgggtctcgacgctgaggaagaacgacaccgcctcgttgaacttgtactgcggcccgccattgagcgcgtagaaccgctgcccctcgagttcgaagctcgccatgaagtcgctgacggtctcgatctcggcgttcgggaacaccgatttgtagaaggcgacggcatcgcggacgttgttgtcgagccagaggaacggtgtgatcgaaggcatgacgggatgtcctcgctagtttgtcgatcgggtggacctaaagcgcccaggcgcgaaggctgcgccaccggcgcgcccagaggacgcaccggtcagccatatcccgacatttccctgccgtttttttcgatgatttcgatcgtggcggcgcccggccggcgcggccttagttggcgctgccgatcaggctttccagcaggcgcttgagctcggtggtcgacttgtcaccatagctctcgacgatgtgcgcctcctggctcaccgccagcgagttcagacgccggcacagcgccttgccgcggtcggagacgaacatcaagaccttgcggcgatccttcgggtcctgcacgcggtagaccagcgcgtccgacaccatgcggtcgatcatcttggtcagcgtcggatggttgagcagcacggcgtccgcaagctcgcccatcgagtggccgttgccgtcggacagcactttgaggatgcgccactgctcgaccggcacgccttccttagccagccgcgtctccaactgccggttgatctcccggttggcttgcgcgagcaggtaggtgaggtgttcggtgatcggggagttttctttcggcggtttagccacggcgtgagacctggttcctgacccggtgaatgaatgtccggcaacgcatgccgtttctatatgcacttcaattgttgaatattcaatattttcccctaggatattcccccaaccaaggggcggatgccgtgaccgcccgctggctgcgttgcgtattgcttcccagacaggagttggcgtgctctcgacggtctcttaccaggcgtatggcggcttgcccgtcgcgccgccgcacctgtttcgaagcccgtcgtcctgcgcggccgatctcgctttgaccgtcaagccgggctcctcgcgccgcggtggtaccgacagcaagcttcggatcggcaatttcatcaccttctccggcgccccgggaatctgggggccgatctccgccaacagcgtcatgctcgcggtcgccgagatcaaccggcgcggcggcatccgcggccgcgaggtcgaattgtcgatgtacgacgccggcgggcccatcgacgaggtcgtgcgccgcgccgagcgggcgatcgcctatgacgagatcgacgtcatcatgggctcgcatatctccgcggtgcgcctcgcgctgcgcaaggtcacggccggccgcatcccctatgtttacacgccggtctatgagggcggcgagcggacccccggcgtgatggcgatcggcgagacgccgcgggccgaaagccggccggcgatccactggctcaccgaggtgaagaaggcgcggcgctggtacctgatcggcagcgactatgtctggccctggcaatcgcatcgcgcggtgaagcgctacatcaaggaggccggcggccaggtggtcggcgaggagttcgttccgctcggcgaggacgatcacgagccgcatctggcgcggatccgcgccgccaagcccgatgtcgtgttgatcaccctgatcgggaccgacagcatcaccttcaaccgcgccttcgccgaggcgggcctcgccgccaccacgctgcgctatgcgggcgcgatggacgagacggtgctgctcggcatcgggccggacgcgacggagaacctgttctgcgcctccggctatttcggctgcgtcgactcgcgcgccaatgacgaattccagaccagctaccgcgcgatgttcggggcgcacgcgccgccgatcggctcggtcgggcagtcgaactacgaggggatgcgcttcctcgaagcggcggccaaccgggcccgttcgctgtcgacagggccgctgtcgtcagcggcgcgcaacctcgtctacagcggtgcgcgcggcaccgtcaccattcgtgacggccgtgccgaaatgccgatctatcttgccgaagccgacggtctcgacttcaatgtgatcaagacgatctagcttggcaccgtcgtccgcgaggccgacgccgcgcttgtcccagggtgcggtgccagacaggagcaggtgtgcattcgacgctcaacgtcaccgcaagaaacctcccgttcccgccgtccctgttgttcaggaatctggcgtcggcggcgtcggatcgcgcgcttgcgccgatggatcgcagcgggttcggtccgcgcggcgcgcgcaaccggctgcgggtcgcgggcttcgtctgctgctccggttcgccggggatgtgggggccggccacgacctcgaccgcacagctcgcagttagcgagatcaaccggcgcggcggcatcctcggccgcgagatcgagttccaggtctacgacgccggcggaccgctcgacgaagtcctggaccgcgccgagcaggcgatcgcgtccgacgacgtcgatctcatcatgggcatgcacaccagcgcggtgcgcctcgcactgcgtaacctcatcacccgcagcaagatcccctacatctacacgccggtctatgagggcggcgaacggacgccgggcgtgattgcgatcggcgagacgccgcgctggcagagccggccgtcgatccattggctcgccgagaccaagcgcgccgcgcgctggtacctgatcggcagcgattatgtctggccgtggcaatcgcaccgcgcggtgaagcgctacatcaaggagaccggcggcacggtggtcggcgaggagttcgtgccggtcggcgaggacgatcacgcggcgcagctggagcggatccgtgcggcgaagcccgatgtcgtgctgatctcgctgatcggcaccgacagcgtgaccttcaaccgcgccttcgccgaggccgggctcgcccgcaccattctgcgctatgccagctgcgtcgacgaaacgtcgctgctcggcatcggcgccgacaagaccgagaacctgttctgcgcctccggctattttccctcggtcggctcgcacgccggcgacgatttcagggaccgccatcgggcgatgttcgggccgttcgcgccgccgatcgggtcgtgcggcgagtccgcctatgaaggcttctgcctgctcgaggccgccgccaaccgcgccggcacgctggacatccggccactgctcgcggcgaccgacaatctggtctatcgcagtccgcgcggttcgatcacggtgcgcaatggccatgccaggatgccgatgtatcttgccgaagccgacggcctcgacttcagggtgatcaaggcgatctgagtggcggtgcaacaccctcgggcaagcgtttcgcgaaataatacttgaaaaggaaaatatttccgttttcaatacagcgacggggtgagcggttcgcgcgggtcagcgcgcagcccagccccgtgccgagggatcatccagggatcaaaagcttcaggagagcgccgtgaccgtcgtccttcccacgccaacgcaacttcgtgccgtcgccgagcagtgcggtctgtcactcaccgatgaggacgtggcctcgttccgcggcctgatgcagggctcggtcgatgcctacaatctcgtcgcccagatgccggacgaactgcccgaggtgaagtatccgcgcacgcccggcactcgtccggcgccggaggagaacaagcacaacgcctggtatcgcaagtcgacggtgaagggcgcggcctccggcaagctcaagggcaagacggtggcgctgaaggacaacatcatgctggccggcgtgccgatgaccaacggctcgtcgacattggaaggctatgtgcccgacttcgacgccaccatcgtgacccggatgctggacgccggcgccgagatcaagggcaaggtgcattgcgagcacttctgcctgtccggcggcagccacaccggctcctacgggccggtgcacaatccgcacaagatgggctattcggccggcggctcgtcgtcgggctccggcgtcgtggtcgcgctcggcgaggtcgacatggcgatcggcggcgaccagggcggctcgatccggatgccgtcctcgttctgcggcacctacggcatgaagccgacctggggcctcgtgccctacaccggcatcatgccgatcgagatctatgtcgaccacaccggcccgatgaccgcgaccgtggaagacaatgcgctgctgctcgaagtactcgccggcgacgacggctatgacccgcgcatcaaggcgccgaaggtcgaggactacaccaaggcgctcggcaagggcgtcaagggcatgaagatcggcatcctcaaggaaggctttgagcagccgaccgcggaagctgcggtgaacgaaagcgtgcgcgaggcggccaagcgcttcaaggatctcggcgcctcggtcgagaatgtctcgatcccgatgcacatggcgggcggcgcgatctggacgccgatcggcaccgaaggcctgacccagaccatgatgttcggcgacggctacggcctcagccgcggcgacctctattcgacctcgctgatggacttccatcgcggctggcgccgccaggcggattcgctgtccgagaccaccaagctgttcatgctgctcggcacctacatcaacaacaatttcggtccgcgcttctacggcaaggcgctcaacatctcgcgaaggctcaccgcggcctacgacaaggcgttcaaggactacgacctgctgctgatgccgaccacgccgatgaaggcgacgaaactgcccgaggccaatgccagccgcgaggaatacgtcgcgcgcgcgctcgagatgatctccaacaccgcgccgttcgacatcacccatcacccggcgatgtcgctgccgtgcggcatggtcgacgggctgccggtcgggctgatgctggtcggccggatgttcgaggagagcaccatctaccgcgccgcgcacgccttcgagcaggccggcgactggaagaagatgtgaggcgccgcttgtcgcaggccggagggatcgaacaccatggctagcaccttcgccgcggtgttcgagatcgtgagcttcggcgcgatcatcgtgctggtcgtgctcgggctcggcatcatcgccagcatgatgggcatcttcaactttgcgcagggcgagttcgtcctgctcggggcctatgtgacctacctggcctatgcccatggcgccccggtctgggtcggcatgatcgcggcgcccttcgtggtcggcgcgctcggcttcgtgctggaggcgctgatcatccggcgcttctacgccgcgccgatcgtggcgatgctcggcacctacgcgcttgggctcatcatccgcgaaagcgtacgcggcttgatcggcggcttctatctcaccgtgccggagccgatcggcgggtcgatcgaccttggctcggtgcacatctcggcctggcgcttcaccatcatcgtgatcacgctgctggtgatgggggcctgctacctgctgctggcgcgcacctcgttcgggctgcgggtccgcgccacgctggagaacccggcgctggcgcgcgcctcgggcatctcgacaccattgatctacggcgcaacctttgcgttcggcgcggcgctggccgggcttgccggcgcgttgatcgtgccggtgttcagcctgttcgccgatctcggcatccgtttcctgatccagggcttcgtcgccgtgatggtcggcggggtcggctccttcatcggtccggtcgccggcgccggcctgatcggcacgctcagcgcggcgctgccatgggtgatgtcgcctgtcgtcgccgacgtgctcgtcttcgtgctcgccatcgccttcatcaaattccggccgcaaggcctcattgctgggaaaggggtctaatcaccatgtcgattgaacgcatgaacctgacgcgccgccgcttcatgggcaatttcgccttcgcgaccggcgcactcgcgaccggagtcggtagctgggtgatcaggccggattgggccaacgccgccgagggcccgatcaaggtcggcatcgcgaccgacctgaccggcccgatcgcctatgccggcaacgccgacgccaacgtcgccaagatggtgatcaaggagatcaatgccggtggcgggctgctcggccggccgctcgagctctacatcgaggacaccgcctcgaacgaatcggtcgcggtcggcaatgtccgcaagctgatccagcgcgacaaggtcgacatggtgctgggcggcatcacgtcgtcgatgcgcaacgcgatcaaggatccgattgtggcgcgcggcaagacgctctacatctatccgcagctctacgagggcaaggagtgcacgccctatctgttctgcaccgggccgacgccggcgcagcaatgcgacaccttcattccctggctgatcaagaacggcggcaagaagttcgcgctgcccagcgccaactatgtctggccgcacacgctcaacgtctacgcccgcaaggtgatcgaggacaatggcggcgaggtggtgttcgaggagtattacccgctcgaccaggtcgacttctcggccacggtgaaccgcgtcatctccaacaaggtcgacgtggtgttcaacaccgtgattccgcccggcgtcggtccgttcttcaagcagctctatgaagcgggcttcctcaagaacggcggtcggctcgcctgcgtctactatgacgagaacacgctcaacatcaatcaggccaacgagatcgaggggctggccagctgcctcgactacttcaaggtgctgaccaaggaagatccgttcgacgccaagctgcaagcggcttacgagaaggatttccccggcaacttcctgttcgcggccggcagcgccgccaccggaacctatcgcggcctcaagctgtgggaagcggcggtcaagaaggccggcaagatcgaccgcgagtcggttgcggccgcgctcgaccacgccaagatcgccgaagggccgggcgggccggccgaaatggtgccgggcaagcgtcactgcaagatgaagatgtacaccgctgttgccaaaggcgggaactatgagatcgtggcgcgcagcgacggtctcgttgatcccaaggagtgctgagcgatcaatgggtagagcaagcgaggccgtcgcacgcgtcggtgaggaaccagatgtcgtgacgggtgaaagtgcaccggccgcacgcgcgccggcgggacaggcatcggcaggatggaaggtcctgccgatcgtggaagggctggtgctgctgatcgcactggtcctgccatgggtgctgcaggattatctcacggtgttcgccacccgcgtggtgatcctcgcgctgttcgcgttgtcgttcgacctggtgtggggctatgccggcatcatgagcttcggccaagcgctgttcttcggcgccgccggctacggtgtggcattgatggcgcgcgacctcaacgtcacctcgatcctcttgatcctgccggccggcgccttgattggcctcaccgcatcgctgttgctcggcggcttcctgctgctcgggcgctatccttcgagcgtgatcttcgtctcgctcggcacgctcaccggctcctatgccgccgatcggctggcgcgcggctggtactatctcggcggccagaacggcatcccctcgatcccgccgctgaccctcggcagctacgagttcgaagaggggccggtctactactatatggtgctcggcatcctcgtcgtggtctatctgctgtgccgctttttggtgcgttcgcagttcggcctcgcgctcgccggcctgcgcgagaacgagcagcgcatcgccttcttcggctacaaggcgcagcacctgaaggcgatcatcttcgcggtcggcggcaccatcgccggcctcgccggcagcctctatgctttccacgaaggcttcgtctggcccaacatgctgggcgtcgtgttctcgacccaggtcgtgctctacgtgttgttcggcggctccggcaccttgatcggcgccgtgatcggcaccgtgatcatcgagggcgtcagcttctggctgtcggacaattaccgcgacatctggccgatcatcctcggcgtgctgctgctgctcgtcatcatgttccgcccgctcgggctgatctcgttcgtgcttggcgagcgcgagcgggtgggcagtttcggcaaggcgccaaaggagaccggcaatgccgctccttgaggcgcaagggatcagcaaggtgttcggcaagctcactgcgcttgacggcgcggcgttgaccgtcggcgagaacgagtttcacggcctgatcggcccgaacggctcgggcaagagcacgctgatgaaatgcgtcgccggcgccgaggtgccgaccacgggcaaggtctccttcgtcaacaccgacatcacggcattcacgccgaccgagcgcgctcgcgccggcatgagcctgaaattccagatcacctcggtactccccacgctgacgctgtatgacaacatcctgctggcgttgcaggcgcattgctcgctgttcgatctggtgctgtcgcgcacccgcaagaagctccacgatcaggtcatgacgatgctgacccagttccggctcgccgatcgcgcgcatgatgcggcggcggcgctgtcgcacggtcagcagcaatggctcgagatcgcgatggcgctcgcaggcaagccgcggctgttgctgctggacgagccgaccggcggcatgagcctcgaggagcgccgcgtcaccggcgagctgctgcaaccgatcaagcagcattgctcgcttgtcatcgtcgaacacgacctcgatttcatccgcgacatctgcgatcgcctcaccgtgctcgaccagggcaaggtgctggcgtcggggacggtcgcggaaatccaggccaacaagagcgtccaggagatttatcttcgccgtgcctgagcaaaccttcctcgatataaggcatctcgatgccggctatggccgcagccaggtcctgttcgatgtcaacatcggcattccctggcgtggcggcgtcgccgtgctcggccgcaacggcgccggcaagaccacgctgatgaagaccatcgtcggcgagctcgcgagctcgcagggtgagttgtccttcgatggccgcgacatcacccgccgccgtaccgaggagcgggtgcgctccggtatcggctatgtaccgcaggagcattcggtgttcgcgcgcctttcggtgcgtgacaacctcgcggtcggctcgctgtccaattcggacgccagtgcggtcgatcgggtgctggcgatcttcccgaagctcggccagcggctcgaccagccggccggtacgctgtccggcggggagcgcaagatgctggcgatcggccgcgccatgctcggcaacccgaagctgctgctgctggacgagccgaccgaaggcgtctggatcggcgtgatcgaggagatcaccgagcggctgatcgagctcgccaagaacatctcggtcgtgatcgtcgagcagcatctcgaccttgcgctgcgcgtcgccgactacgcctatgtgctggaccgcggccgcgtcgcgctgcagggcgaggcaggtaaggtgcggagcgatccggaactgctgcggtatctcgcgccatagatttccggttccacaggaacgaagcgtccccggttgccgttggcccgcgggaggacttcaccgatgcgttatttttcgattgcagccctttttgccgttgtcgcgatgagcagcggtgcagcgctggcgcagcatgcaggcacctcggcggaacagaaggcgtgctcgcgcgatgcacagcgcttttgccgcaaggacctcggcaatgacggcgccgtgcagaactgtcttcagaccaatcgcgacagtttgagccgaagctgcaagaaggtgttcaagagccacggcatgtagccgtcgcttgctgcggcaatgcgtcggctcagtgcgatgacgtcccgtcgacgtgcttgacgagatgtgcccgcgacggcgaagggtcaaaccggtccgcgaaatactgcgtttcgtggacgaccagcccgtcgcggaattccatgatgctcaccacgtaggatggcctgtcgtcataggtcaggatgtactcggtgatccacagctcgccaccgccgaggatacgccggatcgcgaaccgcttcttgttcggctgcaccgtgcggctttgctggatgtgatgccggccgcggatccgctcgcccgattgcggatagtcgagcacggcatcctcggcgtagatgtcatgctcgcgctcgaagtcgctggcatcggacgcttcccaatggcgctgcagcgccgcccgcacggcttgatcgttcatcgtaatctcccggctgtgccccgcgtgtgattccgcgaaggtctgagcgtggatggcaagagcaatgtgatcaagagggcgtggccggtctctcccgtcattccggggcgtgcgcagcgcgagcccggaatccattccaccacttgtgttgcgggtcaatggattccgggctcgcgccaagaggcgcgccccggaatgacgggcagagacgctcggtgttcgtcccggccctgagcgacgacccataaccatgaatgcaaattgccttgccaagctgtggccacagcgcgctccaacgacgcagccctgtggttatggttccctgctttcgcagggacgacatcgtgtgttgtttgggatgcttatcgccaacgtcgcggcgcagtcgcgccgcgcttacttcaccgcggagaagcgggtgtcgaacgagttggtctgcacaaccggcgcagagccggcgagttgggtcgccgccggcgcggctgcggcggtgtcggttgcttgcggcttcggtgcgggcttggcggtgactttcggctcggccttcggggcgacgcgcacaaccgattgcggtttggcatcggcgaccttcggcttggccggtgcggcagcggccggcgccggtgcggcggtcttgctggcgtcggcggtggcgccaccgatgccgaccttgcgggcaaagctcgagaggaagccttcggacttgtccgacgcattcgccgaagcgacacgggtgttggctgcgggcgttgtcgacgacgtcgttgccaccaccggctcgtcctgctggaccgcgaggttgggccgtggcggattgaccgtgccggggatcgtgccgggcgcgcgggcgagcgacatcgattgcagcgcctggctgtcgccgccttcggagagaccggtgtttccttccggaatcttcgaggcgaagatcgcgttcatgccgccgtcgatgccggtgttgaggcgcgccaccggcgtgcccttggacaccagcttggcagtctcggcggcgtcctgctgctccttctcgcgcaccgcgctcgcgatctcctcggggaccacataggccgggcacttcgcggaagcatcgaacaccggatcgcgcgtggcgttcggtgccttgacggcgtcgaacacgtatttcttctcgcagaagtcgaccttcggctcctgcttcgtcacttcgaaatgatcatagccttccttgatcatcttccagaaaggcatgttcggattgttgcggtgcttggccatgttcaccggcgtcatccggaacggataggcctgcagctggaacgccttctggccgccgaagaaggactcacggcccagcgaatagatttccgcaatctgctcgtcggtcattgcgtaacagccgcgcgaggagcagtcgccatgcaccatcagctgcgagccggtacggccgagcgccttgtcgaacgcgttgggatagccggtgttgaacgagagatagtaggccgactgcggattcatctggctcgggttgatcgagtagaatccctctggcgcctggcggtcgccctcgcggaccttcgggccgagatcgcccgaccagcggcagatcggataggtcttgagcagtgcgaactggccggagcgggtctgcttccagacctcgagctcggcctcctgcttgaacagccgcaccaggatcggcgactgcatatccatgtccttctcggtcatggcagcgacgagtttcggcgggaccggctggttggccttggcgttctgggcgagcgaaatctggtcgctgtcacagccggcgagcatgacgcccgcggcgagcaccgccgaagtcagaagcgcgcgtacgagcgtgcgatgagtcaagtccgagctccacacccaccgggcgattttcgcgaccccaacacggcgaatatgccctgaagccattgtgtaaaatattagccttcgaccacccctgctcgcaacctgaaccggggctgacagccctcacggtagcaggcatggttcaaggaacgttaaagacccgcctcggggcccaattacggcgaaatcggccgatttggacgaaaaatccggccgtttggacgcctcagccgagcttgcggccgatatcgaggaacttctggcgccgctgtttgcgaatcgcgtccggatcaagatttcgtaggtcgttcaaggcctgggcgatggcatcgccggtggtcgcgatcatcgcggcggggtcgcgatgtgcgccgccggagggctccttgaggatctggtcgatcacgccgaagcgcagcatgtcctgcgcggtgatcttcatgctgttggcggcctcctgggccttggtgccgtcgcgccacaggatcgaggacgcggcctccggtgagatcacgctgtagatcgcgtgctccatcatcagcacgcggttcgctgtggtgatggcgatggcgccgcccgacatgccttcgccggtgacgatcgcgatattgggcacgccgagcgacaggcaggcatcggtcgagcgtgcgatcgcctcggcctggccgcgctcctcggcaccgatgccgggataagcgccggcggaatcgacgatcgacagcaccgggatgccgaagcgatcggccatctccatcagccgcaccgccttgcggtagccttcggggcgcgccatgccgaaattgtgcttgatgcggctgtcggtggtggcgcccttctcctggccgaccacgcagatgctctcgccgcggaagcggccgaagccgccgatcagcgcttcgtcgtcggcgaatttgcggtcgccggccatcggcgtgaattcggtgatcaggccgccgatgaaatcggtgaagtgcggccgctgcggatgccgcgccaccagcgtcttctgccacggcgtcagattggcgtagaggtcggtgagcgcctgcgccgccttgtcctcgatccgcgcgacctcgtcgccgatgtcgctgccgcttgcggcaagcgtgcgcaactcgtcgatcttggattcaagctcggcgacgggtttttcgaagtcgagatagctgcgcatcgggtcgggcatcaactcaatatagggaggaacggtgcgaggggcgaagcggtttcggcgtgatacagagaagttacgtaacttcaaatggttaacgcgcattcgggcggtatgcgcgcttcgggatcgcaggcaggtgacgctctttccgcggagatggtgcggaagtcaaggcggatcaggtggcggtatcgatgtccggtgggcgctggacttacttctccgccagcggatgcaggtcgcggaccaggctcttcagccgctcctcgaccacatgcgtgtagatctgggtggtcgagatgtcggtgtggccgagcagggtctgcacgatgcgcaggtctgcgccgttgtgcagcagatggctggcgaaggcgtgacgcagcacgtgcggcgagaccagccgcggcgcgaggccggaggcgctcgcgagctccttcaggtcgcgggcaaaatgctgccgggtcagatggccgctctcgccggaggacggaaacagccatttcgatggcgcggccttcttcgccttcggcgtcatcacctcgagcgccgcaaggtaatccgccatcgcctggcgcgaggcatcgttcagcggcaccagccgctccttgttgcccttgccgcggaccacgatcatccgcgcatcgcgtcgcgccgcggagaccggcagcgacaccaactcggagacgcgcaggccggtggcgtagagcacctcgagcaggcaatagagccgcaacgcgcgcagccgctgcgccggcgagacgtcggtctgggtcagctccctggcgcgggtcagcatgcggtcgacgtcggagatcgacagcaccttgggcaggccgcggccgcgcttcgggccggacaggatcgcggccggatcgtcggagcggacccgttcattgagcaggaagcggtagagatgccgcatcgccgacagccgccgcgcgacactggtcgacttgaagccgcgggtgtccaggtcggcgaggtagccgcgcagcgcctcggtgtcggcgctggtgaaatcggcgccggcatggccgaggtagtcggagaaatcggtgaggtcgcgccggtaggcgtcgagcgtgttgctgcctgcgccctgttccgcggccagcatgtcgaggaacagcgcggtcagtttggcgtcggaggacttggccgggatcttggccggggtcttggtgcccggcttggcggatgtcttggtgatcttggcggaagcggtcatgccaagactcatagcgcctatttcttgaggaacttatccggcgggatggtcaccgtcatttcgcgcggcttcggctgcacgaaattcgccagcgcgaagacgatgccgtagccgatcccgaaaatcacggcgacgaccgtcaggaagcggaacaggctgggcatggaggcgactcgggcggcgaattaaccaatgaaatcatccaacatgttccccgcgcggttgcaagagtcgctggtaacggtgtcgccgggggtagtataggttgctcgaattctgaacaattcgtcccaatatccgagctttttgatgtccgacgcagccgtcccagcgtccaccacccacccgaccctcgaggccgatatcacggccgcgctggggccgcggtcgatcgtgttggtcggcatgatgggggccggcaagtcgaccatcggccggcggatggcggcgcggctgaagctgccgttcaccgatgccgacaccgagatcgagacggcggcggacatgacgatcccggagatcttcgagacccatggcgagccgtatttccgcgacggcgaggcgcgggtgatcgcccgcatcctcgacagcggcccggtggtgctggccaccggcggcggcgcgttcatgcgcgaggagacccgcaaccggatccgcgaccgcgcgatctcgatctggctcaaggccgacagtgatatcatcatgcgccgggtccgccggcgcgccgatcggccgctgctgcagaacgccgaccccgaggcgaccgtgaaccgcctgctcagcgagcgcgagccggtctatcgccgcgccgacctgacgatcgcctcgcgcgacgtgccgcatgaccgtatcgtcgacgaatgcctcgcagccctgcatgcgcatctgtgcggcgtgcgtccggccagtgagccaccatctgatggaatgaacacgacctcatgactgcgcccttgaaacattccgcctccgttaccgtcgacgtcgcgctcggcgaccgtgcctatgacatcgtgatcggccgcgacgtgctggcctcgctcggcgaccgcgtcgcggcgctgcgccccggtgtgcggaccgccatcgtcaccgaccgcaccgtcgccaggcactggctggagcagaccgaggcgtcgctcgccgccgcgggcgtgccgacggcgcggatcgtcgtcgaggaaggcgagggctcgaagagctacgccaccctgacgcaggtcagcgaagcgctgatcgcggccaagatcgagcgcaacgatctggtgatcgcgctcggtggcggcgtggtcggcgatctcgccggcttcgcggcggcgatcctgcgccgcggcgtcgatttcgtgcaggtgccgacctcgctgctcgcgcaggtcgattcctcggtcggcggcaagaccggcatcaactcgccgcaaggcaagaacctgatcggcgccttccatcagccggtgctggtgattgcggacacctcggtgctcgacacgctgtcgccgcgccagttccgcgccggctacgccgaggtcgcgaaatacggcatcctgggcgacgaggccttcttcgcctggctcgagaagaaccatgccgacatcttcgccggcggcgccgggcgcgagcacgcgatcgcgacctcctgtcgcgccaaggccggcgtcgtctcccgcgacgagcgcgagaccggcgagcgtgcgctgctcaatctcggtcacactttcggtcacgcgctggaagccgcaaccggcttctccgaccgcctgttccacggcgagggcgtctcggtcggcatggtgctggccgcggagttctcggcgcagctcggcatgatctcgaccgacgatgccgcccggatcgcgcgtcatctttccgcggtaggattgccgacgcgcctgcaggatatcgcgggcttcacgcaggaagggctcgccgacgccgacgcgctgctggcgctgatggcgcaggacaagaaggtcaagcgcggcaagctcaccttcatcctgctcgaggcggtcggccgcgccgtgattgccaacaatgtcgagccgcagccggtgcgcgacttcctgcaagccaagctgaaggcttagatcgggatgcccctcctttggatcgtcatcccgctctatctttttgattcgagcatgatcttctcggagaaccgcgacacacttttccggatcatgctctagccacggatcaaatcagtgggatggttcaccttctcgatcgttctgctctgcctgctcatctccgccttcttctcggcgagtgagaccgcgctgaccggcgcctcgcgcgccagcatgttgcggctgtcgaagcagggcaacagcgaggccacggtggtctcgagcctgatggcgatgcgcgagcggatgatcggcgcgctgctgctcggcaacaatatcgccaatatcggcgcgtccgcgcttgccaccggcatcttcaccgcctggttcggcgatgtcggcgtgctctacgcgaccggcgtgatgacggtgctggtggtgatcttcgcggaagtgctgccgaagaccgtcgcgatcaatgcgccggaccgggtgtcgcttttggtggcccggccgatgcggttgacggtgttcgtgctcgggccgctgctgaccatcatcgaagggatcgtccgtgccctgatgaagctgctcggcatcaagatcggcgcgcatcaggccatcctgtcgccgaccgagcgcctgcgcggcgcggtcgatctgctgcatcacgagggcaaggtcgagaagcaggaccgcgacatgctcggcggactgttggacctcagcgagctgcaggtctccgacgtgatggtccatcgcaccgagatgaccatggtcaatgccgacctgccgccggaagaactggtgcgcgaggtgctcgccagcgaatatacccgcatcccgctgtggcgggagaagccggagaatatcgtcggcgtgctgcacgccaaggatctgctgcgcgcgatgcgcgccaatgaaggcgacatgtccgcgatcgatgcctccgcgatcgcgctgccgccctggttcgtgccggagatgcgcccggtctccgaacagttgaaggcgttccgccgccgcaagacccatttcgccctcgtggtcgacgagtatggcgaggtcgaaggcatggtcacgctggaggacatcctggaggagatcgtcggcgacatctccgacgagcatgacgtcgtcgtcgccggcgtgcgggcgcagccggacggctccgtggtggtcgacggttcggtgccgatccgcgacctcaaccgcgcgatggactggcgcctgccggacgaggaggcgaccacggtcgccggcctcgtgatccacgaggcgcgctcgatcccggagcgcggccagagcttcaccttccacggcttccgtttccgcgtgctccgccgcgagcgcaaccgcatcaccgcgctgcgcatcgtcgccgtgccgcgcgaggccgccgagctcgacgagaagaagccgaagcgggccggcacggcgttctaggcgtacggctggtgtcgatctatcaccgtcaccctgacagcttgtgaagctttcgggttttgccttttacgtctgtaggtcgggtgggtttggttttttgcgcagctgcggcc

SEQ ID NO: 58 - DNA, 25097 bp, Bradyrhizobium enterica
agcttgccgaactcgccggtcagcgccgttccgaccgtgccggcaagattgccgttgctggtcgcaaccaccgccgtgacgttgatcggcgtatccgcgcccgacacatcgttcgccatcacgctcgcgacgttgccggtcagcaccgtcaccgccggaccgccgtcctgcgccgtcgcggtgtccgggctcgccgtcggatgatcgtcgctgatcgacagcttcggccctagatcgacgcttgcagacgccttgccaccgtcactgtccacgaccgtctgcgtcagcgtcacagttccggccgccaagctgacgggtcccgcattattgtcgaccgcacggtcctcggtgaaagtcaccacacccgtcgccggattcactgaaatcgtgaaagccagcgcaccggtcgcgctaccgacgtgcccttcgatcgtcgtggcgttgacctgcaccagcacatcgttctggtgcgactgtgaatcgatcaggccggatagcgtgccgttggcaggaatggagagcgcgtagctcaccgagctaatgcccgtgctgcccgccttgtcggcgaagtcgacggcaaagttgcccgtcacatgcgtcagcgccaggttgtgtgtcgagccatcgacgccgttggtcgccgccgtcaggtttgcctcactcagcgtgagactggcgatcgaattgaccacgatcgtcggcgcaaccacggccggttgctgcagcacgaagggcccagtctgcggcggggtcacaaaattcggcagcggttccggcccagccaatacgttggtccccacgggatccagcgcatcaatcgtaaacgggctgaaattcgcgccgctcgcctgcgcgttgccgttcgagttgccgccattgtcggccgccggcagcacggaggagtcggtgccgatcggaaacagacctgcaaactcctgcaccgagacgtcgcgaccgggcgccatctcgatcgtgacgttcccatccgcgcgggagtcgaagaacggctcaaccgtgatggtcgactggttgtcgaacaggatgatcagcttgtcgccgacatgaaccagcgtgatcttctccttggcgatcgccgagaagtcgaccttcaccttctggtcgtagccaagattgatgacgaccgcctgatcggtcagcggcttcgtcagtgtgtaaattcgtacgggagctgaattggtggaattgccggtgccggtagcctgagcgacctgaaacgaaccctgcattatcaactccgcaaaatacgattaaaggaaaaattgtagaaaaattaagctttaggctattgttaaccctcccctcggtcaagaaatgtatttggttaatcaatgctttcgctgcgactgtagtaaagatcggacaggccgcagctgcaagaacaacggcttagcccgcgacttggtcgcaaggcagtatttgcccggctctgttcatcctgatcggcgatttggagcggtcgatgcgcgtgattgttcaggcgtgtgccgccgttttgatttgcatctgtttcggcgcggcggccgcgcaagctccacaacaaccggtcccctcggcaaccacggtcgaatgccaagtgccggcggctcgccaacctcgacaccaaaatcagcatttatctcaacgtgttacctgactgtacgtcggcgcctctgccaaccatccggctggtcgcgccacccgtccgtcgaacaggcgcgtcggcagcaagccacccacgcctgaacaccacctagaacggctcgccgtctgtcgtctcctgctccacatcgtgcaagacctggcgcggtccggtggccggctggccgagctgtgcccgatcctcgtggcaatcgctgatccggcgggcgaccacccgctccatcctcggcgcctggccgtggagttcgttgacctcggtatacgcctcgtcgctcagaaccgttatgacggtgctgaccggccccatgtagtcgcagcgattggagaagacgtatcggttactgatcttctccggcctcgacgaatggcagtctccgatcgagggcgacgagaaagtcgccttcatcgactgggtcgggtcgacacagcgcagcatctcacgctcgagcagcttctgccggacattcgtgggcgagacgagctccagcgtccgcacgaagcgccacatcccttttcggaaggttggcccgcggaagctctcatctgccacagcgcgatgggagccgagcacggacactgaaagcgcgatcgcggcgccaagcacgcaggcgaagaccttcgactgcccgaagccttcacgcgaagtcattcgttgaaccccgatcggctgtacgctgcgcatcgcgtgacttcacttgaaccacgcccaacctcacttcattccagaacaactcgcgttaaggtcgagtaaatgctcgcccttttggtcggggatcttcgcagccaaatgctcgaccagcgcgaggcaggcgatcacgagctagtgctgcagacgccctgtggctgatttatcggagttggcggcgccgccatcatcgcagtcgccgatcctcgtcgcgaccaccatatcggtccttggatgctcgccgatgctgacctcgttcagctcggtatacgcctcgtcgctgcgcacggtgatcacggtgctgaccgcgcccatgtagtcgcagcggtgcccgaaggtgtattgattgccgatcttctcaggcttgtcagagacgcagcttccgaccggttctggcgagaaggtggccttcatggcgaaggtcgggtcgacgcagcgcgtcgtttccgcattgaccacccggtacctgaaattcctgttcgcgctcttgacgacgtcgagcgtccggatgaagcgccacaagcccttgcgaaagctcgggccggagaacagctgttccgcttgcgcgggctgagccgccgccgtccggccatcgaccggttgcggagatggcgtctgcgcgacagccatcggcgacgacgcggggacgatcatcaaggtgaatagcgaacctacaatggcaccacggaagttcattcccacccccgacgttcgcagcaatccgttcgcgatgcgatacggcccggcgcgtgaagcagtcgctgcgaaaacgactgaaatacccctcaccacttgcaagccaattgtggccagcaaaggcacgttgtcgcagccggacagtctccagcgcaattccgttccactgcagcaaacttgcaacacccaacgcgcaatccccaagccatcgcgccctatccgccgctcgctccggctggagaggtttgaccttcgaggttttctttgctcatttagcccgagattttttgctcaattactttgcctatcgctgaacgagggggcgctgatgcgtattcggtttggctacatggttgcaggcattttggccttgggtgcaacgctgtcaggcaattcccggccggcagcggccgcggacctcggcctggtgacgaaagcaccggtcggcacctgcaccgagatcgtcttcacctgtgacaacggccatcattatccgctgtgcccgcgcgcagtgtcggtcgagggcgaagtggtcacggcctcgctgctcaccggccgcggcggcgtgcatgtgcggctcgttccgatgggcgtcggttatcgctatgccggccgcggcatctggctggacggcttccaggagaatgcgctgctcaatttcggcaagcaccgggtcgcctgcagcatcgcgcgctcgtaaggcgcacgcgctctgcgtcgcttcgattggcgtgacgcagagctcttcaagtcgcgaagtcgttcctcaccccttggtgtggagcacgacgcgcgacgatcgcgagtacatatacgccttcggatggacgtagaccgggcagtaatcctgccactggtagagttgccagttccacttccagcagccctgctcgatctgcggctcctgcacgtagtccagccggtatggcggatcaccaaacggatagtcgccgcatcgggccgccgtcgaagacaggacgacgattgaagcggccgcagcaatgatcacggaaaatgacttgctcataacgcccctcgatcgaacgacgtgacggcgcgagagtgccaaatccgccaatccttatcaaggtgccggctagactgtgccgcctagaccgcacggttctgcgtcggcgagcggccgccgccgtcggcgactaggaccgccccggtgacgaacgatgcctcgtcggaggcgaggaacaggcagcatgccgcgatctcggcgggctcggccattcgcccgagcgcgatccgccgttcgacactgcgaaactcggtctcggcggtggtgccgttctggtccgcgagcagttgcatttcataagcgctcatcggcgtccgcacccagccgggcgccacggcgttggcgcggatgccgtcggcgccgtgggcgtaggcaagcgagcgcgtgtaggctacgaccgccgccttgctggcagcgtagcttgcactatccggactggcgttgaacgcggccaccgaggcgatgttcacgatcgcgccgccgcgctggctgagcagcggcagggatgcgcggcagacgcgcatcgtgccggtaaggttgacatcgagcgtcctggcccagacctcgtcggagacgcttgcgggctgatccggcacgatcaggccggcggcgttgacgacgatgtcgagccaggcgccgcacgcagccacggctttggcaacatcgtccgcccgcgtgacatcaccgtcgaccgcctgcccgccgcactccgcggcggccgcctgaagctcggcgtcaccgaggccgaacagcacgacccgggcgccgctcaacgccagcagcgaagccgtggcgcggccgatcccggtggctgcgcccgtcaccagcgccgtctttccgtccagccgcggcatcagggcatgatccggaaaagtggaaaccggttctccgaaacgatcatgctcatctagattccccactgccgttcgacggcaaacccggtctccggcagcgtcgagccgccgtcaacgacgatggtctgtccggtgacgtatctggcctcggtcgaagcgaggtagagcatcgcgcaagcgatgtcgtccgcgctccccatgcgtcccatcggaatgaagcgctcgagtttggccttgttttccggtgcgctcatcgtgccgcggcccggcttctcgatgaagccggcttcgacgccattgaccgtgatgccgtcgcgggccagctcgaaagcggcaccgcggataaacgcgttgacgccggccttcgccgccgagtaatgggcgccgccgcccatcgtgacgcgcgccgataccgaggacgtaacgaggatgcgtccaaaaccgttggcgcgcatgtgcggaattgcggcctgggcgagccagatgccggcgctcaggttgagcctcagtgtctcgtcgagcttggcctcatcgagttcgtccagcgaggcccacggacagccgccggcattgtgcacgacgatatcgagccggccgtatctggcggcgatatcgtcgaccattgcacgcaggctgctgcgatcgagcctctcgaacggaacgcaatgcgccgtccgtccatcggccgccagcccgcgcgccagcgcctcggccacgtcagccgtgcggttggcgatcaccacggtcgcaccggcctgcgcgagccgcgtcacgatggcggcgccgatccccctgcccccgccggtgacgatggcgacccggccgtcaaggctgaacggacgtgactgcatcagatggctcccgctttgcgcagcaactcaatgaactgcgcgaacaccgcggtgtgcttgtcgacgtcccgcgccgacgttgccggacacatcagcagcatggtgtggaacggcgtcaccagaatgccttcgttcatgtagaacgcatgcagcagggtctcgagatctggctgccggccggcaatgacgtcggcgccgctgcgcggcggctgcggcatgaacatgatctcggcgcgcgcgccgatctgcgtgacatgccagggtagacctgccgcctcgatcagccggcgcgcttcctgcgcaagccaggtcgcggttccgatcatccgcgcgtaattcgccgatgtcagcaccttctcaagcaccgcacgcatggtggcgaccgtcaacgcgttgccggcgagcgtgccgccgaagccgagatgcgcagactggcgctggcgcggattgacgtggggcacgagcttccaaagccgctcggcgatttgctggctgaggccgaacacgccggcggggatgccgcccgcgatcgccttgccggcgacgaagatgtcgggctcgagcccgtggctcgccgtgtaaccgcccggtccgcaggacagcgtgtgggtctcgtcgatgatgaggacagtgccagcgcgccaggtcaggtcgcgcaacgtctcgtgaaaaccaggatcgaccgggatcatgccgaaattcgtcatcagcggctcggtcagcacgcaggcgacgtcgccctgcgccagtgccgcctcgagtgccgcgacgtcgttgaactcgaccacccggctcacggcgtcatgatcgatgccgttgggatggatcatattgcgcaggccgacccgaccatcgcggatctcgacatgtgcctcctcgacgccgccatgatagcagccggagaacaccagcaccttgcgccggccggtaatcatgcgcgagaggcggatcgccgcgcggttggcatcggtcgccgacgtcgtcagggtccagtatttcggaccgaagcggcgcgacagctcggcgccgacccagagactatcctcggtcggcagcatcatggtcgcgccacgcttgagctgcgcgagcgcggcttccgtcactgcctccggcgcgtgcccgcacatgccgccggtgtcgccgaggcagaaatcgatgtagtcgcggccgtcgatatccctgatatgcgcgccctgcgcctccgcggcatagaccgggaagccgccggcccagcgccgcatccagtgcgacggaccgccatagaggtaatgctgacggccttcctgccatgccgctgccgatcgcgggtgcagcgtgcgaaagcgttcctgctcggcatcgagcaatcggttcagaacgccggcgcgttcggcagccagagatgtcatagcgcgatccaggcggtcttgaggtcggtataggcgtcgagcgcgtgcagcgacttgtcgcgtccgaagccggattgcttgaagccgccgagcggcaccgtgatgtcagcgccgccataggcgttgacgtgaacgacgcccgccctcaccgcgcgcaccatgcgatgcgcggtcgacagagcgcccgtccacaccgccgatgcaagcccgtagggcgtcgcattggccaacgcgacagcatcttcctcgccgtcgaaccgcgtgaccgacagcaccggcccgaatacttcctcgcgccacacctccatcgccggcgtcacttcggcgaagatcgcaggcgccatgaaattgccgccgctgtcgacgcggatctgctcgccgccgatcagccgcttcgcgccctgcgcttcggcgcgggcgacggcgtcgagattcttgcgtagctgcgccttgctcgcgacggcgccgatatcggaggtcagatcgaggggatcaccgacgcggagcccggcggtggcgtcgagcagctcggccatgaagcggtcatagatcgcagactgcaccagcagccgcgagccggccacgcagacctgacccgagttgcggaagatgccgttggccgagaccttggccgcatgcctgatatcaggcacgtcggcgaagacgatattgggcgacttgccgccgagctcgaggtgaacgcgcttcaggttcgaccgcgccgaacattccagcagacgccggccgaccgcacccgagccggtgaacgccaacgcatcgacatccatatgcagcgccagcgcctcgccagccgatgcgccgcgaccggtgacgacgttgagcacgccgtccggcaagcccgcctccgccgccagctcggcgagccgcagcagcgtcagcgaggcgagctccggcggcttgaccacgaccgaatttccggcggcaagcgcggggccgatcttccacgccccgatcatcagcgggaaattccatggcacgatcacgccgaccacgccgagcggctcgcgatgcacgaggccaagcacgtcacctgaggtcggtgcgatctcgccatacaccttgtcgatcgcctcggcgtagtaacggatgctgccggccgccgacagcggctcggccttgtaggccatgccgatctcggtgccgttgtcgcgcaccccgagcaccgcgatctcgagcgcgtgctgctcgatcagctcggcgaaccgcagcagcaccttcttgcgctgcgcgggcgccgcgcgcgaccagcttccttgttcgaacaccagccgcgcctgcttcaccgcgcggtcgatatcggcggcgttgccgtcgacgatcgtggtcagcacttcgccatcgatcggcgacacgacgtcgagccgctgctcgctgagcgccggctctggtcggccgccgacaaagagttgctggaccggaatggcggccgacctcaatcgatcgatctgggcttgctgcatgcggctcgttgtgtgctggcggagcagccccctcggtgggcctgcttacatggtgcaatcctcgccaaatcaaggctttgccagcaatcaaccgataggtggatgtcgccgccgggcccatccccatagcgtgatcccacgatggccgagcgctccgcctgcgctatgcaaaccggttgtcaccatccctacgccagccggcgagccgaaggtcatgtccgagatcacgcagccccgcatccttctgatcggtactggagacaccaaggccgacgaattgctgttcatgagcgagtgcatcgcgcgcgccggcggcagaacgatcatgatggacatcagcgtgctcggcgatccgccgtaccagcccgcacatgacaagcacgcggtggcggccgccgccgagaccacgatcgctgcgatcgcatcgagcggcgacgaaaactccgcgatgtcgctgatggcgactggcgccgcaaatctcgcacgcgagctcgcggcgcgcgacgccatcgacggcgtgatcgcgatcggcggcacgatgggcaccgaccttgcgctcgacgtcgcgcaggcgctgccgctcggcctgccgaagctgatcgtctcgacggtcgcattttcgcacctgatcccgcccgagcgcatcgccgccgatctgatgatgatcctgtgggccggcgggctctacggcctcaacggcacctgcacagcggtgctgtcgcaggcctgcggcgccatcgtcggcgcagcgaagagcgcgatcaagccgcgcaaggatcggccgctggtcgcgatcacctcgctcggcaagagctgcctgcgctacatggtggagctgaagccgcagctcgaacagcgcggctacgaggtcgtcgtcttccacaccaccggcatgggcggccgcgcgatggagtcgatcgcagctcaaggcggcttcgccgcggtgctggatctcagtctgcaggaagtcgccaatcagctgacgggctcggtggtcaattccggtgcagaccggctggagaatgcaggcaaagcgggtattccgcagatcgtcgctcccggcgcgatcgacatggtggatttcccggcatggcttggggtcccgagcgaattgtcggatcgtccgttccacgcgcataaccggctgctcgcgtctgcgacctcgggcgccgacgatcgccgccggatcgcgggcgcgatcgccgacaaactgtcccgcgccagcgcgccggtcgccttcgtgctgccggccggcggcatccagcaatgggaccgtgagggcgaggccctgcacgaccccgacgccctcgccgcctttgtcgacgccatgcggtcggcggtccggccaccggtcgagctgcacgagatcaaggaccacatcaacagcacggcattcaacgaaacggtgcttgcgatcttcgatcgatgggtcgcggccggcatcgtcccggcgggccgcgcgacggtggccgcatgacacggccgcttgcccaggcactggtgctcgacttcgggggcgtcatctccaagaccctgttcgagacccacgacctgaccgagcgcgcactcgggctcgcaccatgcacgctgaaatggctcggcccgttcgcgcccgacagcgatccgctctggacgtcgatgcagcgcggcgagatttccgagcgcgactactggctgacccgcagccgcgaggtcgggcggatggtcggagaagactggcacgacatggaaaccttcgtgaaacgcgcacgcggcgccgatcccgaaaccgtgatccgccccgaggcggcgcgcgcgatcaatctcgccgccgacgccgggttacggctcgccatcctctccaacgaactcgacctgttctacggtgccgatttccgcacccggctttccattttggagcgcttcgatgccatcgtcgacgcgacccataccgggatcctgaaaccggaccctcgcgcctaccaaaccgtgctggacgaactggccctggaggcagacaattgcgtcttcgtcgacgaccagcgccgcaacatcgcgggcgccgcggcctgcaacatgcgcacggtgctgttcgacgtacgcaacccggctgcgtcctacagcgaggcgctgcggcatttcgggctgcaattcgagtaacagagaacgatcatgcgcgacagaaacttcctggttgagaacaacgccaagccgatctggcacccgatggcccaccccgccgagatgcgggcgcagccgccacggatcgtgatgaagggcgaaggcgtccacgtcaccgacatcgacggcaagaccgtgatcgatgccgtcggtggcctgtggaacgtcaacctcggctacagctgcgatccgatcaagcaggcaatcaccgaacagctcggcgcgctgccgtactattcgggattccgcggcacctccagcggtccctcgatcgagctcgcctacgagctcaccgaatggttcaagccggaaggcatggtacgcgccttcttcacctcgggcggatctgactcggtcgagactgcgctgcggctttcccggcaatactggaagatcaagggccaggccgaccgcaccaaattcctggcgctgaagaagggctatcacggcacccatttcggcggcgcatccgtcaacggcaacgccaacttccgccgcaactatgagccgatgctgcccggcgtgttccacatcccggcgccgtcgacctatcgcaatcccttcaacgaaaccgaccccgcaaagctcgcgcagctctgcgcggcggcgatggaggaggagatcgcgttccagggcgccgacaccatcgcggccttcatcatggagccggtgctgggagccggcggcgtgatcgtgccaccggacagtttcatgaagctcgtgcgcgagatctgtgaccgtcacggcatcctgatgatcgcggacgaggtcgtcaccggttttggacgcaccggcgcgtggtccggctcgcggctgtggggcgtgaagcccgacatgatgacgatggccaaggcgatcacctcgggctacttcccgctcggcgcgacgctgatcggcgaagccgttgcggatgccttcgaggccgacacgacgacattcggctcgatcggccatggctatacctattcgggccatccggtcggctgcgctgcaggcattgcggcgctcgccgagacccgccgcctcaagctcgacgagaatgccgccgcgcgcggtaaggatcttgcgcaggcgctggccgcgctcaaggccaagcacgctctggtcggcgacgtcaggggcaagggtctgatggccgcgctcgagctggtcgccgatcgcgacagcaagaagccggccgacaagaaaaccatggcgaaggtcgcgggtgccgcctacgaagccggcgtgatgctgcgtgtctccggcaacaacctcatcctgtcccctcccctcatcctcacctcactggacgtcaaggcgatcgctgacgggatcgacgccggcctctcagcggccggctgacagcgcgctgacgcaggccatggcgcgctcgaacggcgtgccgtcggctttgtcgcggtcgaggcagtcggcgagcgatgccgccgacatcctttgatcggtgcagaagatccgcatgaagtcggcagcgagcgcgaccttgcgcggcgtggattgccgctcccagtcgccgctgctcagatagagcaaggacgcatcatcagcgccgctttcggccaccgcactgcgcacggccgactgggcggccagcaacgccagcagcgcgccggccatcgcgcccaggcgatgcgcgtggcctctcatttgctctccctggcgttcacaatcggcggcacgtcgagcgcgggattgcgatcgaagaagttgaacgggcgcagccggaagccatgccagaggccgggcatgacaggccaatcctcggcacgcggcacgtgacggaagccgaccgtgtaccacagcacgaggtcgcgatcctcgatcggcctctttgccgaggtccatttcggcagtccatcgacgtcggggttctcgttcggatacatgccggcggcgtagcgctcgtccctggcgtaggccgaggtccatagcgtgtaggcgctgaagccggcgcgcaactggatcggatcgtccttggcgagcagcgagacgtcggaatggccgggcatcagctgatagctggtgcggtagccctgtttgttagtcttgcccgtgctctcgatcctgaattgcgcggcgctcagcggcgtcgtgaccggcccttcggtcgcgaccggtttggtgtcgacctgccacaggctcttgcgttggccctcgtcgagccggcggacgctgaagcgatcctcgaccagtcggttcgcggtaccgtcgacgtccatgtcgatccggaacgtcatgtagtgatcgtgattgaccgccagcaatcgctcgtccaccagcgttccgtaggcggtatcctgcgcggccgtcggatcgctcagagtcttgctcgccacgcccttggtcgcgtcgatgccgtaggcgccgagccggacatcgatattgccggcacggtcgaacacgtagtcaaccaggtagtcgtagttgccgaccaccggcgccatccgcaccaccagctcgttgttcggccgcacctcggcggtgttgttgagcagctcgctgtggcgccagatcggatcgccggtcgggcgttcgaagatgcagaccgcgcccttggagacgacaggcgcgcccttggtgtccgatattgtcagatcaagatagtgtgcgccctcgggacaatccacgccgcgctgcaattcactggagagcacgccaaagccgtattcgccgatgtccatataggcgcgaaacgaccaggtcggtgccggatccatatagggcacgaacatctcgctcgcggagatctgataggcgatgtcgcgcaacgagccgtggtcgtcatagcggatcagcgacagcaccgcgccgacacgcggctcaagacggacatggaacgaccaattgtcccagtggacctggccgccctccaccttcacgttgctgccctcgggcgccatgatctcgatcggcttcggcggcttgcggtattttccggagtcggcgtaggcgtgcgatggcgtcagcggcggcggcgccaccacgccaagatcggtcaccgacagcacggtcctgctcttgagatcgacctgggcgaccaggttctcgatcggcttgccccagagattgttgccggcgcccgtggtgtcgacgcagggcacgttgagcaggcggcggcccttcagggccgggtcgctcaccggcccgaccgtcagcggcaggcacagcacattcttgaagtcggtgatgccgcgcttggccatcgcggcgatccagcgcgggtcctgcttcggcagatcgcctgcggacatcaactcgtcgatggtcagcgctgcctcatgatcgctgacctcatcccagccgaccaggctgcgcccggcgaggtcgatatgcgcctcgtagaggtgcccgctgctcagcagggtcgcgtgcgcccggcgtgcgaagggctgtccgggcttccacgcccgtacctcgtccttgggatcctcttcgaccgtcatcgagacgacgcgcgccgcatcgtcgagcctgccggcgccgcggaggatttcggagaccgatcggatttcgtccgtcgtcagcccatccatcgggtgtgtcgcggcggcctgcggccacatcctgcgctcggcctttgccggcgtcaccagtgtcgccgcaaccaggcctgccaatgcccatccgccacgccggaatatcagagccatcacgccctccactcaaagccagaacgaccagaatacaagcaatggtgacggcgtgaaggcctgcctcatccggtaacccgttccgacacgaccggcgggatggtcgctctggccgggcgcggcgcggcgcgatggacatcgagcagccgcacgccgaggcggtcgcgcagcgccggccagatgccgcgcggcgccacgatcatcacgacgactgcaatgatgccgaggccgaccagataccagccgccggacaggccaagcggcccggtcatcaactcgcgcaaaccgaagaaaatgatgacgccgagaatcgggccttcgagcgtgccgataccgccgatgatcacgatgaacatcatatagaccgaccagttgacgtcgaacgccgccagcggcgcgatgaacagattgcccatgaagctgagcgcaccggccagcccgcatccggccgccgacagcacgaaggcgatgaagcggttgtggcggacgtcgacgccgacgctcatcgcggcaagatcgttgtcgcgaacgctcatcagcccgagcccgaagctcgaggtcatcatcttgtagagcgccgcgatggtgaccagcgtcaggccgccggcgagccagaacatcgtcggctcgaaccagtcgaaatcgatcagcttgctggtggcgagcggcacgccggaggtgccgccgaccgcctgcgacttcatggtgaacgcgccgatgatctcggcgaacacccacatcgcgatcgagaaataggcgtcgcgcagccggaacagcggaaaggcgatgatcgcggcgacggccgcggccaccagcggcgccaccggcagcacccagatcggggtcacctcgagccagcccgaggtcaggaacagcgcataggcaccgaaggcgatgaacacctggtggccgagcgagaccagcccggcatagcccgccagcaggttccacatctgcgccatggtcagcagcagcaggcactcggtcgcgagccgcaggaagccctcgttcagcacgaagggcgcaccggcaatgagtgcgacgagcactacggtagaggtcaggagaagtgtccgtgtcggcatcggcatcacaccctgctcgacacgagacccgacgggcggatcagcagcatgatgaagaacagcaggtgcgcgtagagcagcccggcattcggatcgatcttcagcccgatcagctgcgccatgccgagtgcgatgccgccgagcagcgcgccccagaacgagccgagcccgccgagcaccacgacctcgaaggcgatcaagagccgctcggcgcccgagaacggcgtgaagctcgagcgcaccgcgagcaagacgccgccgatcgcgccgagtgcgagcgacaggcccatgacgtagttatagacccggtccggcttgaccccggacagccggacgatgtcgcggcggtcggcggtggcgcgcacgatgcggccgaactcggtgtggcgcagcaccagttgcaacgccatgaacaacaacgccgcaagcaccagggtcagcagcggcatgatgccgatgttgaggccggcgatttcgaggctggcgcgcgagagctcgccgacctgcaggctgcgcacgtcggcgccgaagacctcgaccatcacgttgcgcaggatcaccgagacgccaaaggtcagcagcagcggcgacagcggatcgggcgatgtcacgacccggttgacgatggcggcctggtacagccatccgactgcaaaggacagcgcgatcaccgggatcagcatcagcagcggcgacacctgcggaaacaggttggacagcagcacggcgcagaacgcgctcagcaccatgaattcgccatgcgcgatgttgacgacgcgcatcacgccgaacaccagcgcgagcccgatgccgagcagcgcgtagagcccgcccagcagggccccgttgatcaatgtctcaacccagatcatgttggttgccaaccttggctagtttcctggctagtttccgaaataggcgtgcgtcagctgctccggctgcaacccctgcgccgggccagtcaacgacacccgccccttcaacaggcaatagatccgctcggaggtcgcgagcgcgcgcttgacgtcctgctcgaccagcacgaccgcggtgccctcgcggcggatgtcggcgaacgagcgatagatctgctcgaccacgacgggagcaagcccgagagatatctcgtcgcacagcaagagccgcggattcgacatcagcgcgcgaccgatcgccgccatctgctgctggccgccggagagctgacccggaaacatccgccgccgctcttccaggatcgggaacaggtcgaacacccgccgcagggtccagctgcccttgcgacggttgacgctgcccatcagcaggttctcctcgatggtcagcgagtcgaacagcaggcggccctcgggcaccatgatgagcccgagccgcgacacctgctcggccggcacctgcgagatgtcgataccgtcgaaatgcacggccccgcgccgctcctcgttgagcccgaccagtgccttcaagaaggttgacttgccggcgccgttggcgccgaccagcgccaccgcctcgccgtcggcgacggtgaagttcatgtcgaacacggcctggagatcgccgtagaatatctcgaggccgttcacatcaagcaacgccatcggccttcaatcccatgtagatctcgcgtaccacggcgctgtccatcacctccgccggcggcccctcgagcaccttgcggccgaaatcgagcaccaagatacgatccgacaccgcgcgcagcgcatgcggaatgtgttcgatccagatcatggcgtgatcggccttgaccgacttaatgatggcaacgagtcgctcgacctcgggctcggtgagaccggcggcgatctcgtcgagcagaatcagcttcggcttcgaggccagcgccttggcgaattccagccgcttgcggtcgatcagcggcaaggcgccggcgagcttgtcggccttggcgtcgagcccggtccgctgcagcacttccatggtccagctcgatgccgcctcgccgtacaggccggcgccgtaggatgcggcgaccagcgcgttctcatagaccgacagatgcggaaacggctgcgggatctggaacgcgcgcccgagccccattcgtgccctttggtgcggcggcagccctgtgatctccttgtcatccagcatgatcgaaccgccgtcggccgtgagcaggccgacgaccaggttgagcagcgagctcttgccggcgccgttcgggccgatcacgccaaggcattcgccgcgcgccagctcgaagctgacggcgtcggcgaccacgatctcgccgaagcgcttcgacagcccgctgacgcgcagaagcggtgccatctcaggccagcttggagagcagctggagatcggcctgcttcgggatgaacggcgcggtgccgttgtgcacgatcaggagctcgtatttcgactttccgcccttggtcttgcgccattgcccgcccgacagcgaggtcaccgcgacattcttgatcgggctgtccttgaacttgacccgaccgaccacggtctccatgtcgaggccggcgatcgcatcgcgcagcgagttcttgtccttcggatcgctgttctgcagcgccgcgaggccgacctcccacagcgcgtgggcatagccgatcggctgggtccactgcttgccggtggtcttctcccactcggcagcgagttcggcagcgctctggccggtcagcgacgacttgaacggataggccggcgtccaccacacctcggtcgacatgccgtcgccgcgatcgccgagcgcgttcaccgcggccgggaacaggaaggccgccgccaccgtgcagatctgcggcttgaagccggcctgcgcggcctggttccacagcgtcacccagtgattgctgaaggtgaagccggagacgatgtcgacgccgttgttcttgaacagcgcaatctggttggtgaaatcgtcggtcgcgatctggaatttgccggccgagaattcctgatagccggcccccgagatgccggccggcagcccgagcttcggatcggagaatgcctggcccggcggattgtcgatgtagagcgtgccgaccttcttgttggtctcgaccgactgccacatgccgaggaagttcctggcgacgtcgtcggctccccagaagaagtgatagctgtagggaaagcccttgtccggcgtcgacttgcgcgggaacatccagccctgccacggcacctgggtcgagatcgtcggaatgccgcgcgcgtcggcgagctcctgcaccggcggctgggcgtcgccgtcctcgatcaggatcaagtcgcacttttcacgcagcaccaattcactcgcgatcaccgacgagcggttcggatcggattgattgtccttgaacaccagctcgacctgataggtcttgccgccgatcttcaggccgtccttcagccgcgccttgatgcgctcgtggatccagggatcgggttcggcgaactgcgcgcggacgcccgagaggcacccgacccagccgatcttgagggtgttgccggcggcccgcgcgatgttcaccagcggcacgttcatcgccgacgccagtccggtggcgccggccgccttcagcagcgtgcgccggtcgagccggccggacgctgtcgtctttgaattctcggtcatgtccctctcccctgaaacaattgtctgaactacgtctcgtctcaagccgcagatcgttgaatcgccgcacggctcaccgcggcaaacttgcacaaggtgttctcgatgatctggcgcgggatgccgcgcacgatgaagacaagccgcgagcgccggtcggctgaaggccagccggcaagcgtgatcggcggatggaacacatgctgcacgccatgcaccaccatgggcgcatccggctgctcggcgacatgcacgagcgccttgaagcgtagcaggtcctcacccttgagcgccgcgacataatcgagccagcgcgcgaatgcctcgcgcccgatcggctcgtcgatgatcaggctgtaggacgacacgccggcatcgtgcgcgtgatggctgtgatggccgcaatctgccccatggcaatcgtgatcggcgcgatgatgcggttcgttcgccgcctgcgctgccagatcgaaccagcgcaccacgtcgccggaccgggccgacggatcgaacagcccggcgtcgaggaccttcgccggatcgaccattccattgcggatctggtggcgcgcggcgaccggattgatcgccgcgagttgcgcgtcgagccgcgccaaagcgtcatcggcggcaagatcgatcttggtcaccagcaaccggtcggcgaccgcaacctgcctgatcgcctcgccatgcgcggcaagggtgtgtacgccgttgacggcatcgacggtcgcgaccacgccgtcgatccggtagcgactgagaatatcgggcgcggtcatcagcgtgtgcagcaccggcacgggatcggcgagcccggtggtctcgaccagcacgcggtgaaacggcgggatcgtaccggcagcgcggcgcgcggcgagatcggccaacgtctcgatcagatcctcgcgcactgaacagcagatgcagccattgtcgagcagcgccagcctgtcctcgctgctctcgaccagcaggtgatccagcgccacctcgccgaactcgttgatgatggcgacgacgccattgagttccttctggcgcagcagatggttcagcaccgtggtcttgccgctgccgaggaagccggtcagcaccgtgaccgggatatgatccgatgctgtcatcactcgccccgttcgtagaccctgcggccttcgaagaaggtcatctcgacccgcgtgtcggcgagctgatccggcgggacgtcgaagatcatctggtcgagcacgatcaggtcggccgacttgccgacctcgatcgagccgatcgactggccaaggccggccgcgcgcgcggcatcgatggtgtagatgtcgatcacggtcttgagatcgagcgcctgctccgcccacagcgacttgccgggaaagtccccggtcgggttttgccgtgtcaccatgccctcgatgccttgccagggatcggggatcgggatgacaggccagtccgagccgccggccatcagcgcgccggcctccttcaaatccttgttcggccagaagcgctgcgcccgctcctcgcccatcgcggccttgtgcgcctcaaggaagatggtcggataccagatgatcggtgacaggtcggcggcaacgccgagctcggcgaagcgcctgatgtcgtcaggcgcgatgtagctcgcatgagcgatctggtgaatcaggttggtcgggccgttgaagctgcgcacgacatcgatggcatcgagcgcctgcgtcaccgcggcatctccagcgcaatggatcttggcggcaaggccgagcttctcgcatcgcccgagccagcggatcaggtccggcacggtcagcatcgtcgcgccgcggaaacagcagccacgcacgggatcggccagatagggctcatggaaggcggcagtcttggcacccggcacgccgtcgaggaacaccttgacgtagtccggcttcacatgcgcgccgcgatagtcttcgcgcagcgcaaacagctcctcgccggccttgccgaacatgaagcccggctcaaccaccggcatcgcgcagaccgcccaggcggtgagctcgccccgatcgtcgaggcccttcagcgccgccatgatcggctgcatgctggcggcgtcgatgaaagcggtgacaccgtaagagttcagcaccgagatcgagcgcgccaccgcggcgcggtccatctccggcgtgtagtgaccggacgccgccagcgcccgctcgaccaggcccgaggcggcctcgatcatgatcccggtcagcgtcccggtcttgaggtcgcggccgatctcgccgtcggtcggatcgtcggtatcggcctgcacgccggcaagccgcagcgccgccgagctcgcccagcgattgtgataggtgtcgtcgcgcaacacgacgggatggccgaggcatgccgcgtcgagcagcgcgcaggattccgcggtgttcatctcgttcagcagattgttgccgaactggccgccgacgatccaggcgccgggcgcagcagccgaggccgccttatgcagggtctcggcgatcctcggcacgctgtcggcgttggagaagcgcagctcgtagagatcggcctgcccgcccatcatgatgtgattgtggatgtcgacgattcccggcatcgccatccgcccgccgagatcgacggttgcggtcccctcgccgatcagcgatgcgacgtcgcgctcctcgccgaccgcgatgaaccggccggccttgaccgccgcgcaggccacccaaggctgccctcggttcgacgtgtagatccgaccgttgcggaagaccgtgtcggcgaatgtcctggtcatgcggatcaacttctcgattgggaaagcctggagcgctcactgtgcggtgcacagcggccgaaccgcgcacgacaccagcgtgacgccaaccgttcggcatgtcggcatttggaacaatccaccgtccggtggatgctcgccgcctcccgcaatgcggggaagcggcggcgctctagaatcccagcgccagaccgtccttgcgatggtctgaggcgccgagcaggacaccgcgcgcatggtcgatgcggatcgcctggcagccgccgatcggctcctcggagaatcgcgcatcgtggccacgggcgcgcagctcgtcgcggatatcgggtgatatcgtggtctccaacgacagcgcgccgtcgaaggcaaaggagcgcggcgcctcggccgccgcctggatgtccatcttcaggtcgaagacgttcgacagcagattggcatggcccgcggcctggtagtgcccgcccatcaccccgaacgacatcacggtcttgccgtccttgcgtaccaggccggggatgatcgtgtgcatcggacgcttgcggggtccgagtgaattgaggtgcccgggcctcgcgcggaagctccagccgcggttgtgcagcaggatacccgatttcggcgcgtagatgccgctgccgaacggatagaacagcgagttgatcagcgagacggcgttgaggtcgcgatcgaccaccgtgacatagacggtgtcgcggtgctcgatatcgtcccaggtcgcgggcgcggacgcacggctcatgtcgatcttgctgcggatcaggccgatatggtcctcggcgaggaatgcagccggatcgaccttgctggtgccgggatcgcaaaagaaggcgtcgcgcgcgcggtaggccgccttggtcgcttcggcgagcagatgaatgcgatcgacttgcgcgagggcgccgacatcgaagcctgcgagcgtgcgcaggatcatcagcgcggcgaggccctgcccgttcggcggacactcgacgacgtcatggtcatggtagcgcgccgagatcggctgcacataatccgaggcgtgcgccgcgaaatcgtcgccgtggtgggcgccgccgaggccacgcaagatattcaccatctcgtcggcggcctcgcccgcgtagaacgcgtcgcggccgtgctgcgcgatccggcgcagggtccggccgagcgcaggttgcgtacggatgtcgccaacctcaggcaccttgccgccgggaaggaactgggccgccgcgttgccgtcgatctcgatccgcgcccggaagcggcgccaatcctcggcaacgcgcggcgtgacgcagaagccctgctcggcagccgcgatcgccggccggaagatctcctccagcggcttgctgccgtgatcggcgaccagccggcaccatgcatcgatcgcgccgggcacggtcacagcctcgggcgcggtcggcggaatgtcgcgggcgccgcttccggaatattttccggcgtcggtgccggcaggtgtgcggccggaaccgttgagcgcgatcggcgcgccggccttcggcgaatagagtgcgaagcagtcgccgccgatcccggtcatctgcggctcgaccacgccctgcaccgcgaccgccgccaccgcggcatcgacggcattgccgccggccttcagcatctcgaccgcggcaagcgttgcctgcggatgcgaggtcgcggccatgccgcgctccgcaaccgccaccgaacggccgatggccatgaaatcacgcatgtcgcttcctctgatgttgcgagcggcagccgctcgccaacattgtcgaaaacgacaccggtcctacggagaaatttcgtctcgggcgtgccgtagcggcaatccacctaacggtggatcgggtggaggcgactcgatcggcacccgtaacggagttgtaggacgggcaccccatcctacaggcgccgcaccgtcaataattcctattttgactcacagatcggcaacacactcgccgtcgtcccggcgcaggccgggacccatacgccgcagcaggtgttgtgaacgggactcgtcagtccagcaacgcgcctcaatcagcaacggtggcaatgggtcccctgagttcacaaacgaagtgcaacacttccaactggaggtgttgccatggggcggacttacaagcagctctccctggaggagcgatgcgagattgccaggctttcggccggtggcagctcgatccggcaaatcgcggcagctttggatcgcccgccatcaacgatctctcgggagctgaaccgtaattctggcgttcaggtcggctacaagcccagctatgcccagcaacagatgcgagcgcggcgctggacgggctctcgcctcgaacgggaggccggcctgcgccgtgcggtgttggaacgtcttggccggggctggtcgcccgagcaggtcgccggccggctggctcgcgagcacggccgcaaggtgatctcctatgagagcatctaccgcttcatttatgcccagctcacccgcacctcggacttcagctggcggcgctacctgccgcgcggcaagagcaagcgcggtcgccgcggcaagcggggcggcagtcccgcaagcttcatcgaaggccgtgtttcgctggatctgcgccccgtcgaggtcgccgatcgcaagaccccgggccattgggaggccgacctcatgatgttctccaaatacggtcagcagatcctggccgtgcatgagcgcacctcccgcctgttgctcggcgtccccctcgcaagcaagctcgcctccggcgtcgctcaccatctcgtacgcctgttcgaggtcctgccacagccgatccgccagaccgtcaccttcgacaacggcaccgagttcgcatctcaccttgccttgcaaagcctcttgatcaagacgtacttctgcgatccccacgccccctggcaaaaagggggcatcgagaacgccatcggccgcatgcgccgcttcatcccgcgcaacaccgacctcgaaaagctgccaacccgccgcctgcgcaagtccatcgccgcctacaacaacaccccgcgcaaatgccttgacttcaggaccccggcagaggtctttgctgctcaagtgttgcacttcgagtgtgaatccacctcc

SEQ ID NO: 59 - DNA, 24674 bp, Bradyrhizobium enterica
tgcggattccgacgaagtcgcccgggtgtaccgatatgaagtcgcccggggattccgagacgatgtcgcccacctctccgatttgatctcgcccgggggcgaggcgttctagctgctgaggttctctggcattgggcaagccgcacggtcaactggaatcgcggcttgagcttgttgtgtttctgttgcgtttgctgtgggcatgtgggcaacgccttggcgttgtccaagcgcagcggcatgtccacagcgtcacgggctcaggtctttcgggcggattgccgggttcggcgcaggctctcgccagtaaggtcgagccgatgggcattgtggacgaggcgatcgagcacggcgtcggcataggtaggatctccaatgagcacatgccactggtccacggggagctggctggtgacgatggtggaacgatgaccatagcgatcttcgaggatttccaggaggtcgtgacgggcaccagcgtcgagcggctcgagcccccagtcatcgaggatcagcagatcgacacggccgagcccgcgcaataggcgcggatggcgaccgtcgccgcgcgcgagagcgaggtcatcgaacagccgcggaacacgttgatagagcacggagcgattgtcacggcaggccttgtggccgagcgccgaggcgagccagctcttgccgacgccggccgggccgcagatcagcaggttggcatggtcatcgatccagcggccctcgacaagcttggcgaacagcgggcggtcgaggccgcgcggggtgcggtagtcgatgtcctcgacgcacgcttgctgacgcagcttcgcatagcgcaggcgggtggcgagccgcttatcgtggcgcagtgatgcttcacgttcgagcagcagcgcgagccattcggcgtgaccgaggcttgcggcctcgccggttgcttcgatatcgacgaaggcattggccatgccgtggaggccgagggcgttgaggcggtcgagggtcggatgggtgagcaagggatggtctcctagttgtagtagcgcggtccgcggatgttggcatgcaggatcggcgcatcgtccgcggagcgctgatgagcgggacgccgatcgagattgttggcgaggatcgatttgaccgagccgtaggtgcgcgcgccgatgtcgatcgcccgcgcagccgcggcgtccagccgtccgcgcccataggagccggcgagcctgaggatgccgaggcaggcgcggaagccttgctcggggtgcgagcgctcgtcgagaatgaggtcgcacaaagcgctggtcgccggcccgatcgcggcagcgtcctgtcggatgcgcgcgatggtccagccggcgtagcgccgatggctggaggccatgtgctccggcacggtggtgtgtttgtgattaccgctcatgcgctgatgcgcggcgatccgctcgcccttgtggaagatctctacggtgcgggcagtgaaccgcacctcgacctcggcgcgcacaaagcgatgcgggacgctgtagtaatgcttctccacctcgacgtggtaatcgaggctgacgcggcggatccgccattcggcgagtacgtaggggctcgccggcaatggcttgagcgccggccgatcgacctcctcaagcagccggcggcgcgtcacgccgagccgccggatcggccgctcctcgttgagcctggtgagcagctcgccgatcgccgcattgacctcggccaggctgtagaaggtgcgatgacgcaggcggccgagcagccagcgctcgacgatcaggacggcttgctcgaccttggccttgtcgcgcggcttgcgcggccgggccggcaatatggcggtgccgtaatgcgccgccatctccgcataggtccgattgatctgcgggtcgtacaggctcgccttgatgaccgcgaccttggtgttgtcaggcaccagcagcgccggtatgccgccgatcgccgcgaaggcgccaacatgagcgctgatccagtcggcgagcccctgcgtccacgtcgcctgcgcgtaggtaaagctcgaggcgccgagcacggcgacgaagatctgcgccattctgcgctcaccggtgagacgatcgaccaccaccggcacgccgtcgccggcatagtcgacgaacagcttgtcgccggctgcgtgcgcctggcgcatcgtcaccgacaggcggccctcccaggcgcggtaaagctcacagaagcgcgagtaccggtatccgtcgggttcggcggcgatgtactcctcccacaggatcgacagcgtcacgtgcttgcgcttgagctcgcggtgcacggtcgtccaatcaggttcggcgatgcggcggtgaccctgccggttgccattgccggtcttggcgaacaggcggagttccagggccgcgtccgtgagctcgtcgggcaacggccaggtcagacccgcggcctcgaaccgccggatcgccagccgcaccgtcgagggcgccgctcctacccgtcgcgcaatctcgcggctcggcagaccggccgccttcatcctgatcacatcgcgcacacggcgcatcgcaagcctctccgtcggcatccagggtcccccttcgcaaagccgaaagggttgacctatgggagccagaagaggcctcgtcacccgggcgacatcatcccggaatggtgggcgacatcatctcggaatgggtgggcgacttcaaatcggaatggtgggcgagatcatctcggaatgctgggcgacatcgagcggaatccgcatgcaggagcaggcttggcgtcctgtgccagttgacggagcaagggcatagcgtgcttggtcgtctgctgttgcttctgccgctgtagcttctcaacgatccttccaatacccggctccagcacgtcgggcatgaagggctgaggggcttccggggttggcccccaaggctgtgtaggcgtcggactgctggcctgctcgaccttcggaccggtcgggctctgattgagtgcggtcgggacacggacattgccgctggtgtcaccgaacttctccgcaaacgtcttggcaggcgatgcgaggccaagcgccttgtccagtgtcttgagacctttgtaagccacgacagcactagcaaggcccccaagcgctccagggacgtgtgcaacaacggcatccaagcccacgccaccgctcgccaccgcaccaccgccagcgagggcactaagctttcctgcctccttggcgaacggccaaacgagccgcttagcggcttgatgcgtgccaccaacgaacgtcccgctgttctggtcgaagttgcccatgtcagtgagcttgctgagcgccgtggcctgcctgacgagggacgagagttgttcgttgccttccgcgtctaccgctgcgaggttcttcttgctgagcgcttcaccgcgcttggctgcgtcaatggcgttcgccgcctctgtagaggcgttggacacacgcttggcagcatcgctcaactcgcggttcacgtccgacacagcacgagacgtggcgtcgaatgacaccttcgggtctgcgaggtctgagccaccagcattctcaatgatgcggttggcggccatcgtcgtatgttcgtccgaagcctgcccacgcatccgtgcggaggttacggtctccttcgccgcacgaggcgcggagaataggccaccgcccagagcaccaagcgcaagagcgcccttggtctcctgggcatccatcggctggtcagtgcctcgcttggcgaagccttgggacacgaggtcctgagcggcgttggtgccgccttcggtcgccgcagccttgacgacgttgccagcggcctgagcagcgcccttgatgccagtcccggcgaccttcgctgggttgacgatggcgttggagcccatcttgttgagggcaccctgtacgagcgtagactgcaagcccgtgagcttgtcttcggccgtgggctctgcgttcgcgtcgcctgtgcgcgcctgggcacgcttctcggcttcgttgccagccgttcgggctccgaaggtcactgcgttggcgaggtactgccccacgggtccaaagcgcttcgtgagcaactggcccgcaacgtcgagagcgaggccgggagcctgttcgaccatggcgcggggagcctgcgaccagtcgaggcccagcgtgtggttgtcagcgccgtcagccggatacatgaacgcttcggaagcggacttatacttcggattggacttcgcggcggtgctgtcgaggacagccttgccagtgctcgggctcaggtagtccttgatggtcttacccacgcccgacacaacgtctgaagtgccctgcgagagagcacccagcatcgacgtgtcaggctttgtatcgccagtcgtcttggcgatgttctgtgcgtgccagtcttgcacgccggttagcgctgattgctcatcgggcgcttcaacgaccatatggcggccatcgggtatttgtattgcgtaggttggcattcgttcgtgttcttattggttgggcctgggaaggtaaggggagtacgtcccggctggtctgccttggaccatttcgagggtgaagcgaaaggccgctggggtctccttcatcttcactcgatggttagttgctacccagcagaattgccgagcaaggtagcggatatcatcagcgctccatccagcttcgagcactgccgttaggcggtcgatatcgagcatgtctcggcacgcagcgaggatcggcttgtagtcagcaggcacgttcggctttgtggagcgagtgagctttatggctgctcgtgcagcccgtgcgccctcattggccttccatcgcgcttcatcagccgctcgctcctctggactgtagtagcgccgttgcgaggcatcttgaatggctatgcggtacttgaggtcgccgcctctgcctgtgtatcggcgtgcatcggcttctatcgcgctggcggtccatccctgtcggatagcttcgccaagcgtaaaacgctcttggagcgagcggcacacagaacgcaggaatgcaaactccttacgcctgcctgccgcaataagtgcagtcatctctctcgatttcagattagtggtggtatctgcgctggggctctttgggctcgctgcttcaggaagcgacgggcgaagaagtcgtggtagagcgccgagttaatgatggcgatgaggtctcgtggcttcatcgcgtagaagggcttcttgaagtgcttgcgagcgaaaagagctaggtcggtttctcgccagcctgcatcaatgacgctggtgagcttctgaagctctaccgggctttcacaggccccatagaatgccctgaaggctttgcaggtgtcgatggctctgcctcagtgttgccgtcgcatggtcttggcaacatcgaccatgatgaggtcggtgacgttgtaagggggcacgaagccctcaatgaactcgtggagcgctctgccttcccgtatcactgttcggagcaggcggcgctttgcgtcgtctttgcaggctttgaggagcggaagaagctccagagcgcgttcgggcgatatcgtcgtatgcgttggggtcttcatttctgatggtggtggggggctgaaggatggcggagcactttcggtgcgcggaagggggctgcgtaagctccccttgccctcgtgcttatcgtcgcctacttttcgggtgtgacgcgccgctgtgaacagcgcgccacgagcgctaggcgattagatcaggtagagggcgaggcttatcactaggcttcgccctttccatttccaccgtagacggcgcgcctccctgtataggcgtccgactaaatcgctaacgcgctgtgctaattgaatttgcgcggataacggccttaatcatcgaagtgccacgatttggcccacaggcagggaaggcccccctccctctataggtacactctgaaacggtgaaccgcctgacaacattgccgaaagttgatcttttgggcgcattcgtatatacgagacgaaacacttagaggtcttatgcgcgaggaagattgccgggctgctctggagggaattaggtggtccagtggtcccgtgtgtccgcactgcaccgcatcgggcaccgccattaccttgataggcggggcatcccatcgtcccggcctctacctgtgctcagaatgcagacggcaattcaccgtcaccgtgggcacaccgctagagggttctaagcttccccttgctgcctgggtttcggcggcacacatgctcaacagattgccccatgtcgtgacagcgcgagagatcgagcaggcgttaggtgtgacgtacaagacagcgtggcacatggtgcagaagctcttgggggctgttgagagctatagaggtccccttccattcttcggtgccaccgttagacagcggattgaaccgctgctgcctaagaacaggaacaccaagagcgcttgggcgcgaaggcgtgcgaagatcaatgcgggcacgtacaaggctccgcgagtgcctgtagccgttggggcgctgtcagccttgaagttctcaccgccacccagcaaagctcatgtagagcgcacggagcgcttcttgcgatgggtgctgagcaagagagaaagtagatgagtgcttctagacggcaaacgcccgtgcctatcatgaccgatgatgaacagcggtacatggccttcgaggggcttgttcagtgggtgtctagctcgattgcgcaaggcaagcgcattgccgacgctaccgcgactatgagcccctacagacgcgaagacttcaggttgttagcggcacaagtgcgaacagagcatcactactttgccatcgccgcctacaaggttctcgaacatcgtgaatgggttcggggcctgggtctgtgcccaaatgtggatttctcaatgcttgaccaattctctgcttccgatatccgcgatctaaggaacatgagggagcacgtcgtggactactttaggggcgtcggccgcgacaagcatcgttggtggaaggagacgccggagttcaaagcggatgccagtgcatcggcgggaacccacatcggaggtaggctagactggaagcagtttgcactcgccgctgaggcgcttcttccagcgttgctcgcggagccgataccttacccgccccggtagcggtatcagttcggagggacccattctcactgtcagacggaaggaggggccctttgccattccgcgacggccccgggggacccagagctttcacgcgccgctttggtcgaacaacaacggcgactttaggtcccatttttgaagtcgcatttggcaagaaatgggccagtacggactgtcgccagggaccctagaggcctcgaagagacagccaagggaagcgaagggcagcgagagagccaagcgctgcttcggaacgcatgaagtcttcatgctctcgctaacgctatcggaaatcgggctgttgcttcccgacaatgggccaagctatgccgcaagcgagagcgcttggcataaagccgacactgccgcaaatgccgcagcgaacatgttgaggcgcgcagccttcttcattgcggtttggaaaggctcaagcccgtcgatgccttcgtaagtcgatctgacgaccgggagattgacgagcgctgacgcagcccaaagaatggcagcaagcaatgcgaaggcagcactaagccagctgagacattgagcgccgtgcgctgtgatccaatgatagaggaccatctaatcacaccgcccctggaatgcgattgagcagccgtgccacggccgtaacgtgccaagagcccccacgaggcgcattgatgccctggttgtttagctcctcagtgatgccacggacgctcgtgacgccagagcgcttgatgccctcaacgatgccctgaaggtccattgcgcgctgtgcggccttctctttgatcctcgccactgcttcagcgttgccggtctgcttgccccggagagcgcgcgcgccgttggggttgcccagcttcacccctctggcctttacggcggcgagagcattcttggttcgctcgctaatcatcccgccttccaactccgctaccgctgccatctgggtcagcagaaagcggcccatcggcccaggggggacgctgggcaggtcgcagaaaaccaaatcgacgccagagttcacaagcgaccgcaggaggtccacgttgcgcgtcaggcgatccagcttcgcgaagacgatcttggccccgatagccttggcgtgggagagggcggccgccagcttgggccggtccgacttcttgccgctctcggtttccacgtactccgccaccagcgtccaacgtcccccattgaggtaggcatcgactgcggcgcgctgagcttcaatgccaagtcctgaacgaccctgcctatcggtgctgacccggaggtaggagataaattttccactggccatggtccaaacaccctgaaacacattttgctgtaaccgacgttacatgaaaatgtgtacaacgctcataggactttttgaatcccagggattccgatttgcatggctggccttcaaccgttcgggctgtgggaattggggagagcactcgcaatgggtgtgcaataccccgccttgcacgtcgaatcactataatggggaccgcaagcgaatcagcgggcaagtagaaatcggtcggggttctgaatggagaagcgccaaattacgaatgacgaagcggagatcatcctttcctacgatgagaaccacttccgcgatttgaaggcaaaagaaattgcgcctgcgaagctctcgcgcgccgtttccgctttcgccaacaccgcaggcggggaactgttcgtgggcattatggagcatgacgacggtacgagaacctgggccggattcggggacatagaagcggcaaacggcttagtgcaagtgcttgaggcactttcgccaatgggcaatctctattcagcgcagttcttgagcgcgacaggtaaggagggactcgttcttcatctggctgtccgcaagacgcgcgaggtcattagcgcaaccgacggcacggcctacgtcaggagaggcgcgcaaaacttgcccgtcacaggagaggatgcgctgaaacgtctccatctcgacaaagggctttcgacgtttgaggacgataccgttaacgtacctagcgacacgattaccaattcagttacgacgcttgagtttgtcctgttacaggttccgagtgcggagccggatgcttggctgaagtcgcagttcgttcttacgaatgataagcccaccgtcgctggagtgctgttgtttgcggacgagccgcaggccgcattaccgaaacgaagcgccatcaaagtgtttcgctatgccaccagggaggagggagtagaccgagaaacgctcgcatttgatcctctcagcatagaaggtccgatctacgatctaatatcgaaggccgtttctacaacgaaggagatcgttcaaggcatcaaacgcgtgggcgaagctgggttggaagaagtcagctatccagacgagactctgcacgagatcataactaacgctgtgctccaccgggactacagccaccaaaccgatgttcaaatacgcatctatgatgatcgaattgaggttgagagccccggccgctttcctggacacattacagcagccaatgtccttacagagcaattcgcacgcaacccgaagctggtgcgcctgatcaacaaattcccagatcctcctaataaggacgtgggggagggtctaaacactgctttcgcggctatgcggcgcataagattgaaggaaccagagattgctgaaggcgcgaactcagtgacagtcttcattcgccatgagcgcctatcgtcgcctgcttcgatggtcatggaatatcttgagaccaatccgaccattaccaacgaaatcgggcgcggcatcacgggcttgaggcgagacgtccagatgaaagatatcttcgtcctattgagaaagaagggggtgctggagcaagttcctggaaagcgaggccgagccacagcgtggaggaaggtgcagcctcccagctagcgcgcgcatcaatacggcggatgatgacgatggcagcagggaggctcgcgaagtgtcaaatgacaagcgtttattgttcggcagtgattttggtacgggcgaaagcgcgcttcatttcttaagcaaccagaatttccatgaggcaagcctgatcgtttggcagccctcgacagcgttcggcgaagttcatccacagcagcacgggcgcgccgtggcctctttggacactgcaatgcttctttcagataggttgtcttcccttgctgattggataaggcaaggtcacacgctcatactgatcggacacgctcccctcaaatacaattttcaagacccgcagtcaggccgtgtcgttcctgtgccgttagaagggcatcctccgcttgatgagattgaattcaaaagcgctggcggtactcgcatcgagtattgtggtccagcgtccgcttcgaacctgttcaagccccacttaccactcctcaagtacgatgtggtaattggcggagagggcttggcgcctcttctgcgagtggcgcttggagggcgaggagagccgcaaattgttcgtggctatcgtcgctatggaggcggacttatcgtttatttgcccaaagtagtcgtgggcgctcagaccgctgccttcatagacgatgtttcgcagcttcctggaatgctcgcaccctcaccgacagaagttcctcactggattgatcgatatcaatcaacaggcgataaggagctattcgccaaagttgcagctttaacaagccgtctcgaagagttacagagccagttgaacgttcagcaaggcctcatccagagttcgcgtgacctgaagaagctgatttttgataccggcactgggtttgctgaggccgttgccgacgccctagaagaacttggattgtccgttgttgaaggcccacaccctcgtgcagacctcctcgcatcggacggagcgcgatatgcggctgtcgaggctaagggtatcgagggcacaacgaaggagaaggatgtccgagaggttgcccagtggatggccgaagtggatagcgctctggcggacgacggtgacgacaacgaccctgacttggctcggtacgtaacgcaactggctaagttaccgatccaacgagacggaagtgactgcaagggccttctgattatgggcacctatcgtaagcttccgttgtcggaacgagactcgccaagcttcacggagccggttgtccgagtgatagagcgggcggatatttgcgcgctaacaggagcgcaattgctggggcttgtcttgcagtcgcgggaaaatcccgctttgaaaccgatcatacttaaggagcttttcgagacacgaggggtcctcgcgcgcgcatctagttgggacgagttcttagcgaaagtagcacctgaaaacgcggttaaggacggttaggagccaattcatgccccgcgtagttccctcgcaagtcgcttcttttatcgatcaagcgttcgagagcgatgccgtcggcgtcagtcacaacacggcagggatgttttcagcgcttgtgcgcctggttgaggagattcctcaagagttgctcaccttgggggcatccgactacgatgatctaatttgcggaatggaggcgatacgaagcagcgtcactttctggcagcagaagggagtaggttctatcggagcacccacggtagttaatcggagagcgctgaatctaattcactcagccttgctcaagtgcccggatgaaattccgtcgccctctaccgcagacttggcgttcattgaagacgcagagctcaaagatagcatacggctagacatcagcacggccaccagcgcgtttcacaacggtgagtggaaggccgcaacagtgttggctggctcggccgccgaagcattgcttctgtgggcaatcacggattcgtccgagctacaaaccttgccatcacctccgaagggtgcgccagatcggtggggtcttggtgactacatcggcgtagccgaaacactttccctcatcgacgccgatactgcgaaacaggctacattggcgaagaatttccgaaaccttgtgcatcccgggcgcgcgcagcggttgggcgagagctgcgaccgcgcgacggctttaaccgcgctggccgcgttggagcacattgtacgggacctgattagacgacccgctccttaatcaggcaatcaaatgctcctgcacttagtctgcaaaatcctacattaggcgaggtctgcatctcgtgcgaacgtgcgcaacagagccgtggaaggctccggaggtagcgcgatggctgacaagaagttcaaatgcgtcccgtttgtaacggaggttatgaccgcgcgctatccgaggctgtcggagcctgacacccagggcgagtacgctgacggcaagtacaagacggaagcgactgctggcagcgactacaccgagcgcttgcaggatgaaatccaaagggtcgcggaggccaacttccctcgtaagaagcacgtacacgttccgtggagggacacgagggagggcgagattgccttcatcttcaagtctccgaagatgcggccggagcttagcgatgccaagggcaatcctcttgtggctggcattgtcatccatggaggctcgcttattcgcctttcgggcgtcatcgctgcttgggagaaaggggccaagcggggcgtttcgctgtggccagatgccgtgcgcgtcataaagctcgctgacggcgctgaagccgcgcgggttgatgatcccgaaggcatccccagcggcgcgcaggcgttcgggcctcctgaagacggctttgacggggctgcatacgcccagtggtgcaatcgccttgattgcccgttcaatcggcgtcaggcaccgtagctgaagccatcgctttcatcacttcggttccgtagtccaccttttcaatagccttccgtaagttcacaaggtctcccttggagtagtggccataggtcatgcttcccttacggctatgtcctacgagtagcttgacggtgctctcaggcacctccagcccttccatacgtgtgatgaaggtatgccgcagggcgtggaagtcctgcttatctccagtgacccccgcctgatctctgaaccggccatacgccttgctgatgtaccaggagcgtttgtcgtctggtccgcccggctcaagacctgcgaacagatactcatccttgtccttctggcggcgctctatgatgcccacggctaggggatggacaggtatctcacgtttggccgcgcgcgttttgccgctggtgatgaccaaccaatatccatcctcgcgcttgtgaacgtcagagcgcttcaaggcgcacaactcctccaagcgcgcgccatgcagtaaggcgagcctaagaaggtcgctaaggacctgggcgaacttgggtgtgctgtagcggcctttgaggagcttcaaaagcgcgtcctcactgaggcgcttgcggtcaggctcctgcttcttgccaagttgctggccgagccaaggattgtccccggccaccccacggccttttagccaacgccagagagaggagagggaggagacgtgccgtctggcggtagcgcgggcaaagccggaggtgttcataaggtctgtgacgtattcccccgccttcttccgggtcacctcctcaatggacacgctgtcgctggcccagcccataaagcgcttaatggtgctctcgtgctgcgccttcgtttggcccgcgtgctggacctcagccagccagagggggtactggtccttcagcagcgtggcttgacctgtggcagcgttgtagaagcgcgcagcggcctctgagccatccttgtcgagtatctcgcgcgccttagccttcagccggtcaagctcttcttcgtattcgttccactcgtggtcctcttcgtcctcgtgccacacgttcttggagctttcgagcgcttggcggaactcggccgccagccgggacagcttcgcatcctcatcgctggcgcctttagccagttcagcaatccgccgatggaagtcagcaacatagaagtgcttgcgcttgttcgcttcagcaaggctgtcggtgcccagagactttttgaagcgcttccggcctgccttcgcctgtagcggcttaggtacctccaccacgaccgaatatgtgttgtactgcttgacgagatacttccggtccattgggcaaaccacctagctgacccacctagacttattggcgaaaacatctataaacaagccattctagggcttccgcgacgttctggcagagtatccaggttccccagccaatctgccacagcggcgaagccataccccaaaattccgatgatcgcccgcggccaccagctcccgatggtgacgccggtcgtgacaagacagcagcccacggcatcgaggctggattagcccggcgtaatccaccatggtctcgcgcgtgaggtcctgggtgttgcgacagaggtttgggtgatggacgaaattctttatgcgcgcgaggcgtcgatcggcgtcgacgagttcatcgaggtgttgcgccaatcgggcctcggcgagcggcgtccgctcgcggataccgagcggatggcgcggatgatcgccaatgccaacctgatcgtgacggcgcgcaaggcgcaccaactcgtcggcgtctcgcgcgcgctgaccgatttcgcctattgctgctatttgtccgaccttgcggtcgatcgccagtatcaggggcatggcatcggcaagcgcctgatcgcggaaacgcggcgcttcgccggacctgaatcgatgtgcctgttgctgtcggcgcctgactcgatcggcttctacaagaccatcggcatgccgcagcccgacaatgcgtttctctacaagcgcgagcgatagcaggcggcgatccgcgccgcgctatttgatcttgtcgtagaccgtcgcgaagtcggcgagcggcatcgggatcgagatggtctccttgccgagattctggaacgagaccttgagctgcttgcccgatttcagctgggtcaggacatcggcggcgatcggcgcattgatgtagcagccgcgcgcctcgcaggtctggatcggcacgtcgaccgccttgccgtcgtcgacctgcagcttggcaccgacgggcaggttcaggccgagcggaagctggatcagcgcaaccggggcacgggtgtcgccgggaacgcggatgttgaccagcacgatgagctggccggtcttgctgagaacagcggtctgctccatcgcgcattcgagcggcgcatcgcggctcgcgctggtgcagcgcgcgacccagccggcattgttgccggatgcatcgccttgcggcgcggcgggcgcagctacgggagccggggcgggcaccgtcttgcccttgggcgtctgggcgtggccaaggccggctgcgccgaacgcggtgaacaggacgacgagaagcgactttgcgacaatcttcacgataccggctccgaaatgaacatcttcggatgtgccggtatggaggcaaatgtcaagtcactcggcggcctgcttgaccgatcggtcctcgccatcgtcggcatcgtggccggcgcgcggcgagcggccccagttcgcaaacgcgttggagagccggtcgagatagagatagacgacgggcgtcgtgaacagcgtcagcgcctggctgacgatcaggccgccgaccatggcgtagccgagcggctggcggatttcggagccggtgccggtgccgagcatcagcgggacgccgccgagcatagcggccatcgtcgtcatcatgatcgggcggaagcggagcagcgcggcctgacgaatcgccgccaccggctccatgtgctgatcgcgctcggcggcgatcgcgaagtcgaccatcatgatgccgttcttcttcacgatgccgatcaagaggatgatgccgatcagcgcgatcagcgagaagtcgaagcccgcggccatcaggatcgccagcgcgccgacgccggccgacggcagcgtcgacaggatggtgatcgggtggatgtagctctcgtagaggatacccaggatcagatagacgaccacgagcgccgccaggatcagcagcggcacggtcgacagcgattgctggaacgcctgcgcggtgccctggaagctcgagctcagcgtcgccggcgcgccgaggtcgaccatggccttctgcaccgcatcggtcgcctggccgagcgcgacaccctgcgccaggttgaacgaaatggtgatcgccgggaactgaccctgatggctgatcgacagcggccgcaccggcgtgctggtccacttcgcaaaggtcgacagcggcacctgttcgccggtcagcggcgacttgatgtagatgttgttcagcgtgtcgatcgcgccctgcagctccggcagcacctcgaggatgacgtggtagctgttgagctgggtgaagtactgcgtcacctggcgctggccgaacgcgtcatagagcgtgtcgtcgatcagctgcggctggatgccgtagcgcgaggcggtgtcgcggttgatcttcagctcgaccgtggtgccgttggtctgctggtcggtggcgacgtcgcgcagctgcggcagcgtctgcatcttggccaggattttcggcgcccattgattcagctcggcaagatcggcgtcctgcagcgtgaattcgaactgggtccgggtcggtcggccgccgaggcggacgtcctgcgccgcctgcatgaacagccgggcgccctggaccttctccagcttcggccgcagccgggcaatgatctgctgcgcattggcgtcgcgctcgttaagcggcttgagcgtgatgaacatcgtgccgttattgccggcgcggccgctgccgccgatcgccatcgccaccgtcgcgacggcgggatcctgcatcacgatcttgccgagctcctcctgcttccgcttcatgtcggcgaaggagatgtcctggttggcttccgaggtcgcggagatcaggccgacgtcctgctgcgggaagaagcccttcggaatgaccacgaacaggtagatcgacagcgccagcgtgccgaagaagatcatcagcgtggtgaacttccagcgcagcgcgaggtcgagcccgctccgatagccgcgcagcatcgcgtcgaagccgcgttcgctgagctggtagaagcggccgtgcctctcctcgtcgtgggcgcgcaggaagcgcgaggccatcatcggggtcagcgtcagcgacacgaacatcgagacgaagatcgtcatcgccagcacgacagcgaattcgcggaacaggcggccgatgatgccgcccatcagcagcaacgggatcagcaccgcgaccagcgagatgctgatcgacacgatggtgaagccgatttcctgcgaccccttgaaggcggcggccatcggcttctcgccctcttcgatgtagcggctgatgttctccagcatcacgatggcgtcgtcgaccacgaagccgaccgcgatcgtcagcgccatcagcgacagattgtcgagcgtgtagccgaacacccacatcagcgcgcaggcgccgagcaacgccaatggcaccgtgacggtcgggatcaccgtggcccagaagctgcgcaggaagacgaagatcaccatcacgaccaggaaaatggtcaggagcagggtgaactggacatcctctaccgcggcgcggatcgtggtggtgcgatcggagatgacatcgatcttgatcgccggcgggatcgccgcgaccagtcgcggcagcgtcgccttgatcttgtcgacggtgtcgatgacgttggcgccgggctgcttgaagacgacgaggaacacgccgcgcttgccgttggcccaggcagcctgcttggcatcctccggtccggtgacggcctggccgatgtcgcggatccgcagcggcccgccgttgcgataggcgatgatgacgtcgttccaggggtctgcggtgagcagctggtcgttggcgtagatggtgtaggcgcgggtggcgccgtcgatattgcccttcgggctgtcgacggtcgcgatgttgatcgcggcgcggacgtcctccagcgaaaggcctttcgcgaccagcttggccgggtcgatctggacgcggaccgacggcttctgctggccgccgatgacgacctgcgcgacgccggagatctggctgatctgctgggccagctgggcgtcgacggcatcgctcacggtcgtcagcggcagcgtgtccgaggtcgccgacagcagcatgatcggcgagtcggccgggttgaccttgcgataggtcggcggcgaggggagggtcttcggcagctggccgctggcggcgttgatcgcggcctgcacgtcgttggccgcgccgtcgatcgagcggttgaggtcgaactggatggtgaccgccgcagtgccgagataactcgtcgaagtcatctgcgcgatgccggggatctgcgcgaactggcgttccagcggctgggccaccgaggtcgccatcgtctccgggcttgcgccgggcagggacgcggtgatctggatggtggggaagtcgacttgcggcagcggcgcgaccggaagcagggggtaggcaacgaggccgacgaacaggatgcccgccatcagcagcgaggtgccgatgggaaagcgaatgaatggtgcggaaattccggcgctcattcctgcgtaaccttcgactgggactggtcagagctcgccaccgccgtcgtcaccagggttcccggcgagaccttgtactggcccgcggtgatcacctgctgtcccggcgacaggccctcgtcgatcaccgatttgccgtcgatcgattgggtcaccttgatcttgcgcagctcggccttgttctcctgattgacagaatatgcgtacaggccttcggtgccatgttgcaccgcatcatccggcacgacggtggcatccttcaatgtgcggaccagaagccgggtcgagaccgactggccgggccacagcgcacggtccttattatcaaacaccgctttcagccggacagtcccgcttgtcgtgtcgacctgattgttgatcagcgcgagggttccggtcgagagcacccgcttgccgtcggtggtcagggcaatggtcttgggcggcgccacggccagcgccgccttgatatcgggcagctggtcctccggcgcggtgaagatcaccgtgatcggctcgatctgggtgatcgtcacgatgccggtctgggccgaggcattgacgatgttgccgatatcgaccagccgcaggccgacgatgccgtcgatcggtgacttcacggtggtgtagtcgacctgggtctgcgcgttgaagatggcggcttcgtcggccgcgatctgcgccgtgagctgggccacggtggagcgctgggtgtcgagctgctggcgggtcgcgaactcgccgagcttggtgtagcgctgcaaatcgaggttggcgttggcgaggttggcttcgtcttgggccttcttggccttggcctggtcgagcgtcgcctgatagggccgcgggtcgatctcgaccagcgtgtcgccagccttgacgaactggccttccttgaaagcgatcttggtgatctggccgtcgacccgggtgcggacctggacggtgttgaacgcctgcactgtgccgagaccggtcaggtagaccgggaagtctgccttttcgaccggcgagatcttgaccggaacagccgggcgctgctgggcggcacgcttctgcgaggcctcagcggccagcttgttgtcggaatatttttgccagccgaaataaccggcggcgccaaccgcagcgatcacaagaacccaaccgatggtgcgtgacttggacatgcggactcttgggttcgacgaaacgataaagggtgatcgaaacggctctcagagcttgcggatataatatgcgtgcacttaatgtgtaaacacaccaaggcttgagaatcctaaacatttggaaaggtttaggtcagaaacgagcagaaatattccgtctgggaaacgcaccgaggacccctatgtcgctcgatctcaaacgccagttcatcgcgcagctcgtcgagagctcgaggctgctgcgcaactatatcgatcatcgcgccaaggcgcgagggaccacgcgtgcccaatggatcgttctgttccggttgcgcgagcaggaggggctttcccaggtcgatctcgccgacgtcctcgaattgcagccgatctcgttggtgcggctgcttgaccgcctggtcgagcacggcctgctcgaacgccgccccgaccccagggatcgccgcgccaatcgcctgttcctgaccaggaccgggcgccgcctggtcgacgatctcgacagtctgcgcgacgcgatcgcaggcgacatactgcgcgacgtatcggacaggcatatcgagagtggcctcgccacgcttcgcgaggtcaaggatcgcatcaaggcgctcggtgagggcgcggagcacatcgccgcgaaatagcgcgcgtctcgttgctcgcggacctgccctcgattcgttcagctgtcgcagcttgcgcgacgcggttgaatcgccgcgggatgtcgttcatatcgcgcagcgacaatgcgagaggatgagggcagcgatggatgagttgaacgggcgcatgatggcatgccagatcctggtcaccggattgatcgcgcgcgtcgccaacgagcagcgtgatccgctgcgctttctctccgacttccgcgacgagatcaaagcggtcgtcgacggtgtcaatatcgccggcctcgagaacagcgaccgcgtgcggcaggtcgcgcagcggaccatcgacgagctgttctcgctgatgaagccgccaggcggcgagtgatcgcggagtggaattcgtcggcagcgcgaaagctcgccgacggcgcgccggcaacagtttagaacgattattagaacgcttaaaaactagagtttagaacgatttcaaaccacaaattagaatccctttgaactggggcgattcaagcaaactgtggcgctgatcgcattgataaaaaaactcacgctcgataaccgaaagagacagttcgtcgcaccgtgatttcgcgacgaacgtgctttttgggggcgtggaagaaatgagcaatgtgagggcgccgagatcgctgcgcttcgatgcggtggtcggttctgccgatggtacgggatattcagccacgaaggtctccgcagtcgcgagcttgatcgcggtggcgtcgttttcgggagccgaggcgcagcaatccacccttccgccggtgaatgtcgatgcacctgtggctcgcccgcggcccgttcgctcgaagcccacgtcggatcaggtccgcgcccgcgacgcgctgcgccgcgccgcgcgccgcagcaaccagcaggcccagcaggcgccggtgccgtttcccaatgccggcggtcttgccgccgaccgcgatcgctacgcggatccggccgcgccgtacaagggcgaccgtttgcaggcatccggcaagtttcccgaaccgatcctgaacacgccgaagacggtcacggtgctgaccaaggacattctcgaagacaagaacgcgacctcgctgaagtccgcgatcctgtcgacggccggcgttacgctcggcacgggcgagggcggcaacgcgttcggcgaccgcttcttcatccgcggcttcgatgcgcgcaatgatgtcttcatcgacggcgtgcgcgacgccggcgtcagtgtccgcgagaacttcttcaccgagcaggtcgagatcctgcgtggcccgggctcgacgtttgcaggccgcggcaccaccggcggtgcgatcaacatcgtcaccaagcaggcgacgacggagaacagcttctacaacatggacacctcgttcggcaccgatcgcaccaagcgggtgacgctcgatgtcaaccaggtgatcagcccgacgctggcgatccgcgccggcggcttgttccaggatgccggcgttgccggccgcagctatgtcaccgacaatcgcgatggcgcgttcgtcgccggaacgtggaagccggtcgatgcggtgaagatcaccggcaactacatccataccgagctcaccggcatcccggacttcggcgtgccctactaccggccgagcaccgcgagcacggccggtggcccgttcccggatttcggcgtcaaccgcaacaatttctacggcttcgtcaatcgcgacttcttcaggaccgggcaggacatcggcacgatcaacgccgaggtgcaggtcacgccggacctcgtgatcagcaacaagatccgggaatcgcgctcgacccagaactacatcggcacgctgccggaatcgccggcgttggccaatccgctgtcggcctcgacattgaccgcgaatccgcagagccgttaccaggtcaccgacgtgttcgccaatcagaccgaagcgacctacaagttcaacgacggcgccggcttcaagcacacagcgctggccggcttcgagtatgacaacgaaaggtcctcgatcgacaagtatcttggtctgaactccgaagcgttgccgggcgggttcagcggcggcggatcgctcgccggcgtcagcgtgttcaatccgcaatacacgaacattccgttctcggttccgtcgggactgtccgggctgccaaccaaactcaccatcgacaccaagagtgtctatgtcatggacagcgccaattacaacgatctcgtgatcctcaacggcggcgtccgctatgacgattacaacatcaagaccagcggctatggcacggtcaatggtgttgccggcgtcttcggtcagcagcagcaagactacggcatgccgaacttcaacctcggtctgacactcaagccgttgccgaacgggagcgtctatgccgcctatgccacgtcatccaacccggtcggcgcggagtttgacggttcgagcatccagtatggtggcctcgcgccggttctcaatggcaatccaagccagatcttcgggccggaaaagaacaaggcgattgaagtcggcaccaagtgggagttgttcgatcgccatctgctggtgaccgctgcgctgttccagaccgagaaggagaacgcgcgcgaatccatgaacgtcacggcggcgaccgcaaccgccgcatgtccttatccggccggtacgaccggaagcgtctcctgcatcagcgccggcgcggcctatcgcatccgcggcatcgatctcggagtgggtggcaagatcaccgacaagtggagcatgttcggcggtctggtgctgatgcagtcggaggtgaccaaatcgaatattccgccggcgaacacagctctgtacaccacgaatgtcggcttgccgctttccaacgtggcgcatcagtcgttcagcatgctgacgaagtatcagctcaccgacatttgggagcttggcgggcaggcggtgtatcgctccaaggtctatggcggcaccttccttgccgccaaccagggcacctcgatcccgagctattggcgcttcgacgcctttgccgaggcgaagatcgacaagcattggaccgtgaagctgttcgtcaacaacatcttcgacaagcgctactacgacgcgttgtaccagagcgcggcaccgttcgtgctcgaggcaccggggcgcgccgcgtatctggtcgtgtcggcgcgttactgacggaggcctcgcggcacaagatgctggtctgcattcccaacgtattgagcaaggctgatgtggcggatttccgccgcattatggagcaagccgaatgggaagacggccgctcgaccgcgggggctgcctccgcgatggtcaagcgcaacgagcagttgccgcccgacagcgaggtcgcgcggcagctcggcaaccgcatcctgtcggcgctgtcggcgagcccgcgtttcatctcggcggcgatcccgctccgaatctttccgcccttgttcaaccgctacgctgcaagcgacgggcatcatttcggcctacacgtcgacaatgcggtacggggcgacaggctgacaggcctgcggatccgcaccgacttgtcggtcacgctgtttttatcggagccggaagagtacgatggcggcgagctggtcatcgaagacctctacggatcgcatgaaatcaagctgccggcgggcgatctcgtggtttatcctgcttccagcttgcatctggtcacgcctgtcacgcggggaatgcgggtagcgtcttttttctggctgcagagcatggtacgggatgcccacgcgcgcagcctgatctttgatctcgatactgcgatccaggccctggttgagcggctgggccgcgatgaccccgaaacggtcaaattgaccgggatttatcacaacctgatccgtcactgggctgaagtgtaactgatgatgacattcaagttccccgctgcatccgccctggtcgcctcgctggcggtgctgatgctggccgtgccgtgctcggcgcagcagcaaacggcgcctgccgcgcagcccgcgcccgtgacccgggcccagcctgcggccgcggctcaaccgcaggcggcccagcctgtggcggctgtcccgaccgcgccggttgcggcgccgcaagcgcaggcggcgccgacgc

SEQ ID NO: 60 - DNA, 22281 bp, Bradyrhizobium enterica
tgcgcgacatcgggccggcaatgcaaggcgtcggcagtgacaagagcgccgtccagatcgagcgaggcgaggacttcgagaacgccggcaacctcgttgcgattgggggccttcctttgagccagcgccatgcgtgtgcctgccgcccagacattgaccatatgcagcggtgtggattgccgcccacgcatgaaggcgccgcgcaacgccttgccgtcgatgctgaccacgcccttgatgccgaagcccttgctgagcttgcgcaaaatcgcttccaaccccttcgggtccagagcacggaagacgttgctgaacgtatcgtggctggggatgccggatctgagctccaggaaccgctgcaacagctcctctcggcctttgccgaagaactcgaactcggtgcaggtcttggcgccggccagtgtcgccgccaaggcgatgacgatgatctccaccagatcgtgccgcacgttgctggcgcgggggtccttgagtggtcgaagcaggcgcttgagttggcgcattctggtctccctcgggaagcgagagacacccaaagaatccagttccaaccgcttggcaacacccctccatcgccatatgcgattcccctacccttgcgggggagggtggggagaggggtgcgccccgggcgagatgatcgtcgtgagcgtcgctttcgcaaccatgcgccgcgggcgttgaagcttgttgaatgaagaggccgtgccgtgtggctacccctctccccaaccctcccccgcaaggggggagggagcccttccgccagtgcgtcccttacgcggaacgtcgcatagcgtattcctcacgccgtcgcggcggcgtgggcgaaggtcacctcgatcagggtgccggtgcggccgccggtcctgatctggaatttggcgcggttggcttcgaccagcgccttggtcagcgacaggctgacgccgccggagccggcctggtcggacggcgtcggcgcgcggaacggttccagcgccgcggcgacctcgttgtcgttgaggctctggccggtgtcgcgcacccgcagcatcacctcgccgaaatccgacagcgcggtcgagacgatcacctggccgccggcattggcgagatggatcgagttgccgatcaggttcagcgtgatctggcgcaacgcgcgggcatcggcgacgaccggcggcagggtgtgcgcgagcgaggtgcggatgatgatgcgctcgcggttggcctgcggctgcatcaccgcgacgcagctctccaccatctcgttgaggttctggctggtgaaggcgaggtcgagcttgccggtctcgatccgcgacagatccagcaggtcgttgacgatggcgatcacccgctcgccggaggcgcggatgtccttcatgtattcgacatagcgctcgttgccgagcgtgccgaagcgttcgccgatcatcacctcggcgaagccgataatggcgttgagcggcgtgcgcagctcgtggctgatccgcgccagcatgtcggtcttggcgttggccgcacgttcggcgagccgccgcgcctcgcgcagttcgctctcgttcttcctggtctgtgacaggtcgcggaacacggcaaagaagttcgggccgtcggcgcgggtacggcccatcgtcaccgacagcgggatgatgccgccctggcggacgcggccgagcgtctcgcgcccatggtcgagcaggctggcgacgccggaagatttcacgctcgcgagatagtcgaagatgccgtgccggctctccggtgcgaacaggtcggcgagattgtgcatgacgagctcgtcgccgtcatagccgaacagcgcctcggcgctacggttgcaggaatggatctggccctcggcatcgaacatgatgataccctcggccgcggtgtcgaggatggcgccgagctcctcagcgtcggcgtggccggcctgcggcggcgccggcgcgagcacaggctccgcggccgctgcctccggctccggatcagatgacgcggccgcgaccgcggtgtcctcgtcgagcgtgcgcgagaagatcagcgccagtgccgaatcgtcgtcccaggtgatggtgtgcagccgcgcctccgcggacacctgctcggtgtcgccgttctggttggcggagatcgtcaccggcgtgccggtgccggaggtgctgctcgcctgcgagacgccgggctcgacatagagcgcgtcgagtccgccggcggcttccagggcgtgcaggctgtcatggcccatgcgcgcgaggaacgcgtggttggcatagagcaggcggtcgagccggtagatcaggatgccgaccggcagcaaatcgagcagcgcgcggtcgcggcgggaataggcgctcggcgcgggcccggcggcggcgagccagccggccttcggcgtgtcggccggcgtctccggttgcgcgaccgtctccggctgcacgtcggcctgctgcagcgcttcgagcgcgggcggcgcttcggcaaccggcgcgatcggggcgctctcgttcgtcgtcgcggtgaggccggcctcgctctcgagccgcgccgacaattgccgcgcgagctcgttgaaggcgttgttctcgaccggcgtcagcgacggcggcctggtgtcgccggcggggcggaacggcaccacattcggtggcgggtcgtgacgcacgtcgtgcgtttcctcgttcgtttccacggcgtgatccggatcggcttggtgtgaaggctctgttgcgactggttcggtcaattcctcgggtggtgcactcgcggtcgtatcgggcggcggctccgcgtgcggcggaggattttcgggcggcaacgcggcgggcccgggcggcgcatcgacgcgtggcgccggcgtgacaccggcggacagcgatcgcggcgcgatcgagccgctgaagaactcatagcggcgcaatgcagcgagtcgcgcaaggccgtcgaggtcgcgacacacaccaaagccgcgatagccggcgaaattccggttcctgtcgaacaccggcaagccggacaattcgaccggcagccggccgccgccatcgaccggccagtgcagcgtgatgccgctccaggtgtcgtggctggcgaacgccttgaggacgcggccctccggatcgaggccgaaggcctcggcgatatcgctccagagccggccgaagcctgccgcggtgtgcaggccgatcaggcgggtgaattcgtcggagccgagcgagaagcgggcctcgtggtccatctgccacatgaagcgcagcggatgtcgccgcaccggcaagggctcgtcgagccaggatggcggcggcaccggcgcctgcgacgcgggctccggttcggcggcgggcggcgcagcgggcgcatccgcgatcgcatagggcgagggcgcggcatcggccggcggcgccgatggttccggagccggcgcgcttgccgtccgttcgagatcgggcgcggtctccggatgcgtttcggctggctcctcgatgagcgcttccgacagcggctcctcgacggcggggctctcgtcgggcgtggtatcgaacggcgtggtctcggcggacactgtctcgacgtgcgtcggttccgccggcgcgtgagatgccgcaacgtccgaggtcccggatgcagccgcgctgatcaccggctcgactgcggtggtttcttccgccggcgggtccagcgcatcgaacagcgtgaagctcgcgggcgccgcatcgatctctgcaggagtctcgtgatgcgttgcctcgtgatgcgccactcgcggttcgaccatggcaggtgccggcgccacggccgcagcctcctgcggcgtggctgcggcggcttccgttgcagccacctccggcgcaaccggctcaggcatgatcggcgccgcgggtttggccgcgacagcgggcgccggcttgatcaacgcgatcagcgcgcgatcggcgccgtggccgatccgctgcagcacgacgcggccgatcgcgacgctcgccgccgcgcggccctgcgccagtgcctcgccgcgcgccgcatcgaggccggcttcgctgagatcgtgcaggccgggcagcgaacgcgccgcctcattggctgcgatcaacaatccgtcgccggtgaaggcggcggccggacgctccagtccctgcaccagccgctgcaagcgctcggcgagcggcatgccgcggccgccagcattgaacgcggtcatcaggatgccgtggctgccgtcggatagctcgatgcgcctgcagccgcaggtcgccagcatgccgggcggcgcgccgaagccgcgcagccgctccagccgcaccgcgccgcccgcgccaagattggagccgagccgcgcgacctggcggcgatgcggatcggccggaccgaaagtgcgcttcgccaattcggcgccgttggcggcaccgaatacctgcgcgccgaccggattggcccagcggatccgtgcgccgtcggccgaccacagccatgccggcagggctgccgtcgcatggtccgccagcctcacatcgccgagcgcctggatctggaattcagcgtcactcatcacgcaagatttgaccgcataggtttggctttcttcctcgcattgccgaaggccggcagccgcaggacgacagccttaacagaaggttagtatcgcaagcggggagcggcaggtccatgtccgccgcgagagtgcccccgccaaaggctggataacgttaacttggctgaacgatccacagccgtttcgcgttgtcccgcagaacctgctgtgacagcgtgaagcggaaccagggcggtgccgcgtcacacctgctatcgcagtgtaccgatataagctgccgggcgcctgcggggccaaccggcgggccgatcaccaagcgagggagagcgaccatgagcgacaacgggcgtgaccatttcgagatccccaaattcgagattcccaaggacatgcggtcgatggcggaggcgagcttcgatcaggcgcgcaaggcgttcgagcagttcgtgaccaacgcgcgggataccgccggcaagatcgaggagcgcaacgccacgatgcgcgccggcgccaaggacgtctccgccaaggcgctgtcctatgccgaaaagaacgtgcagtcgtcgctcaactacgcccagtcgctgctcaaggccaaggacctcaccgaggtgatgcggctgcacagcgaatatgtgcagggccagatgcgcgcgctcgccgagcaggccagcgaaatgggccaggcggtcagccgtgccgcgatggatgcggtgaagcccaagagctgagctgaagagagctgaccgggccgccgatccggggcggccgcggcaggcccaacccgggtcgggcgcggtaaccctatattccgccttataaaaaatgtggcgccgcacgcgatcttacgttgcgttgcacaaaattgacatgatatgggtgtttattaggcgcgcccgacgaagggcactcccgtgaatcaaggcagcgtgatccatttcaacgctcccggcctgctggctccgggacgtccgcaatggtcacatctagttccatctagtcacccgttgcgaaggattacacgtatgaccaacccgtccgatccgttttccgcctcgatcatcccgttcgaggttcccgagcaggttcgcgcgttcgccgagaagggcgtgctgcaggctcgcgacagctacgccaagttcaaggacgctgccgagacccacaactcgaccgtcgaggccgtcttcacctcgatcaacaagggagccactgcgtattcggccaagctgatcgagttcttcaaggccaacaccacctcctcgctcgacttcgcccaggagctgttcaccgtgaagtcgccgaccgaagccgtcgagctgtggacctcgcacgcccgcaagcagttcgagacctacaccgcgcaggccaaggaactggccgaactcggccagaaggtcgccagcgagaccgccgagccgatcaaggccagcgccgcgaagttcacccagcagccggccgcctgatctttggcccgcaggacttgagcgaaggcccgggccgaagcggtccgggcctttttgctggacgagggccgtcgaacggcccgagataagagcggaaatcagcgtgttacggccttgccaaagcgcggcgttgcacctagtttccgccgaaatcgccgcccccctttttgcggggccgcgcgccaggatgcagttgtagctcagttggttagagcgcctgtctgtggaacaggaggtcggtggttcgagcccacccaactgtaccaatcggatcaatcgccaggacccgatcgtctctctgttgcccgtctcgatcagcgacgccgcttccctttcgctgcacgtttggcggtcttggctcgccgcttggcagcgcccggcttcgccgctgcggccggtggctcgcttcccgcgtgcaacctcagttcagcgaggagccggtcggcggcagtcttctcgttctgccccgcagacccgacgtatctggcgagcacgaattcagtgttgtcgaggacggaaccccacatcgtggggttgctgacgcgggcgtagtgtttccggaagtcctcgatcaggcggtcgacgtccggcgcaagactgccggctgcgaccgactcgaacaggtcgagttcggtctgtccgacgaccgaccagaagtccggcgcgacggatgacatcgattggcgcacctccgtgatgtcattggtcttgagcggcctcgcgagcaccaattgcgctgcgatccggttcatcgccgggtaaaagaacggacgcgtcttggtgtcgcgggcaatcgtctccgcggcgctgtagtgctgccacatccgattgatcgcctgcatttcggcggagtgatcgccggccagggcttcgagcatcgccagtcgcttgaacccggagccgtaaaggctttcccgctcgtaggtccgcgccaaggtcagcagcgtgtcgagcagcgccatcgcatccttgatggccgcgcgcgcctcgctaaaggccgtcgccgacggggcggcattgttcttgatgttgttcaaggcctggcggctcttcgcattggccagttgctcgatcgcgatcagggacgccgctccatcctgtgccgccctcgcgcgctcgtaccattcgatcgcctccgcaaagcggcgcgatttcatccacgcgtttccgaacgcctcggcgacgtccccgcggtctcgatactggccgaaggttgcttccagatagcgcaggcgtccggcctgaatgtcaggagacttgcgctggtactcgctttccaccccgatctgctcgagcgcgaagatcagcgatggggcagaggcaatgctggaaaattcctgccccggagcagtcgggcgttgtgcatcgccggttgcaggccggaatcgccagtcggggtcaccgtagcactgataggccgcccaagtgttgccgccgcgggcataggcaccttccctggcagatgcgaccgcgtcgatgaagcgcttgcctccgagcagcgcgtgatagaactccttggcaaatacgcttgcagcctcatcgtccaccgcccagccggcggcgatcacgcatcggacgccactcttgataagggcctgggcgacacccgacgcaaattgcgcgcgattgtagttggtaggcccgagcagatcgttcggcgcgctggtcccgagatggcagcaattcacgaacacaagctcgggttggacccgtaacgcctggatttcattggctcccaggaacgaaccgcccgagagcaccacgccccttgtctcgaagcccttgtcggtctccgtcggcggttcgccatggcccgcgacatggatgatccgccaggatttcttgcaggccgcattgagcacggcggtagcgtcgggttcgggatcacttgggttgggaccgctgatcacggatgtcacccgtgctgcggcggacgtccggctatcgggagatgtcgtggccgcggtcaggaacgtcgcgacctcgagggcttcgcgcctggcgcccagcaggatcggatagttcgctcgatcgcaggcagggtcgccgatcacaagaatgtcgtcatcggccgtggcgctgttcaccgcgatgtcgggcgtcgtcatccgcagcttgcgcaacagcttggtccggatcgaccatggcttctgccggttcgaagccgtcggcgactccagggcctcccagggtatcggggccgttccttggtcaagctccagcaccgtcgccgtgctgccgcccaggaacgactcgagatcgcggggcaggagcagggtgaacaaggttcggccgatctgcgtgtcggtgttggtgttgttggaggcggtggtcaccaggttcttgatgagccgcacttgcatcggctgggggcgcacgtcgttgcgcgcccgtttcgagttgatggtgtaagcgatctcctggctgtcgccttcggtcttcaggacgagcgcactgatgaagtcgtagtcggcaccgcgatatccggcctccggcggccggcgcagtgcgccggcttcgcctgcaatggtcggggcgacggtgtaggcgccgggtgccgagatcgcgagggtctgcagcgcattccaggcgtcgctcgcgcggtcgagatagagttcgatgatcttgagccggtcgacacgcggccactgcgcgtttgcagggcccttttccgcgatctgctcattggcctcacggacgccctgggcgatcagctgggcggcctgcccgggcgtgatgccgctgccgccgctgcccagcagcgtggtcgccagcgtaaatccggtggcgatcggactgcgttcagtgagacgctgcgaccatccgatcacggcctgccggaccgtgtcgacgagatccgagccgcgcaattcgccttcggggccgagacctgcgacgatcactgctgccggcagcggcatcagcttgacgggatcgcggctgagattcaggaagatctgaaatgttcccggaccggtggcgtacagaccgcgctgcaacgatgcgctcatcgcaccattgaggacacgatcgatcgccgcttccgcgccggtgaggctcgacgaccggtagtggccgatcagcaagggttcggcgataaaggtgagatcgccgttgacgacgtcgatacgcagggatgtcgaagctggtgcggcttgcggcgcgcgcgctgccgccgaggacagcacgtcgagctcgctttgcggcggcgattgccgcatccgcagtcgggcaggacgggctcgcgcgaccggtccgacggtgtcagcggtcttttgccgggcggtgccggtcgcggagacccgggcgagccgcgtcgtgctgccggtgttcagaagctcgcgataggcttcgaatgcaaccttgtaccgcggcagcgaaccgtgatcggaatccgcaagccaggtcgctactcccggaagctccgcgctttccagcgtgacccggccatcgccgtcgccgacgtcgagataggcgagccctcggtcgccgtcgctcgagctctcgtagccggccggcgtgctcggcgccttgccgaccaccagcagcagccggtcggcccaggcgacgaggtcctcgtcgcgctgcttgtcgagcctgcgacggagctcggcggcatcatcaagcacggcttgcggcggaataccccattggaattgagccagctgaagtgccagattatgccacgtgctgcgcgcgcggatggcatcgagatcggattttgcgagatctctccaggcgctctccttgtcgagcccgtccaacaggccggcctggagctgaatgaatcccgggaaatcggcgatcaactgacgcgtctcgttgctggagaacggcgcgccgacattgatgaggagattgccgaagctgtcgtcgcccgacagcacctgcattggcgtccaggatccgccgttcggcgttccgagcatgagaatccgcgctccgtcggattgtatcatccgattccaggtcgtgggatcgacgagctgcatggcgcgcgcaagcagtccgcccatcgaatgggcgatgatccgcactggctgccgcgatgtcttgcgcgcgtcgagcgcagccgcgatcgcctccgcgagccgttttgcttcggccacaatcggcaggcgccagtcgaatgcgaatggcttgacgtcatgatcgctgaacatcgcggtcgcgagatcgtcgtaatagatcccgatcgggtcatcgggttcaacaccgtccttcttgccgggttcgtaggtgagccgcttgagaccgttgacgaggcgccaccccaaccagatccgctcgtcgtcgatcttgagattgctgccgagaattccgggcaggacgaacagcgccggcagttcggccgctttgctggcgggacgtacgggcagtcgcgcacgagctccgctcgatgattgtccggcccaggagagcgggccgatcacgctgaacccgtcgggcgacgtgctgcccgtcctggtcagggcgtcgaccaccgccgatgccgtctgggtgttgctgaaatagttgaagtgcgagaccttgccgccctgatcaagaacgaatgtcgagtccctctcccggggtgagccgccatacatcgatcgcgtctgcaccaccagatcgttgtcggtccagaagaaggcgtccgacagcaacgccttgacccaggacaccaccgagtcgccctggagatcgccggcgaccacgcgcagatcgccgctgatcgggctcgttgccgagtggagccagcggatcagcggagagtccggaatctgtgccgcaagaccgggcacctcgtcggggttcgcgcggcgacgggcgacctcaccgagaaagtcgacgagttgcggcgcaatcggaatctgggcgagctcgagcgcccatttcagcaccgacacataggcatcaagccgcttggaggcgagcaacgtgccgcgcgccgggcatgcgacgcggaccacgcgctcgattgaaatcttcttgtccgagacgatctcggcgagcctcttgagctcagctgcgctcgaaccatcctccttgaacaggtccagatcggacagccgcggattggcgcagacgcgtgccagcacctcggcgaccagtccgccgcgcgaatgcgtcaggaggtgaagtcgtgctttcctgggcgccgcttcggcgagcgtgatggcattggcgatcgggctggccccgagcgtcggatggtcgagggcatagaccctgttgtcataggacttgaacagcgcagccaccagctccgggtgctcggtccagagcttgccgaacgtgccggtcgtctggctgaaggttccgtggatcagaaccagcgacgccccgtcgtcagcggcgatcgcggacgtgtcgcgccccttgagcggctcgagcttgtcaggctgcagccgatagacgccggggtcgacctgtgaatcaaacgacttgacgaccttcgaggcgacgaaggcggccgccttgtcctcgacgatcccgctgacgatatggagcgctcccacctgcacgtcgccgaagatgccgcgcgacagcggtgccgtgtcctcaaggcgccactgcagccggccgggcacgcgcacctctcccggaccgagcgcgcttccctcgcgtgcgagcggatcatgctgcgattgcagcagatcccgcgcggattcgggatgaagccacagcgaaggcccacctgcgatatcgatgacgacgatatcctctccgggaagggcagctttggtcttgatggtcgcgtcaccggcgccgcgttgcgccgtcacaatcacggagtctttcagatgctccgttgcggtcggggctggagcgcgagcgccgcgggtcgttccgtccgggcggacgccggtcatcacgaatgcgattggttcggacaatgtgacgctcctgcaatggccgggccaccatgcaagaaccaggcgcgagcggaacaagccaccgcggccgggcaggttgccactgaattatggtatctgcgagcaatgaagacacgatactcgctttaatagaattgacaagcgtggcgccggctcgtgtcggcgaccgacttgggaggaagcgataccagtcagccacaacggcgccgtgaattggcaatttctgtcagcaacttgcaatggtcgcgaaaatccaaccggccgcagcgtgtcaccacgcctgcttgcgcttctgcgtttcttcactcacactctcggaaacgccaccttttgtatacgcttggtgctgccttggggggatgcatggggatcgccggttcaaggagtttttcgtttgcgttgatgctcgtggtcgccgttgcggcgctgctgctgccgggccggggcgaggcctacacccccgaccagcaggaggcctgtacgccggatgcgttccggctttgtggtcccgagattcccgacgtcgaccgcatcacggcctgcatgatcaggaatagggcgcagctctcgcccgcctgccgcgtcttcttccgcggtggtcccgagccgcgtgaggcgagcgagcgcgaggagcggcggcctgccaagcgcaaggtctccagatcgcacaaggcgaagaagtccacctactgatctggttcccgtcgcgcgcacgcaagcgtccccgaagcgcgacgcgacttcgcgcgatcgcgcagctgcgtttttcaagaccgtcatgcgcgacagactgacgccttgtgacgctgtcacgcagcatcatctctgggactggtgttgcttgcaggatccgttccggaacggatggagtgaggcgcgtgagcgaatttgacagacaggagatcgatcggcacttcgcctggttcgaggccaagcttccggagaagccggcacgcttcgtcgcgtggctgcgcaaaccgtcgtcacgccatgtgcggattccgctcgcgatcctcttgatcatcggcggcatcttcagcttcctgccggtgctcggactctggatgctgccgctcggactccttttgttcgcgcaggacgttccgttgctgcagaggcccaccgcgcaactgcttggctggatcgaacgcaaatggatcgcgcgcgagcgcgccaaaactgccgaaaaatgccagccctgagtcaaatcaagcgcttagcttccattttcggttgtgtcataattacagtgtgactcaaaaagcagaatgcaccggtaatcttggccgctttgcggattgcaagaagttttttctttcgcgaatcagcgtgctgattcattttcgcctcctggggtcaatctggaggccaacgtatgaacgtgattgttttcgcttcgcgtaaggggggctcgggaaaaagtaccctggctgctcacctcgccgcgcaagtgcacaaggcgacgaagccctgtctgctgatcgacgccgatccgcagggttcgctcactctctggcacaagctgcgcggcaccaacgaacccgcgatcaagacggcggtgaattcggtcagcgggatcatcgcgcaggccaagcgcgacggcatcgagtgggtgttcatcgacacgccgccgaacctgtcggccgtggtcgacgactcgatcaagaacgccaccatggtgatcattccggcgcgtcccggcgtgttcgacgtcaatgcggtgcaggaaaccatccagacctgccgctcgatgcgcaagccctatgccgtcgtgatcaacggcgcgcccgcgcagcgtgacggtgccgaaagccgcatcgtcgcgatcgcgcgcgaggcgctggcgaagttccgcgcaccggtgtggagcggccagatcaccaaccgcgccgatctgctgatggcgctcggccagggtgaaggcgctcgcgaatattacgcggaaggccgcgccgctgccgaaatcaaccggctgtgggccgcgatcgaacgttcgatcaaggcgatccgcggtacggcgtcggcgtcgggcgcaatgcacaagcaggcggcgtaacaacgccgctctggttcgaactggaaagaacgcgcggtacccgcgcgttttttgcgtgattgtcattgcgagccattgtcattgcgaaccaacgggtcgcgcgaacgcgcgcccgatgacaggctccgcgaagcaatccttttgtccacgcgtaccgaccgatggattgcttcgtcgcttcggcgcaaaattgctttgcaattttgtcgcgcgctcctcgcaatgacgcgatggatggcgttacgccaccatcaacagatagaacacgatcaccggcgccagggtcaggatcaccgaccagatgccgacagcccacagaatatcctcagtcgtgaagcccggcgctgtgcccggcctcccggcaataaaaccagtcctggaagtcacgacgcccccgcattggtctcggcaatgcaggggtgatacgcgagcggctttaatatcctggccggaatttcgctggcatttgcgcgcgccgactacttcggattaaccacggctcggccagaggccggacggctcagtgcatgccgccgtcgcggtcgcggatcgcgccgagatgttcgttgatccggaacacgatcaggatgaactcggcgataatgcgcgagaacacgatgccgacgaacatgctggcgatcgacgcaagcagctgaatgaagccgacgaacgggctgattgccattgccgtgaggctccacaggacgccggagattccgaacagcacgatgactgcgatcaccagccagtagaacgtcttgatgatcgtgggcgtgatgaagcggtcccactgaaacagatcctggaaatcgaacatcatggttctcccggccagccgacatatgattcgcgtctcgttcatcctactgcgtcacccccggcgtgatcacttcatcccaggcgcctgcgcggaggcggcaataggggacgaagcgttcgccgggccaatggtccaggaccgcgccaaggcgcttccgcaccacggggatcgctaccgcaggagcccaatcggtctcgccagaggccagccccggaccgggcgccggcagtccagggtcgagctatgcgagtgggccagttgtgattgctgcaaataacggccacaatcgggcttccctccggcatatcctcatctcatgaccacgctgaccttcgaagacttcaagcccggccgtttcggcacgttcggccctcgccatgtgtcgcgcgaggaaatcctcgccttcgccgccgaattcgacccgcagccgatgcatctcgacgaggaggcggcgaagaaatccatgctccgcggcctgtcgggctccggctggcatctcggctcgctgatgatgcggatgctgttcgacggcttcatcggccgcaccgcctcgctcggctcgcccggggtcaacgagatgcgctgggtggcgccgctgcgtccgggtgacgatttgacgctggacgtcggcgtcgtcgaggcgcgggtttcgaagagccgcccggaaaccggcatcgtcaccttcaagggcacgatgcgcaacgcgcgtggcgagattctgtgcgagatggagtcgccgatcatcgtcagccgccggcaaggcgcgggtaactaagatgcgtttcttcgaagacatcgagatcggcgaccagcgcgcgatcggttcattcaccttcaccgccgaggacatcaagcgctttgccgcgcagttcgatccgcagcgcttccacctcgacgaggaggcggggcgcaactcgctgttcggtgggctcgcggcatcgggctggcacgtcgccagcgtctgcatgaagctgctggtcgccgacggcaagcaactcgccgcgcaagccgctgcgcgcggtgagaaggtcgcggtctggggaccctcgccgggcttccgcgagctgcgctggatccgcccggtgctggcgggcgataccatcagctactccaaccaggtcgagaccaagcgcacgtccgggaagcggcccgaatggggcatccttcaggcccgcaacaccggcgtcaatcagcgcaatgaggtggtgttctcgttcctcgcgaccgccttcgtgccgcgccgcaatcccggttcctgatgttgcccccacgcctctgatgttgcccggacgccatggtggcagactaagtctgctgcctacgcagttgtgcgttgcgcggaactcattttttgctaacgcattttgaacctttgtccctgctctatggtttgagggcacggacatccgggcaggcaccactggggataccatggcagatcgcagcgcgctgaaactcgtcggaattatcttcgcgacggtaacggttgtcgtgatgctggcgaccggaatggtcgtgaaggggtttgccgacggcaactattccttcgagaccaccgcgagtatcgatcgctgatcgaccctctgtaaccgcgggctctcggcgagcgccccgggatgtgcgtttgcgtgtttcaatgtgatccgtcggcaggctgcgtcacattctaccggttaacctgttcaacgattccagatcagcaccatcacgacggtcgcggcggccaggatgccgataaaccggagcatgatcgtgccgatgccctgctgcggctggcgcagcggaataggatcggcgttatcaggccggacgctctgcatgaattctctccaaaatggatgcccgccagcgcgcggtccggacccgatttccggatcggacgcccgctcggcatcgaactttcaaatcggcttccgcaagaattgacgtcgcggagcttacaccgcgcagaataacgaatcgttcaacgccgcagcgggcatgcaaaacgaagccgccgccccccttgtcgggagacggcggctgctggccctagaacggatcgcgatcagctgttgcgcaggccgtcggcggcgcgcttccactgcgagacgttgtcggcgatcatgcgtgtcgacttcatcgcggcctggctgagttgggcatagccggagatctcgcgctggacgcgctggccctcggcatgcagcaggtcgcgcaggctctcgagctcgccgatcagcttctcgatctcggcgagcgaggtgccggcgacgcgctggatcagcgagttgacgttgctgaccgtggcgtcggtgttggtgtcggtcggcgcggtctccgggctcgccacggggcggcgcagataggcgatgtcgttgcgcacgaagtcgcggatgccggcttcgacttccgagaccgcagcgaggttggtgtcgacctcggacgtcgcctctgtggcttcctcggtacggttggtggcgttcatcggctttcccctgggttcgcaatagcgaagcgcggctgtcccccgcacgacgaattgatgaagttacggacctatcagtgccgccgaatttgaccgcatctgggccaagttggggcaatggttgatcattagcgcgacagggataacagatcgttcaccatgagcgcttgtagccggcgccgatgctcttgttgatcgtgccctggggggtctcgccgactgagccggagacggtgacgccgtcgaacagcttctgctcggcgccgatcttgcgcagccatttgtcgtcggaggtcgaggacagcgtctggcccgcggtgatgctggtgccggtgtcggtaacggacagccgtgctgactggccggtgtcgtagctgtgcgagggggcgccggtgatgccgggcaccgggaccacgccctgctggatcaaattatagccgccctgcagcgtcagcgaatactgctccgacagcggcaccgacttgctcagggaggtgccgatcttgctctggtcggcgccggggtcgacccgcgcctcgaccgaggtcttgtcccagatcgatgccacgccgggcgcggacatcgtggcccaggccgagccgccggattgcggcaggctgccgccattggccagccgttccgacaattgctccgacgccgtcgtcgtggccggtttggcgaccgtcatgtcggcgccgatgcgggtgtcgaggaacggcgagatcgactgcttgaccgacacggccgaggagccgttggcgttgttgttggtggtccaggacggatcgttgccggcgacgctgccgcgcttggccgcgcccttcggcgccagcgtgggcaggctggtggaatcggtgtcgagctggctccagtcgagcttgctctggtcgatgtccttcaggatgtcggcgtcattggcgtcggccgccggcggcgcctcgccggccgcggcctcggcgtcgtccgccggggtgtccttcgctgcgctgtccttggccgtattttggacggcgggagcgatctgccacggtgaactctgggcgccggccgaaaacgtgagcgccacgctgaagccggccgccagcactggcagcctcgcccagccaaatcgcaatgtggaagtcattcccagcccgcaaattccagagcggcagtgtgcgtttgccgtggcgcaaaattgtggcaacggaaccgcgaaagcaaatgatcaacgcgtgatctgtctaccgccggggcgggcgcctcaacgcgaagacgggcttcgcgcttgagatgccccggacatgacgaagccgtgaaatcggggggccgtcagaccgcgatgcgcggcagatggatcgggtagccgacggtctgctcgaccagatcgaaactgtcgaccagcacgcggaagctcgtcagcttgccggccctgaactgcgcgaaatgcgcgatcctgagcgagatcggcttgttggagtccagtgccgtcagcgaatagcgcagcatcgaggccgcggaatccgcacccagcatgatggactcgcggtcgaagcggtgaacccgcaggttctcgccgatctgccggatcacctcgagcactgcggccttgccgcggcgcgagccgaagaaggaaaacaggtcgatcggtccgtagatggcccattcgacttcgtcatcgagcatcagctcgacgtctgtaagctggcgttcgttgatcgcgcgatgcaatgcgcgcgaaaaacgccagaggctatgctctgtcattttggtctggtcctgaaactggattttcaaagcaagcgaatggcaggcggtcagcgccgacgccctgccaggttgctgcacatcgctattgtcgcctcagatagtgcggaatagccaaaacgcaaatgacttttttgcaatgcacaattgcgccggatccgaccggagtgtgacgctcgaaagcgttccggtcacacaattcagcggtcgcgttgccgcgccggctgccgttcgatcacgatctcggcgtcgcggatcgccaccactgcgaacagcagcgcaccgccgatgccgccgatcgcggcgccgagcggcatgaaggtgaagaacaccagcgttccgctgtcgaggcccgaggttctggccattccgatccaggtgagcccggctccgatgccgagagcggcgccgccgagggcgcccagtgcaaggccaagcacagcgagcaatgcgactttcatggtaatttcagccccgaccgcaacaagcccagtgataggtccgcggcgggccttcgaggttcaacaccgttgttgcgaatttgcggggcgtgacgcgtttgcgggaagctaaagcctgatgagattaggtcgagctggaacggcatcgaaagttcacctctcccttgggagaggccgatttgcgcagcaaatcgggtgaggggttgcggtctatcgagagagcaagagccctcacccggattgcttcgcaatccgacctctccccaccggggagaggtgaagcaagaccgcgccaggcctattcaaccaaaattcatcccgctttagcgctgcccgttcatcgcgcgcagcaccgcttcgctcggccagcagtcgaccttcagcccggcctgcttctgataagcgccgagcgccgcgcgggtctgcatcccggccttgccgtcgagcttgtccttgtagagcccgatcttggtcagctgctgctgcatcgcctcgacatcggcggaacggagctgcctggacgccgaccacggcgtcgcgaacggctgcgggctcgtcatccggtcggcgagatggccgacgaacagcacgtagaggtcggagaaattgtattccttgatcacgaagtagttcggcgtggtcaggaaggccgggccgtagatgccttccggctgcagcagcgaggccgattgcgcctgctcggtggcgctgagcctcagcccccgcaccggcacgaagcccgcccgcagccactggctgatcggttttgtcacttcgggcacgcccatcgtgcagtcggcattggccggcgccgtgacctcgtaggcccagcgcacgccgggctgccagcccttgttgacgagctgctgcgcggcggaggcgagcgcgtccggcaccgaatgccagatgtcgaccttgccgtcgccgtcgagatcgacgccgtgcttgtagtactccgacggcaggaactgggtatagccggtcgctcccgcccaggacgagcgcagctccttgcgcgtcaccacgccctcaccgaggatcttcagcgcgaggatgaactcggtgcggtactgatccttgcggcggccgacataggcctgcgtcgccaccacgcgcagcgtgtcgtagggcagcgcgtagcggccgtagtcggtctcgcggccccagatcgccagcacgatcggcgccggcacgccgaaccgcttttcgatcgcgtcgagcgacgagcgatacttctgcaacagccgctgcccctcggcggccagccgcgcgatcgaggcctccttgatgtagtcggccggcacctgcacgaactcggcctgcgccggcgcgccggtcttgggacgtccgggcaggatcagatcgggcagcttgtagtcgggctcgagcgagcgcgtctcgcgatcgaaggtttcacgcgacacgccggccgccttggcctccggccacagcgaggcgatgaactgggtgaacgcggcgtcggcggcgtatgccggccgttgcagcggcgcgcaaagcagcaccgcgcatgcgacaatggtggctggccatctcatgatcgatctcaccctgcaaaaaccggcattgcgacgtggattcggcaattgtcagaattcaattctgggtggtaagttttgcaatgcgcatatttttgtcatttccctccgaattggaattgcaggctggcaacatcgctcagtccctgcgcaattgcgaccacgacgttttcttttcgcatgacgatctcccaccgggcgacagcttcgatgcgcgggtcgaaaaagccatcgaaagcagcgattttatggtgttcctgatcagcccggaatcggtgaccagggggcgctacaccttgagcgagctcgccttcgccaagaccaaatggccgaacccgagcaatcgcgtgctgccggtgatgatggcgccgaccccgctcgaccaggtcccgacctatctcaaggcggtcacgatcctcgaaccccagggcagcgccgccgccgagacgcgggccgcggtggatcgcatgctggaagccaagaacgcgcagtcgcgcgaccggccgaacctcgccttcctcgtgctggcgttggcgtccgccatcgcgtgcagcctggtcacgacctatgcgctcaacgtcctgcaatattcgttcgtcgcctccgacgccggcggaatcacgatcctgcccggtgtgatcttcggcgcggcgatcgcgacctgcaatgtcgtgtttggcgcgaaggaccgatttcagctggcgctggtggtcgcaatcacgaccgtggcatggatcgcggcctacgatgccagcgccatcacgcttcaggcgctcggccaatacaccaagaccgtgccggtggacggcgacgccgcgagcccggcgcggatcaccgagacgctcgataacaatccgttgatgggttacctgatcggcggcatcggcggcgctgtcggtggagcaatcaccattctcggcgtgctgctggccaaccctgcgttcaggcggatcgacagcgtcgtggtgacctggatcgccgctgtcgcggctggaaccatctacggtgcaatcgtcaggctgccgcccctggcgggctggctggtgctgttcggcgtctggcagaccgcgttcatcctggccatggcccgcggatttccgcgcggcgcggcgcagatccccgaatggctcggcagatccgccccggcattgttcggctcgcgcgcggcgcgatgacgcaacgctaacatcccgtgtagatgatgtatttggattgaatcgcgttggctgcgcactcgcttcacctctcccagtggggagaggtcgatttgcgaag

SEQ ID NO: 61 - DNA, 21479 bp, Bradyrhizobium enterica
gcgaaatattttacgcgtggggacttgacgcgtttccactcaattgcctcgtcgggcaactcagcggcaggaggccaatccattccttcgtcattccggggcgcacctcctggcgcgagcccggaatccattcatccacagaacctgcgtcccaacggattccgggttctcgcctacggcgagccccggaatgacgaaggcgggatctgcttcgtcggatgccggcggcaaatatcacacgttattgtcggcgggcttcgtgctccctaccgtttgccgaaaacggtggcgggtggaaaatgcaggacatgctgacgcatcttgaaaagcttcgcaccgatgctgcggagtgcgccctgatccgcgacctcaccacggacatccagaagcgcgaactgttcgccaagctcgccgagcatctcgcggcgctcgcggcggaggttgaaaaggccatcgccgcggcacgccaggacggcttgcgcgacggcacatgaaagccgcagcgggtcgcgggaaccaacggcaccgcggcgcattgtcatttcgcccgtcggttgagccatcgcgtccggcttcgtgttggtatacttctccgccgggtgctatttgggcggcatctgttacgcttcaggaccctttcgtttggcacaatttgcacaaccagcattcagcaacgcgtcccgctcgcgcgggcggaccagcgccgccagagacgcgcaatgaagacggacaaggccatctggtacgtctcgttcgcgatgaggaatcccgacgccgggcaccatcgcttcgcgcgccagacccgcaccttcgcatccgagcaggatgccaaggcattcgcgcgcagcctgctggttcagacgcaggacatcagcgccggcacgatcaacccgcatatgccaaggcgtgtgatcgcgccggcggcgatcaccgcctgggccggcgacagctgaggtttcctcttacagaaatcgcgcaggcgcgaacggtgctagcggaatctccggcggctggccgctcagcagctgcgcgaccagccggccggtgcgggccgagccgaccaggccgacatggccgtggccgaaggcgtagaccacgtcgcgcgtcgcactggcatggccaatgcaaggacgcccgtcgggcatgctcgggcggtggccgaaccaggtcttgatccgcgatggcgggatatcccgcggcagcttcgggaacatgctgaacagatgctcgcgcaggatctcggcgcgctgccagttcggctcggcgtcgagcccggcgatctcgaccgtgccggcggcgcgcaggcccttgtcggtccagttgacgaccatctttgcatccgaggccatcatcgaattgcgcggtccggattccggattctcgatcatgacgtgatagccgcgctcggtttccagcggcagccgatcgccgatcgatgcggtcagctgcttggagcgcgcgccggcggcaacgactgccgcatcgcaggcgatctcgccgctctcgctgaccacggcgaccagcctgtcgcccgcaagcctgaggccggttgccttggcagccacgcgcgcggcaccgtgcgcgatcgcgtgcgcagcgagcgccgcgacataggcgccgggatcgcggcagcggcccgcctcctcgaccacgaccccgaacttgtagcgcggatgcagatcgggctcgcgctggcgcatctcgttttcgtcgagctccagccattcgatgccgacgcgcttgcggatgcgccagccgagatccttgtcgaaaggcgcgcgcgacggaaacacatgcatcacgccgcgccgttcgatcaactcggggacgccggcttcctcggcgagctgccggtgcagcagcggagcgtccttcagcagattgcgcatcgcccgcgcggtggcctcgacctgcgcctcggtccagctcgacagcagatatttgaccagccacggcaaagccttcggcagatacgaccagcggatcgcgagcggcccgagcgggtccatcaaataacccggcaccttcttccaggtgccgggttcggccggcgggatcaccgaatgcgacgacagccagccggcattgccacagctcgcggcctgctgaccgccgggctcgccgggatcaatcagcgtgacgcgatggcccgtgcgcagcgcttcgatggcactgatcacgccgaccgcaccggcgccgatgatcgcgacgtgacggccggtggacggagccattagcgcgaggcctttctcttgggcatgatcttgctcggaaaaccgctacgcacttttccggatcatgcctgtggcacaaaatccttgccgaccgacagcgcgcgctggtcgaccaggcagtgcaggatcgcgggcttgccggaggccagcgcgcgctcgaaggcgggcgcgaaatcctcggtgcgctcgacccgctcgccatggccgccgaacgccttggcgtagagtgcaaaatccggattcttgagctgggtgccgacgacgcggccgggatagtcgcgctcctgatgcatgcggatggtgccatattgcgcgttatcgatgacgacgacgatcagcggcgcgtcgtactgcacggcggtggcgaactcctgcccgttcatcaggaagcaaccgtcgccggcgaacgcgacgacgacgcgatccggatgctgccgcttggccatcacagccgccggcacgccatagcccatcgagcccgaggtcggcgcgagctgggccgcgaaactgtggaagcgatggtggcgatggatccagcccgcataattgccggcgccgttgcagacaatcgcatccttcggcaaacgatcgcgcagccaggtcacgacctcgccgtattggaaattgcccggcagctcgcgcggcttgtcggtccaggccagataatccgtgtgcgccttcgccgcctcgcccttccaggccggcgtggccgatggcttcatggtctcgacagcggaggcgaaggctgcgggcgtcgcctggatcgccagcgccggctggtagacccgaccgagctcctcggagccgggatggacatggaccagctgctggctcggtgtgggaatgtcgagcagcgtataggacgatgacggcatctccgacatgcggccgccgatcaggagaatgacgtcggcaccggtgatgcgatccctgagcttcgggctcgggccgatgccgagatcgccggcatagcgcgagtggtcggcgtcgatcagcgaagcgcgacggaacgaggtcgcgaccgggagatcaaaacgctcggcaaagcgcgcaatgcctttcgccgcctctgcggtccaggcagaaccgccgagcaccacgatcggcgccttggccgatgcgagcagcgcgccgagacgctcgagatcggccggcgccggccaggtggccgcgggcacgaccttcggcgcgtcggcgacggctgcggtttcggtcagcatgttctccggcagcgagatcaccaccggaccgggccgcccctgcaacgcgacgcggaaggcacgtgcgaccaactcgggaatgcggtcgggacgatcgatctcgacggcccatttcgccatggtgccgaacaccgccttgtagtcgagctcctggaacgcctcgcgctcgcgcatcccggtatcgacctggccgacgaacaggatcatcggggtggaatcctgcatcgcgatgtgcacgccatgcgcggcattggtcgagccggggccgcgggtgacgaagcagatgcccggacgtccggtgagcttgccgtaggcttccgccatcatcgccgcgccaccctcggcgcggcagatcatgacgtcgatcgcgctgtcatgcagcgcatcgagcgccgccagatagctctcgcccggcacgcaggtgacgcgctccacgccctgcgcgaccagctggtcgatcaggatctggcctccggtgcgggcattgcttctggtcatgagggctccctgcgggcattggcgcgccttggcgtcgcgcggatcgtcgtcccacgggggtatgatagaccgaaatttggtgcaaggccgaagccgcgtcgcgaggccgcagcgacgtcaagccatgcgataggcaatgggcaacgctattccatcgtcgatttccgcagagcagacgatcgccgcagggatcgccgcggcacggccggagcgcaggaccaccgcgtccggttgccgagccccgccgccgacctcatacggacggatatcacgctgcgggccaccggctccatcgcgcaacgcgccctgcccgacaacaacctcccggtgcattctgaagccggcccatcgtcggtggacacagcgtcgtggtgatcgcgcggcggcgccagcctgacagggcgtgcgcggtgaagtgatccgccgatcgatgtcgtcaacatcgaacacgcgctcggcggccgcgccatgccgacgtcttgcaacgcgcgtgtggctgcttccatatgcagaaaatgccaatgtgcacgctgacgaacatagtgcgggtcacgcgcactaccgtacgattacggtgcggcaagcaaccgctcggcagctgcggggctggttcgcgcgaatttcgccgcagatcgtcgcctttctcgcagaattcgactgcgctcgtcgcgtgcatcgcgcaatcagccttgtgccatcgcgcacggcacattgcatacgcttcttgatcgaactcgaatcacatacggttccatcgaaaatcagcacatgcattgcgcacattgcacaccctgccgcggcgggacgtgcggcttcgtgcgacctgtcgtaaccccattcaacttgcggaggactcgatgctgggaatcaagagcgttgcaagtgcagttacatcagacaattcttaccgcctgttcgacgacatgccgatcagcatcatgctctgcgagctgggcgatttcaggatcacctacatcaacgagtcgacgcggcagaatctgaagaagatcgagcatgtgctgccggtgaaggtcgacgcgctgatcggtcagtcgatcgatatctttcacaagaacccgcagcatcagcgccggttattgtccgatccgaagaacctgccgcacaaggcccgcatcaccatcggcggcgagacgctcgatctcactgtgacggcgatgaccaattcgcgcggccgctactcggggccgatgctgacctgggagctcgcgaccgagaaggcgcggctcgaaacccagaccgaacggctgttgcagatgctcgacaacatgccgatcaacatcatgatgtgcgacaccgacttcaacatcacctacatcaaccagaccagcctcaagacgctcgacaccgtgaagcatctgcttccggtgcggccggaccagatcctcggcaactcgttcgatatcttccacaagaacccggcgcatcagcgccgcatcatcggcgatcccaagaacctgccgcatgcggccaagatcaagctcggcccggaaacgctcgacctcagggtctccgggctgatggacaagcgcggcaactacaccggcgcgatgctgagctggtcggtggtgaccggcaatatcaagctggccgacgatttcgagagggacgtgaagggtcttgccgggatgctgtcatcggcctcgacgcagatgcagggcaccgcccgatcactgaccacgaccgccgaattcgtcaatcagcgttcggcgagtgcagcgtccgcctccgaagagctctcctcatccgtcaacgaaatcagccgccaggtgaccgaggcgagccgcatcgcccgcatggcggtcgaggaagcggagaaatccgacaagttagtcgcaggcctcgtgaccatggcgcagaagatcggcgacgtcgtcgcgctgatcaaccagatcgccggtcagaccaatctgctcgcgctcaacgcaacgatcgagtccgcgcgcgccggcgaggccggacgcggctttgccgtggtcgcatccgaggtcaaggcgctggccaaccagaccggcaaggccaccgaggacatctcggcacagatcaacgagatgcagaccgcaaccggcaacaccgccacggcgctgaaggcgatctcgcaggtcatcgtccagatcagcgagatctcaaccgtgatcgccagcgccgtcgaggagcaggccgcggccaccaaggaggtcaccgcgaacatcaacggaaccaccaaggcgatcgacgatgccagcaaggccgccgagaacgtgctcgcggcctccggagaagtcgccagcaacgcctccgagctggaagtccaggtcgacaagttcctcaagaacgtgcgggcgatgtaacgccgccgagatcgcgcgcttgcctacagcgagcgcgcgatcaggaccttcatgatctcgttggtgccgccatagatcttctggatgcgggaatcgatgaacatccgcgagatcgggtattcctgcatgtagccgtagccgccgtgcagctgcaggcattcgtcggcggtctcgacctgcttctgcgagcaccaccatttcgccatcgaagcggtgaccgtgtcgaggtcgccggcgatcagccgctcgacgcaccagtcgacgaagacccgggcgatcatcgcctcggtcttgcgctcggcgagcgtgaaggcggtgttctggaactcgatcagcggcttgccgaacgcggtgcgcgccttggtgtagtcggcggtgatcttgaccgcgcgctccatcgaggcgaccgcgccgatcgcgagcgacagccgctcctgcggcaattgctgcatcagctgcgcgaagccgttgccctcctcattgccgagcaggttctccggcggcaccgtgacattgtcgaagaacagctccgaggtgtcggaggcgtgcaggccgatcttgtcgaggttgcggccgcggcgatagccctccgcgccggctgtttcgacgacgatcaatgagatgcccttggcgccgggtgcgccggtgcgcgccaccacgatcacgagatcggcggcctggccgttggtgatgaacgtcttctggccattgatgacgtaagcattgccctgcttcttcgccgtggtcttgacggcctgcaggtctgagccggtgccgggctcggtcatcgcgatggcgccgaccatctcgcccgacgccatcttgggcagccagcgccgcttctgctcttccgagccgtagttgaggatgtagtgcgcgacgatcgcgctgtgcacggagacgccggtggtcagttccggcacggtgctctcgaggtcatcgagcaccgccgcgtcataggcgaaggtggtcccgaggccgccataggcctcgggcacgctcggcagcaatgcacccatctcgccgagcgcgcgccaggccgagcggtcgaccagcttctgcgcgcgccatttttcggcatgcggcgccaggtccttggcgaggaatttgcggaactggtcacggaaggtgtccagctcctcggtcatccaggacgatcggtagtgcatgttatccccgtatcagatgagcagaccgccgccggcgacgatcacctgaccgctgatgtagttcgattccgggctgcagaacagatagaccgcgtccgccgcctcttccggcgtgccgccgcggccgagcgggatcatccggcccatcgcctccagcatctgcggctgcaccccgaccttgatgtcgcggcccgcgacgtcgatggtcttctgctgggtctcgatcggctgggtcaggcgggtgttgatcaggccgaacgccacgcaattgacgttgaccttgtagcggccccactccttgcacatggtgcgggtcagcccgatcagcgacgcctttgcggatgaatagctcgcctgaccggcattgccgtagagaccggcgatcgaggagatgttgacgaccttgcggaacacctcgcggcccgcttccgcctccttcttcgccagcacccggatcggctcggatgccgcgcgcatgatgcggaacggggcgaccagatggacgtcgagcatcgcctggaactgctcgtcggtcatcttctggatcgtcgagtcccaggtgtagccggcattgttgacgatgatgtcgaggccgccgaactgctcgatggcgcggcctacgaaacgatcggcgaagccggcctcggtcacgctgccattgaccgcgatcgcttcgccgcccatggccttgatctcggcgacgaccgcgttgcccggctcggcatcgaggtcattgaccacgacgcgcgcgccctcgctcgcaagcttcagcgcaatcgcccgcccgatgccacggccagagccggagacgagcgcgacctttccttgcagtttcgacatgatctctcctaaagcgcgatgatcgcttcgccggcgagcttgatctcgccgtgctggtccttggtggtgagcgcgagtttcgcgcgctgctcaccgccctgctcgatcaactcggtcaccatgccttcgcaggtcagctgcgcgccgagctgggtgatcgcggcaaagcgggtcgagaacgagcggatccgcgagggggcgaccgcatcggtcagcgcctggccgagataacccatcacgagcatgccgtgcgcgaacacgtcgggaaacccggccgccttggcgaagtcgatgtcgacatggatcgggttgtggtcgccggaagcgccgcaatacagcgcgaggcgatgccgggtgatcggcggaaactccttgtggacgatgacatcgccgaccgcgggaacgctgctgctcatgacggcctcgcattgcgcaccacgatggtgcgcgagacatcggcgacatggacgccgttctggttggtgaccggtgtatcgaccacgatcagcgtcatcgccccgcccttcttgtcggtcacgctcgtgacgcttgggcggaacgtcagggtgtcgccgaccacgacgggcgcgtgataatcgaagcgctgctcgccatgcagcacccgggcgagatcgatgccgagtgcggtcaggaactcgaacgggtcaggcgcgtccatcatctcgaggcagaacagataggtcggcggcaccggcgccgccgccccattacggtagaccgggttggtctcgccgagcgtatcgaggaagaagcgcaggcgtcccggctcgacgcgcgcggtcaccggcttgaatgcacgcccgacggcggattgatcgaccatgggcggcctcaggcacgttcgtagagcgtgacgacgcaggcgccgccgagaccgagattgtgctgcaggccgagccgcgcgccctccacctgcgtcgccgccgcggtgccgcgcagctgccgggtcagctcgtagcattgcgcaagcccggtggcgccgagcggatggcccttcgacagcaggccgccggacggattggtgacgatccggccgccatagctgttgtcgccatcgtcgatgaacttggcggcctcgccctcgccgcacaggccgagcccttcataggtgatcagctcgttatgcgcgaagcagtcgtgcagctcgaccacgtcgaggtccgcaggtccgatgccggcggcttcatagaccttactcgcggcatcgcgcgccatgtcgtagccgaccacctgcatcatgtcggaggcgccgaaggtcgacggcgtgtcggtcgtcatcgcctgcgccgcgatgcgcacctgcttgttgaggccgtgctggtcggcgaatttctccgagaccaggatcgcggcggcgccgccgcaggtcggcgggcatgccatcagccgcgtcatcacgcccggccagatcacctggtcgttcatcacgtcgtcggcggtgacctccttgcggaacaacgccagcggattgttcctggcatggcggctcgccttggcgcggactttcgcgaacgccgagagcggcgtgccgtatttcttcatgtggctgagacccgcgccgccgaaatagcgcagcgccagcggcacgccgggcgcatcgaccagtctgtcggccgcagcgtcgaaatcgtcgaacgcgctggggcggtcggtgaacacggcgccgagcgcgccgggcttcatctgctcgaagccgagcgccatcacgcaatcggccgcaccggactcgatcgcctgccgcgccaggaacagcgcggtcgagccggtcgagcaattgttgttgacgttgacgatcgggatgccggtcatgccgaccggatagagcgcgcgctggccgcaggtggagtcgccgtagacgtagccgacatacgcctgctgcaccttgccgtagtcgaggccggcgtcggcgagcgcgagcttcgcggcctcggcgcccatcacatgatacggcgcattggcgccgggcttgacgaacgggatcatgccgaccccggcaacataggtgcgtgacgccatcacgtgtcctccctaaaattacccactggactatttattacccatgggtaatatacgggacatcacgcaaagtcaatgcggcatcggcttcacgacaccggcttcaagagatggacgacggtcacatcccctcctccagccagtccccctggctgcccttcgagagccggcgccgcgcccgcgatgagaagcgcgaggcggtgctgcgcacggccgtcgcgctgttcctggaacagggctaccatcgcgccacgctgaacgaggtcgccagacggctcaacatcaccaagccggcgctctacaattacttccgcagcaaggacgagatcctctacgaatgctggtcgatcggcaatgagctggtcgacgactgcatcgccgagacctcggccgccggcggctcggggctcgacaagctgcgcaagctgatcgtccgctatgccgagctgatgaccgaggactacggcaagagcctggtcaggttcgacctccgcgatctcagcgagaacaaccgcaagatcgtgcagaccgccaagcggcggatcgatcgcgccttccgcgactatatcgctggtggcgtcgaggacggttcggtgaaacactgcgatccgaagctcgcggcgttcgcgattgcgggctcgctgaactggatcggacactggttccagcccggcggcgcgatgaccggacgcgccgtcgccgaggaattcgcgatccgcctcaccgaggggattgccacgacggcaacgcgcaagacagcgcagaaagcagccgttccggctgcagagaaggcggacaaaccgcctcgcaagggaaacacaccaagggagaatcagagtgaacatcacacacgggctgcggcgcgcgctgcaggtcaatccaaacggcctcgcggtcgtctgcggtgagcgacgccgcaactggcgcgaggtcggcacccgcgtcgcccgcctcgcctccggcatccgcgcgctcggcgcagcgaatggcgaccgcgtcgcaatcctgtcgctgaactccgaccgctatctcgagctctatctggcagtcggctgggccggcgccgtgatcgtgccgctcaacatccgctggtctccgatcgagaacgaggacgcgctgcgcgactgccgcgccacgatcctgttcgtcgacaaggcgttcgcggcggtcggcgcgacgctcgcggacgcgatccccggtctgacgctgatctatgccgacgagggcgaaacgcctgaaggcatggagaactatgagacgctgatcacgcgcagcgaaccgattccggatgcgatgcgcacccgcgacgatctcgccggcatcttctacaccggcggcaccaccggccgctccaagggcgtgatgctgagccacggcaacctgatggccaatgcgctcaacgccctcggcgaaggcctgtggcccagcagcacgatctacctgcacgcggcgccgatgttccatctcgccaacggcgcggcgatgtattcagtgctgttgtcgggcggctccaatgtcgtgatccagggctttacgcccgacggcgtcgccgctgccgtgcagaaggagcgcgtcaccgacgtgctgctggtgccgaccatgatccagatgttcgtcgatcacccgacactcgcgaattacgacctgtcgtcgctgaagcggatcgcctacggcgcctcggtgatcagcgacgcggtgctgatgcgcgcgatgaaggcgttgccgcatgtcgagttcacgcaagcctacggcatgaccgagctgtcgccgatcgcaaccctgctgcactggaaggagcatatcggcgacggccgcgccaagggccggcatcgcggcgccggccgtgccacgctcggcgccgaggtcaagatcgtcgatgcggaggacaaggtcgtgccgacgggcaccgtcggcgagatcgcggtgcgcggtgacatggtgatgatgggctatcgggaacggccggaggagaccgcgcgcgccgtgatcgacggctggatgcacaccggggacggcggctacatggatgcggacggcttcgtttacgtcgtcgaccgggtcaaggacatgatcatctccggcggcgagaacgtctattcggccgaagtcgagaacgctctcgcccagcacccgagcgtggcgcagtgcgccgtgatcggcattccgagcgagcgctggggcgagcaggttcacgccgtcgtggtgatgaagagcggcgccagcgccacgccggaagagctgatggcgcactgccacacgttgatcgccggctacaaatgcccgcgtagcgtcgacatcaccgcaacggcgctgccgctctccggcgccggcaagatcctgaagcgcgagctgcgcaagccgtattgggagaaccgcgagcggcgggtgagctgacgcctgacccgccctacgcactgcatagggccgcgccgacagcatgcgttgacatcgaggcacgcggccgattggatcgtttctagatccaatccagcgagttccgatgtccgcacctgataccaacgccgacggcaagccccgccgcctgatgcaccgccgctccgtcgaatgtctcggctatctccgcgacgacgggctgtgggaagtcgaggcgcggctggtcgacaccaagccctatgcacgacaggacaggcatcgcggcctgcaacaacccgacgatcccgtgcacgacatcaggctgcgtctcgcggtcgacgacagtttcacgatccgtgagaccggcaccaatatggcctcgacgccctacccgtcctgcctcgacgtcgaagggattttgcagcggctggtcggcgaacgcataggcaagggctggcgcgagctggtgcgccgcaagatcggcagactggagacctgcacccatctcgccgagctgctgggtcccgcggtgacgacgctgttccagaccgcgaccgcaggcaagaacccgaagggccgcgactcgctcgatcatcagcgcgatgccaccgagccgccattcttcgtcggcggctgctattcgtggcggctggacggccccgtcgtggccgagacatttccgcagttcgcgacgaagcccatcgaggtgaagcaggggtcctgagcgaagcatcgccgccgcccgggtgatagtctgcgagaaggacgatcaggaggtgagcgtggagaagtacggcgccgggtcgatcgtcgtctccgactatgaccccagctggcccgcactgttcgcgcaggagcgcgcgcggatcgcgcaggcactcgcgccattcgcgttggccattgagcatgtcggcagcactgccgttccaggcctcccgtcgaagccgatcatcgacctcttggttggtgtccctaaccttgaacaggcccggcagcgctgcatgacaccgctcgaggcactcggctatatctgcatgccggaatacgcgtcatggctcccccgcgagttgttcttccgcaaggggccgccaggtccctggacgcaccacatgcatgtgatggagctatcgcatccgcgatgggaggcactggtggtgtttcgcgactatcttcgcgcacaccccgaggcagcccgcgcctacgcagatatcaagcgcgagcttgccgcttcgtcaaaggacgacatcggggcatatcgaaacggaaaaaccgcgttcgtcgaggagacgacggcaaaagctcgggcgtggcaccgagcggtacgcgattgaagcacaagtggtcccccgcacgggtgcacgctcatcaccggacatgggtcctcgcgatcagccgccgtgccatgcagccatgcatcgcaatgggttgatccgcgtcgcgctcacgtagtcgtccgcatgagcgaacatacggccggcgccaagctgcaggcggccgggctggtgaccgtgttggccgggctctccctcttgcaacgcccttgcaatttatagaccaattagtctatatatcaacaatgagccgccagatcgctgtaccgccgccccgtggccgcccccggagtttcgacgtcgaagccgccgtcgaacgcgcaatgaatgtgttctggtcgcgcggctatcacgccacggcgctgccggacctgcttcgtgcgacgaagctctcgcgcggcagtctctacgccgcattcggcgacaagcactcgctgttcctgcgcgcgctcgatcgctacattgccgatgccctgacacggatggacgccgaattcgacccgcgcagggagccggtcgccggcctgcgggcctaccttgccggctatgtcgagcgcaacagcggtgccaatggccgacgcggatgcctgttggtagccaccaccatggaactggctggccgtgatgccgacgttgatcgtcgcatcgcgggctttttcagagacatggaggccagggtggcagatgcgctttcccgggcaaaaatggcgggcaagctggccgacggcgtcgaaccttcaagtgccgcccgaattctcgtctgtttcgtcgaggggctgcgggtggttggtaaaacggcgccgacacggatcatttcgcaagccaccgttgacgcttttctcgagcgcttcatcaggtaagtcgacacatcgacgcctcttattggcgcgccgatatatagaccgatcggtcgtgaaagaaggaagctatgtctgcgatccagatcgtctgcgctgtgctcgttcccctgctctggggctatcagttcgtggccatcaaggtgggcgtcatggaatttccgcctctcttcttcctcgcactgcgcttcctggctatcgcgctactgcttattccattcgtcaaaaggccgacacgtcaacagttcggccctgtcgcagctatttcggttttccttggcgggctaaacttcgggctgttctatgtcggccttgggctcggctcgggaagcctatcggccgtcgcgtatcaactcgctccgccgttcaccgtcctgttggcttggccactgcttgcggagaggccgtctctgactgcttccgccggcgtggtgcttgcattcgtcggtgtggtcgtgctggcagcagggcctgggctctcggcaaacgcccttccgttgctgctcgtggtcggggcagccttcgcgttcgcggtgtcgaacgtcctgacgaaacgctacggcccttttgatcccctgatgttgatggggtggttctcgctgctcacggtaccgcaggtcacgttgatgtcgttgctccttgaacatggacaagcggcgagccttgtcacggcggatcatcgtggctggctggcactcgcctatacaattttcgtcggaggaattgccgggtttggcctctggttctggctgatcgcccgttgctcgatgggccgcgtcgcgccgttcggcctgctgcttccggtgttcgcactgatttcgagcgtcatgttccttggcgacagcatgaccccgaagctgatcgtcggggggctgctcgcgatttccggcgttgccctcacgcaattcaggccgagcgcaaggccggtttgaatccggaagccgcactgtcgcgactgccggattcggccccggtcggcattcacgccgcggcggaatgctcgacgacggcttgcggcgggttacggaaaccgatcgcgatccggttgtaggtgttcatcaggccgatcgcgatggtcaggtcgaccagctgcttttcgttgaacacggcacgcgccgcctgatagtcctggtccgggatcgcggtctgcgccacccgggtgacggtttcggcccaggccagcgccgcgcgctcctcggcgtcgaacagcgcctccgcctcgtgccagacctgcagcagcgcgagcttctcgatcttgacgcccatcttccgcagcgagcgcgtatgcatgtcgaggcaataggcgcagccgttgatctgcgagatgcgcagatagaccagctcgatcagctgcgcggacagtccgcattgggtgagatagccatagacgccaccgagcgccttgatgcccgcaggggccgccttgttgtagtcgatgcgcatgctcactgcttgtgcccttgcttttgctctgcctggtcgtagacggtcagcgccttgtcgttgctgtcgacgacgaagacggcaagcagcttcgcgggctcggtgctgctggcattgcgtccgatcacgtgatgcgcgccgggcgcctcgaagaagctgtcgccggcgcgatagacatgcggcgcggcctcgccctcgacctggctctcgatcgcgccctgcaggacatagacatacaggaaggcggatttggcatgacggtgcggcgccgacggatcgccaggcgggaagtcgacctcggccgtgaccagcgacttgccgggaatgttcgtgatcacgtgctcgaacttcggcgtcaccgtttccgctctcgccgcggtcgcaagcaccgcgcaggccagaataaccggcagtaggatcttcatctgatcgcctccattgctgccggatagatgcgggcatggaggcctgaaaagaagcaccaagaatgaaccgaattggtgtaccacgggccatgccaaagccgcttcccatcgcgctcgaccgctcggccaaaacgccgctctccgagcagatccgcaaggcgatcgtgacggcgatcgacaatggcgtgctggtgccgggcgcacggttgccgtcgtggctcgacctcgccgcgcagctcggcgtcgcccgcggtacggtgcgggcggcctacgacagattgtcggacacccagcacatcgtgtcgtcgaaggcgaatggcaccagcgtcgcgaggcgtccaggaaaggccgccaagcccgacgcgccggtcgctcccggatcggtcgtggagatgtttcatgacctgaccggccagggacacttccggatgggcgttcccgcgcaggactccctccccgcaaagctgctggcacgaatccgcgcgcgcgccgtgcgagcagagctgagcgcggtgagccgctatggcgatccgcgcggcgagctcgaactgcggcgtgagatcgcggcgcatcttgcgatcgcgcgcggcgtggaatgctcgccggcgcagatcgtcgtcacgtcaggcttcagcggcggacttggcctcgcgctgcgcgtgctcggcctcgaaggccgccgcgcatggatggaagacccgggatttccattgacccgaaaggggctcgagctcgcccggctggagctggtcgcagtccccgtcgacggcaacggcatcgacgtcgaccatggcctcaaacacgcccccgatgcggcgctcgcagtcgtgacgccgggacagcaggcgccgctcggcccgccattgtcggcggcgcgccgcgcgcagctgctcgactgggccacgcagaccggcggctggatcatcgaggacgactatctcggcgagttgcagctcgacggccgcgccgcgccggcgctcgcctcgctcgatcgcaccggccgcgtgatccatctcggctcattcagcaagaccatctcgccgacgctgcggctcggcttcctggttgcgcccgagccattggccgcggagttcgccgatgtcgcgacctgcctcgtcccggcccccggaccggccgtgcagctttcgaccgcggagttcatgcgcgatggccactacatccgccacctccgacgcaccaagcaagcctattgcgacaaccgcgacgccctgacatctgcgctgcgtccgtggagcaacgacgtgcgggtcgcgggacttgctgtgatgctgacgctgccggaccaggccggggatgtcgaaatcgcgcggcaggtgctggcgcacgggctggcgcctgccccgctctcgccctggtatctctcaccgaagcgcgcgcaacccggcctgctgctcggcattgcgaccgtgcccgatcgcggcgttcctgctgcctgcaagcgtctgttcgaggcgatccacgccgaagccgcgccagccccgcgccaggtcaggaagtccgcaggcccgtgagcgcgaggctcagcgcccgcagccgctggcgcgcctcggcatcataggcctgcgcatgggcgcgggcctcgcgcttgccgtcgaagaacagcccgctcttgtcggcgacgtcgtcgtcctggaccaggcgcaggatggcgtcgccgccctgctccacggtcgagatcggcgtcgcgccgctggcgcgcaccatcgtggtgttcatgtaggtcgccggatgcagcgaattgacggtgacgccggagccctgcaactgctcggcgagatcgatggtgaacatgatctgcgacagcttgctctgcgcataggcgcggccgccgctgtagttcctggtgatcatcacgtcgccgaaatcgatcgggtgctggccgagcgaggcgacgttgacgatgcgcgccggggcactcgccttcagccgcggcaacagcagatgcgcaagcaggaagccggcgaggtaattcaccgcgaagcgcagctcgtggccatccttgctggtctgccgcgccgggccctcgttctgcgagccgataccggcattgctgaccagcacgtcgaggcgctcctggtcgtcgagcaccagctgggcaaactcgcggacctcggcgagcgaggacagatcggcctgatagaacatcggctcgcggccactgacccgcttgatctcgtcggcaagggcctgcgcccgcttggtatcgcggccatggatcaggacccgggcgccggcagccgccagcttcatcgccacgtaccggccgacgccatcggtggaaccggtgatcagcacggtcttgcctgccatattcatcgcaatcgcccttcgatcgttcgcccagtgctgccagcaaagataaatgcgcggcacggactttgccatggcgccgccagcgccggaacggccgaaatggaccgcccacagcgctgccatggccgcccggcgtacagcctgtcgcgcggcctgccgtcgcgcggcgccgcgccgcgcgtcaacgtgaatgcattctgatagtctcgacacgaacgaccaagtcaggatcggaatgtcctcgaccattccagaccggatcgtgcggaaaactccctcgcgggagccgttcggcatgctcctgctgttcgcggtgctgtcagcgctgccgatcgtcctgacgctgcgtctggttgagcccgcactcgtgctgcccgcgctcagcctcgtgttgttcgctgaggcagccatggccgcgcttgcggcgcgcgtgatccgcgtgcgcgcaagcgcggcgaacctcacgctgtgggattcgccggtgcgttcacctttatggggtgtgcagcggcgatcctcggcgagccggaccaagcggcgctgttcttcgaagaacaggcggcgtttcgtccagcatcacgaccgtaatcccaggccgggcccctctggcagccacaagctgcgatgtcggactggaactcagttggagtggccctgcctcgacccgcgacgcgacaccgtcgcggcggatttgccgtcggatgacgaacgcatccggcttcgtcgaacggtccactccccgacctcagggggatgatccatgtccgaactattctcactcgacgcgctcagcgctttgctgcaagtcgtcgtcatcgacctcgtgctggccggcgacaatgccgtggtgatcggccttgccgcggccggcctgcaggcaaagcaacgcggcaaggcgatcctgatcggcatcggcgccgcgacgctgttgcgcatcgtgttcgcgctgctcacaacgcagttgatgcagatcgtcggcctgctgttggccggcggcatcctcttgctgtgggtgtgctggaagatgtggcgggagctgcgcgccagcgcgcacaggaccgcggccgaacacacagccgacggcgcggccggccagcgcaagacgctctggcaggccacgacccagatcatcgtcgccgacgtctcgatgtcgctcgacaacgtgctggcggttgccggcgcggcgcgcgagcagccgatcgtgctggtgttcggccttgcgctctcgatcgcgatgatgggcgcggccgccaccttcatcgcgcggctcctgcagaaccaccgctggatcgcctatctcggcctcgccgtgatcctctatgtcgccgtcgacatgaccattcgcggcgccaacgagatcgccaaggtcgcgccggcctgacgaaagcaaaacggcgggtcttcaggcccgccgctccgcatatcgataacgcgcgatgcgtcagtggatttccgacgaacgcttcagcgcgtccttcagcttctcgagggaaaagtccttgctgcgcgcgatgtcgaggatcggggtctcgcggcggccgcacagctcggcggcctccggcagcttggccgcgacgtcataggggatcacgatcgcgccgtggctgtcggcgtggatcaggtcgtcggagcgcaccgtcatgccggcgacgcggacctcgccgccaaaactctcggcgtgcacccaggcgtgcgacgggccgatcgaaccggccagcgcctggaagcccggcgcccattgcgggatgtcgcggatcgagccgtcggtgatgacgccgaggcagccgagcgccttgtgcacggcgctctgcacctcgccccagaacgcgccgtagccgacgtcgggcccgtcgatgtcctggatgacggagatacgcggtccgaagccggtgccgacatattcgtaatagtcgatgcggcgcttcgactgctcctcggccgagagcccggatttcagcaccgagcggatcgcaaccgtgcgcgcatagccgacgatcggcggcagcgtcgggaacgggcagaccagcggcttcacggtgtagccgatcagacgccgctcgggcgccacgatctccatcgcgttgcagatcgtcggcgtgtcgtagcgcgccaacgcctcgaggacggaagcaggcagcggggcggaagcggatgtcgtcacggcgtttctctcctgattattggcgtcggatttctttgtttgagcatgatctcttcggaaaaccggtttccacttttccggatcatgctcgagcgggccgtcccagcctatagccgagatcagaggcgaacccaaccgaggcacgctcatggctgatatttgcgggagtgaagcccactctatcaccgtcaccctgacagcttgtgaag

SEQ ID NO: 62 - DNA, 21326 bp, Bradyrhizobium enterica
acaccgcacggcgcaggccgggctcccgttcgaggcgagagcccgtccagcgccgcgctcgcatctgttgctgggcatagctgggcttgtagccgggcgatgacgtgtgggtggagacgcagcttcgcgttcttgcgacatatggcgcgactcgatcgctgagatatagtccggacgcctgttcaacaaccattcggagcaccgcagaatgattacctgctacctgcgttatgagatcaggctgggcaagctcgccgacttcgaaacctatgctgcgatgtggcttgagctgctgccgcggttcggcggtgtccatcacggctacttcctgccgtccgaaggcgcgagcgacgtcgcgctggcgatgttcagctttccgagcctcgcggcctatgagcagtatcggaaggattccgccgcggatccggacgtgcagaaagcgatcgctttcgcaaagcagacggggtgcttcacacgctacgatcggtcgttcttccggccgttgtttccgaaagcggcttgatgacagtgaccggcccggacaaagcaagtgcagacctgccgcccggcgcgcaacttctcggacgcgagtggctgggcttcgacggcgtggtcacctcgatccgcttcgaagcgaagcccgtgttcaccaaccggcacggcacgatccagggcggcttcctcgccgcaatgctggattcggccacgggcctcggcgcacttgcagcacttcccgcaacacagacggtggtcaccaaaaccctcgccacgcgacttctcaaaccggcgcgcgcgggtccgatcacggccaaggcgaaggtcgtctcgcagaccgggcgcgatatgatcgttgaggccgacctgatcgatgcggagaacgtgacggtcgccaccgccaccgccgagttgcgaattctcgacaagcgatagccctatgcgttggtctcccttgctgttctccgctctggtgtcgctcagcctctcggctgcacaggcggctggactgcgggctttcaacgtgcccgcgagcagtgacgggcccgcgatccgaggggtgatctggcatccctgcgcggaagctccgcacgagatcgatgcccgtggcggccgaacgttcttcggcgtgaacgactgcccgatcattggaaacaagctgccgctgatcgtgatctcgcatggacgacgcggatggctcggcggtcatcacgacactgccgctgcgctggcggatgccggcttcatggttctgacattcaatcatccgaccgacaccgaacgcgataccagcggcaccgacagtcttgccgtgacggtcgaacggcccgccgacatcaagcgcgcaattgactacgcacttcaaggatggcctgatgctgctcgcatcgacgccggacgcatcggtctctacggtttctcgtggggcggctatactgccctcgcggcgattggtggtgagcccgatctccgcaaggacctgccgaactgccagacgtcgagcttgcgggcctgcaaggaactcgaaagcggagagaagccgcgcggaccgatcatccatgatccgcggatcaaggctgccatcatcgtcgatccctttcccgtgctgttctttgcgcccgaggatctgaaagccgtggcgattccggttcaattgtggagctcggaccccgcgcagaacggcgacggtctctccggatgctgtgctgccgccatcaacgagcggcttccgtccaaaccggactttcacctggtgaaagatgcgaagcacttctctttcctcgcgacttgcacggcggaggagacagcgaagatggctgccatttgtaccgacgcgccgggcttcgatcgcgtcgccttccatcggcgctttcacgccgcggccatcgcgttcttcaggacgcaccttgccgagaccgggacgcgatagcgttacaccccgagcttgtcccgcacccgcccggtcagcaccgcggcggtgacgccgacccgccagaacgcgtgcatcggcatcggcttgatgccggtcacgggcatgtcgatctcggccttggcaccgccgatcaggcggcgggcgagctgcgcgcccatcgcggtcgagagcgcgacaccgcggccgttgcagccgagcgagatcagcaaattctccgcgggctcatggacatgcgggtagtggtcggcggtgatggcaagacggctgttccagccatgggtccagctcgtgcccttgagctgcggccacagccgctcggcgtagcggatcagataggcgacgtcggtcggcttgctgatccagcgcatcgggccacggccgcccatcaacaggcggttgtgctggtcgatgcggtagtagacggtgatatggccgctctcgtagagcaccggacgcgtcggcatgattgaacgcgcgacctcgtcgggcagcggcgcggtcgccgcgatcgacgagaacaccggcacgatggtgcggcgaagagcgggccagagatcgtcggtaaagccgttggtcgcgagcagcaccttgtcggcatgcacgatggcgcgcggagtttcgatccgccagcggctgccgtcacggcggagccgcagcgccggcgtctcgccatggacggcaacgccggtcccgatcgcggcgcgcgccaggccgcgggcgtagctcagcggatgcaggtcaccgccgcgcgcatcgagcaacgcgcagaggtaacggtcgctgccggtcatcgcgcgcagttcggcggcgttgagcagcttcaccggcatgccgcgctggatgcactgtttggccgttgtctcaatcgctgcggcactggcctcgttgtaggccgcgcgcagcgtaccattctgccgcgcctcgcaggggatctggtagcggcggatcagatcatgggtgaagttggtggtgccgtaggagaattcgaccatgcggcggccgagatcggcgccgaaatcctgctcgatctgatcggggtcgtgcttcaaaccgggattggtctgcccgccattgttgccggacgcgccccagcccggctcctgcgcctccaacacggtcgcgagcacgccctgctcggcgaggtacagcgcggtcgacaggccggtgaagccgccgccgatgatcgcaaccggcacggtcttgtccgacgtcagcggcggcgttggcgtcgcctcgacggcggtgtcggcataaaggcttggtggcagcggcagacgagccgatgtggtcatgattggagctcgtgcttcacctctcccatcgggagaggtcggcgcgaagcgccgggtgaggggttcaggtcccacgagagagcgtcacccctcacccggatcgcatctaacgatgcgatccgacctctcccacaaggggagaggtggaccgttggcatggcaacgtctctattcaagtcaaccatcagcgatcacagcggatgcagcacgcggcgcaggaaatcctgggtgcgcgggtgctgcggttggttgaggacggatttggcggcgccctgctcgacgatgacgccgccgtcgatgaacagcacgcggtcggcgacgtcgcgggcaaagcccatctcgtgggtgacgaccaccatggtcatgccgtcatcggcgagcttgcgcatcaccgacaggacgtcgccgaccaactccggatcgagcgccgaggtcggctcgtcgaacaggatcgccttcggctgcatcgccagcgcgcgggcgatcgcgacgcgctgctgctggccgccggagagctttggcggatgcacctcggccttgtcggcgaggccgacctgggcgagcagcgcgcggccgcgggcgatcgcctgctcgcgcggctctttcttcacatagagcgggccctcgatgacgttctcgagcgcggtgcgatgcggaaacagattgaagcgctggaacaccatcgagacctgggtgcggatcgcgacgatcgagcggtcattgctgtcgacacgcgcgccctcgacgctgatctcgccgcgatcgtagctctcgagcccgttgatgcagcgcaggatggtcgacttgccggagcctgaggggccgatgatgcagaccacctcgctcttggcgaccgaggcggtgatgcccttcagcacctcgaccttgccgaagctcttgtggacgtcgcggagctcgatcatttgcggttcgccttgttctcgaagtgccgaaccagcaggatgagcggaatgctcatggtgaggtacatcagcgccaccagcgtgaacacgctggtgttcttgaaggtcgaggacgcgatcagcttgccctgcagcgccagctcggcgaccgtgatggtggaggcctgcgatgaatccttcagcatcatgatcatgacgttaccgtagggcggcaggatgatcctgaccgcctgcggcagcaccacgcggcgcatggtgagccaccagcccatgccgatggtctgcgccgcctcgatctgccccttgtcgatcgcctcgatgccggcgcggaaattttccgcctgataggccgaataggcgatgccgagcccgatgatcgcggcctgcaacgccgacagcgcgatgccgaaatcgggcatcacgaaatagatgtagaacagcaacacgatgatcgggatgccgcggatcagattgatgagcgcggcgctgagccaaacgaggatgcggatgccggacacccgcatcaatgcccacaccagcccgagcacggtcgacagcgcgagcgagccgattgtgacgacgatggtcagccagacaccctgcaacaggatcggcacgaactcgacggcgtcgtggaagaatttttgcatcggctagccgtatccaatcccgtcacatgctcgagtgcttttaccgtcaccctgagagagtgtgaatgtattcagcgtcgtcctggcgaaagccaggacccattaccccaaccgcttgctgctgtgcgacgctggggccacgatcgcactctgcatcgaactcggtggttatgggtcctggcttacgccaggacgacgccgtggggcccaccggccgggccgtgcatccttcgagactcggcgaagacgccgctcctcaggatgacgggtcacctgaaatcccgtcgaagcactggccctcacgacccgctggccttctggccccatttctccaggatcttcgcgatcgtgccgttcgccttcaacttcgccagcgaggcgttgatcttgccgagcagttcggtgtcgctcttgcggacgccgatcgcgacggtgcccacggtgacgggcttgtagccgtcgaccaggcggacgtcggcgaaattgccctgctgcagattgtaggcgaggatcggatagtcggcgaagccggccttgaggcggccggcattcacgtcgcgcaggatatcgggaatggtgtcgtagaccttgacctcgctgaacagcccggtcttcttcaacgcatcgacgaacgcggtgccgacctgggcgccgaccaccgtgcccttcagatcctcctgcgaggcgtaggccttggtgtcggatttcggcaccaccaagccttcaccataggtgtagaccggctcggagaagtcgatcacctccttgcgcgccgcggtggcgaacatcgcggcggcgatgatgtcgatcttgtttgcggtcagcgaggggatcagtgccgagaactgcatcggctcgatctgcacggtaaagccggcgtccttgccgatctcggtggcaagatcgaccatgatgccctggatcgaattggtcttggtgtcgaggaaggtgaaggggatgccggtcggcgtcgagccgaccttgagcacctgctgcgcccctgacggcgcgctcacggcaagggcaagtgccgcgaccgcggcctggacgaaacgctgaaaggacatcgcaccacctcccgagactgacgccaaaaccggccccggtgccgctgcgcccgctgtgtcagcgcttttggttgcgggcgacgccgttccggcctattttcaccaatatgaaattgtggtcacgaaaccgccgccaatgcaagcggttttcatgcacatgaaggaagcggactgacgtgagcggcggcaagagaatgcgcaaaggcgcggcaatgaggcctgcaacggcacgccgcgccgccggaaagccagccaagaaagctgggaagaaactcgaaaagaaactcgaaaagaagccggccgagcccgcgatggatctcgcggtcggacgccggatccgcgacctgcgccgggtcaaggcgatgtcgctggagacggtggccgcgcgcaccgagctgtcgatcggcttcatcagccagatcgagcgcggcctgtcgtcgccctcgctgcgcgtgctggcgacgctggccgacgtgctcggcgtcggcatcgctgcactgttcggcgcaacaccgaaggatggcagcaccggcggcgtcgtgacccgcgaggtacagcgcgccgagctgaaactgtggcgcaccggaatctcaaagcagctgctgagccctgccggcagcgagagccggctcaacctgttcctggtgcatctcgatcccggcggcaacaccggcgacgagttctacacccatgacggtgaagaggccggcctcgtgctatcaggcgagatgacgctgactgtcgacaccgagacctggacgctgaagcagggtgacagttttcgctttgccagccgccgcccgcaccggttttccaatcccgccactgatgcgaaggccgtggtgctgtgggtgaattgcgtgacggcggctgggtaagcctgcgctccctcaccgtcgtcccggcgaaggcaatcctgcgtcgtcccggcgaaggccgggacccattaccacagggctgtgttgttgaagaaggctgcggccccagcttcgcgcaacaactcacgttggtggttatggtcccggccttcgccgggacgacgacgatggcgggttcgcgattcgtaattgcgaggagcgaagcgacgacgcaatccatggctccgcatgcgcgtaggaatggattgcttcgctgcgctcgcaatgacgaagagcgttagccgctcagccccatcaccacgtcctcgatcttgatcgggaaattgcgcacccggatgccggtggcgtggaagaccgcgttggcgacggcgccggcgctaccggtgatgccgatctcgccgacacccttgatgccgagcggattgacgtgcggatcgtgctcgtcgaccgtgatgacctccatcggcggcacgtcggcattaacaggcacatgatactcggcgaggttcgcattcaggatgcgccccgaacgatggtccatcacggcctcctcgtgcagcgcgaatgagaggccccagatcatgccgccgtagagctggctccgcaccatcagcggattgatgatgcggcctgcggcgaaggcgccaaccatccgcgtggcgcggatctggccgagctccggatcgaccttgacctcggcgaacacggcgccatgcgcgtgcatcgcatattgcgattgcgccgttgcgtcggccgcaccagtgccgctgccctcaacctcggcgacgccggcgcgcgccaggatctcggcatagctttcgctgcgtgcgtcgtcgtcgcggcgatgcaggcgtccaccgcgcgccaccacgccggcattgccggcgccgaacagcggcgagcgctcatccgaggtcgcaagctcggcgagttttgcgatcaccgcagcacctgcgttatggatcgctgcgccgacagttgcggtatgccccgaaccaccggcaatgccggcgtccggcagatcggagctgccggagcggaacgtcagctggtcgaaatcgagaccgagcgagtcggccgagatctgcgccagcgcggtccaggcgccctgccccatgtcgtgcgcaccggtctccatcacgcccttgccgtcggcacggatcaccgcgcgcgcattgccttggaacatgatggccgggaacgtcgcggtgccgactccccagccgaccaggaagccgttctcgtcgcgcatctggcgcggctgcagcggacgtcccgcccagccgaaacgctcggccgccctggcgtagcactggcgcagcgccttggaggagaacggcttgccggtggtcggctcgacctcggcatagttcttcagccggaactccagcggatcgatgccgcaggcgaacgccgcctcgtcgatcgcgctttccagcacgatcgatccggtggcctcgcccggcgcgcgcatgaacagcggcgtgccggtgtcgacgcggaccgcctcatgcgcggtgcggatcgccgggctggcatagagcgtgtgcgaggcgtcggccgcgggctcgtagaagtcgtcgaagctcgacgtcgtgacgcgcgcttcatggttgatcgcggtcagcgcgccggcatcgtcggtgccgatccggatgcgctggcgggtcggcggacggtggccgaccgggccatacatctgactgcgtcgcagcaccagcttgaccggacgcccaatcagcttcgcggccatgatgccgagcacctgcgggccggagatcagccccttggagccgaagccgccgcccaggaacgggctgttgatatggatattcgccggcgaaatgccgaacagcccggcgatgcgcatctgcgcgaaccccatgccctggctcggcgtatcgatgaacagccggtcgccatcccacaccgcgacgatcgcgtgcggctccatcgcgttgtgatactgcgccggggtctcgtaggtggagtcggtcagcttcgaggcggcagccattccggcatcgatatcgccgtggcggacttcggccggattgccgatgccgaccaccggcggcgcataggcctcagtggcgtcgaggccgacgcgcgcgatctcgacctggtaacgcggcgacaacagcgcggcgccttcggtcgctgcttccagcgtctcggcgatcacgaccgcgatcgcctgattggcgtagcgcacctcgtcgctctgcaacagctccatccggaaggcgaacggattgcccttggcgtcggggtcttccgcaagctccggcttgtgcgccggcgtcatcacgtcgagcacgccgggatggcgcttggcagcggcgacgtcgagcgatttgacgcggccgcgcgcgatgcagctgctcgcgatcacggcatagagcatgccgggcggatgattgtcggcggcatagcgggccttgccggtgactttgagcacgccgtcggtgcgggtcatcggctggccgatgttcgagccatggcggatatgggcggggtcgcgggtcagactgatctcaagcgtcatgcgtcacgctcctgcaacggacgagaagggagagcccggcagcgccggaatacgatccggcgtgcctctggcagcaagggtgagcgcgcgcacgatgatgcgctgcgcaagctcgatcttgaaggcgttgtcgccggacggctttgcaccggcgagtgcggcccgcgccgcctcgcgatagcgggccgcatcgggcgtggcaccggccagcacctgctcggcctcgcgcgcccgccacggctttgcggcgacgccgccgagcgcaagccgggcttcgcggattttcccgtcctcgatgcgcaaggcagcgacggacgagaccaccgcgaacgcataggacgtgcgctcgcggaccttgatgtagcgggcatggccggcgaagtctttcgcctcgccaggcagccgcagcgcgacgatcagatcgccgcgctccagcgcggtctcccgctccggcgtctcgccgggcaaacgatgcagcgcatcgagcggcagttcacggcggccgtccttgccctcgatctcgacgacggcatcgagcgcgaccagcggcacgcagaagtccgacggatgggtcgcgatgcaaccctcgctccagccgagcaccgcgtgcaggcggttctcacctttgagcgcgtcgcagccggcgcccggccagcgccggttgcaggcgctgccggcgtcgtagaaataggcacagcgggtccgctgcatcaggttgccgccgacggtcgcggcgttgcgcagctgggccgatgcgcccgacagcagcgcctcggcgaccgcgggatagttgcgcgcgaagtcagcgtcatgcgcgagatcggcattgcgcaccagcgcgccgatgcggagcgaaccgtcggcgagacgttcgatacgatcgagccccggcagccgcgtgacgtcgacgagaacgctcggccggctgacgccgcccttcatcaggtcgagcagattggtgccggacgccagatagctcgcgcccttttcggaagctgccgcgatcgcatccgcgacattggccggcctgacataatcgaaattcatcatgcggagcgcctctgcttggtggcggtcatgttggattgtgcctcgagcacggcctcggtgatcccggcataggcgccgcatcggcacagattgccgctcatgcattcgcgcacgcgctccggatcatcgccggcctggccctcctggatcaggccgatgccgctcatgatctggcccggcgtgcagaagccgcactggaagccgtcatgggcgatgaaggcggcctgcaccgggtgcagctcgccgccgcgcccgacgccttcgatggttgtgatctcggcgccgtcatggctgacggcgagcgcgaggcaggaattgatgcggcggccgtcgaccaaaatggtgcatgcgccgcactggccgcggtcgcatcccttcttggttccggtgaggtcgagccgctcgcgcagcaggtcgagcagcgtgacgcggggatcgtcgaggacaatgtctcggcggaccccgttaatggtgagactgagtgggagattcatgcaaggcgctccgatccgtgtatggtcgggttgaatcgaggcaacgcagacccgtggccgccgatccagggggtcggcgcgccttgtcaggcccggtgctggtcgccatatacggaggcatcctccgtttacaagggagggtgaaaagaaaaagcaatggccggctcatcaccagaaattgtccgcaagccgcgcgccgatgcggtgcgcaaccgcgagcgcgtgctggaagcggccaaggccgtgttctccgccggcggcagcgaagcgagcctggaggcggtggcgcggcaggccggcgtcggcatcggcacgctgtatcgccacttcccgacccgcgaagcactgtatgaggcggtctatcgccgcgaggtcgaacagctcggcgacctggccgaacagctgcagaacgcccccgaacccgtcgaggcgttgcggcgctggctgcgcgccaatgtccaattcgtcgcgaccaagaagggcatggtggccgcgctggcgctggtcgcggccggctcgagcgaactgcaggcctactcgttcgatcgcctgaccaaggcgatcggcacactcctatcgcgcgcggtcgcggccggcgcgatccgcgacgacatcagcgccgaggacgtgctgcgcgcgctgatcggcatgtgctacatgcacgaccagccgggctggcagaccaccgcgctcaggctgctggacgtgttcgtggacggcttgcgcgtgctgccggcgaacccggtgctgacgacaaggcctgcgaagaagaccactcgaaggccatcgcgttaaccggtcccaaatggcccgcatgagccaacgaggcgcgcttcaagggcggccggtgcgtggcgagagccaggtcatgatgaccgcatgtggcgttcgtcggctgcgcggcaggcgatgccgctgcagcgcggatgtcgcgaaggccgatgcctgcgcgctggactgccgcttctcgcgcgtgagggtcatccactcgcgaatgaccgtgcgtcgtaccttggacatccggatttcctcccgttcgcatcaggccgcgaggcgcagcggatcagcctgcgacctgcgtgccgacagcgcgcaaccgcattggtgcacgatgccttgctcgacgacaaagccgcgccgctccagcgcggtccgcaggctctggttggccgccggcttctgcgcgtcgagccacaccaccagcactgcgcgtgcagtgaggaaattcgtcagccagtcaagcgtcggctcgagcgcgtgaagcgtgcgccgccgccaatcgaccagcgcggcgtcatattgcgcggccgcacggccgcaattggcagtcgaagcggttcgcaggaagccgcgccgctgcaattcgagcatcagttcgatgctcctcgtgccggccacgacgatgcgctgctgcgtcgagcagcctgccagcgcgatcatcggctcgagaatccggtcgccggcggccaattcaatcgaagacatcatgtcacctgttcgcgttcgccctcgcgcgcaaccggccgcgtgtcggccggcctgcacgatgcgggagcgttcggggtcaatatcttcaggacgggatatgaattcgagagcgctgagcgacatgccgcataggcgcggcataggctcgcctggacgggtcatcgtgcccgtggcgatcaggaaacacagtcacgccagttgtgcgaaactgcacagacggtcccgatcgcacaaatgaagacaaccggagagcccgtcaacgcgagcgatagatatccgggcgaaagacttccatgaagcgcgatggattgccgagcgcgtcgaatccgaattggcgatacagcccatgcgcatccgaggtcgcgagcaggaagcgcctcaggccttgcagatcctcgtgctcgacgacgcagcgcaccagccatttggatagccccttgccgcgatgtcctttgagaacgaagacatcggcaagcagggcgaaggtcgacctgtcggtgacgacacgcgcaaagccgacttgtacgtcgccgtgatacacaccgaagcacagcgaattggcgatcgcccgctccacgaccgatctcgggacaccctgcgaccagtagctttcttgcgccaggaaggcgtgaatcacgtccaggttcaggcggcgtgcatcggtcgatatctcgtatccggcaacggtctcttgcgtctgcatgcacgcgcctcctgcgatgaagcggccctcagccgaacctgtgatcgtagcgattgatcgacagctccttggtgtcgatctcgggcgtcttgccggagagcatgtcggccagcacccggccggagccgcaggccatggtccagccgagcgtgccgtggccggtgttgaggtgcaggttcgaatagcgcgtcgcgccgatcaccggcgggccgtccggcgtcatcgggcgcaggccgcaccagaacgtggccttggaaagggcgccgccgcgcggaaacagatcggtcagcgaatggtccagcgtcgcgcgccgcgcgtcgtagagcttggtcgaatagcccgagatctcggcggtgccgccgacccggatgcggtcgccgagccgagtgatcgcgaccttgtagctctcgtccatcacggtcgattccggcgcgccggacgcgtccttgatcggcaccgtgatcgaataacccttcaccggatagaccggcagcgagatgccgagcggccgcaccagatgcggcgaatagctgccgagcgcgaggacgtaggcgtccgcggtcatcatcccggcgctggtcgcaacgacggtgatgcgggttgcgtccgcattcaacccgtcgatgccgacattgaagttgaagcgcacgccgatcttctcggcttccagcgccagggcctgcgtgaacatgtggcagtcgccggtctcgtcatgcggcagccgcagcccgccggcgaatttctgcttgacgccggccagcgccggctcggctttgatgcagccctcgcgatcgagcacctcgaacggcacgccatactgcttcagcacgtcgatgtcgccgccggtgtgatcgagctgggcctgctcgcgaaacagctgcaaggtgccttgcgcgcgctcgtcgtatttgatgccgatttcgttgcgcagcgcctgcaggcagtcgcggctgtactccgcgatcgggatcatccgggccttgttcgccgcgtagcgcgccgtggtgcagttgcgcagcatcttgagcagccacagccacatcaccggatcgagcttggggcggatcaccagcgggccgtgcttcatcagcagccacttcaccgccttcaccggcacgcccgggccggcccatggcgacgagtatccgggcgacacttcgccggcattggcaaaggaggtttcgagcgcgggcttcggctgacggtcgatcaccgtcacctcatggccggcgcgcgcgagataataggccgaggtgacgccgatcacgccactgccgagaaccaggaccttcacttttcctcacatcctgcagcgaaaacgcaatcgccgctgcgaaaccactctgcttcgcaacggcgacagcaatttgtagagccagctagaatctagctagcaattatcaggccacgcgcttgatcgagtcgcccaggatcgagacgatgtcgtcgatatgcgacttctcgacgatcaagggcggcgacagcgcgagcgagtcgccgctcatgcggaagtagaggccggtgttgaagcaatcgaccatcacgtcgtaaccgcgcgcgccgacgacgccgtcacgcggcgagagctcgaccgcgcccatcaggccctggttgcggatgtcgacgacatgcggcaggcccttcagcgaatgcagcgcatcgcgccagtagtcggcgatcgcggcgccgcgggtcagcaggccctcgtccttgtagatgtcgagcgtggcaagacccgccgcgcaggccaccggatgcgccgaataggtgtagccgtggaacagctccatggcgttgtcggggccgaccatcagcccgtcatggacctggcggctggcgaacaccgcgccgcacggcacggtgccgttggtgatgcccttggcggtggtcatcatgtccggcgtcacgccgtagaagttggcggcgaacggggtgccgagacggccgaagccggtgatgacctcgtcgaagatcaacaggatgccgtgcttggtgcagagctcgcgcagccgctgcagatagcccttcggcgccggcagtaccgcggtcgagcccggcacgggctcgacgatcacggcggcgatggtgtcggcaccatgcagcgcgaccatccgctcgacgtcgtcggcgagctcggcgccgtggtccggctggtccttggcgaaggcgttgcgggcgagatcatgggtatgacggatgtgatcgacaccaggcagatgggtcgcgaactggcggcggttggcgaccatgccgccgaccgacatgccgccgaagccgacgccgtgatagccgcgctcgcggccgatcaggcgggtgcgggtcggctgaccggcggcgcggtgataggccagcgcgatcttcagcgcggtatcgaccgactcagagcccgaattggtgaagaagatccggtccagccccttcggggcgatctcggcgagacgctcggcgaaatcgaacgccagcgggtggcccatgttgaaggacggcgcgaagtccagcgtcgacagctgacgctcgaccgcggccgcgatctgcgggcggccatggccggcgttgacgcaccacaggccggcggagccgtcgatcacctgccggccgtcgaccgaggtgtagtacatacccttggcggaggagaacagccgcggcgccttcttgaactgccggttggccgtgaagggcatccagaacgaatcggtcttgatggtgttcggaatctgatgaacggtcacggcggcgctccattgttggttagcgtagtcggaccactcttcacggcactcaacaagtccttttctgtcgcagcgcaagccattgatcttgttgaggcggtctgcgaagatttgttcgatccgcaacacctgcaacagggatttaccaaggggactgtcatgagcgtcgacatcggcggtcggcttcgattcattcgcgcgcggcacaagctgtcgcagcgcgaactcgccaagcgctccggcgtgaccaattcgacgatttcgctgatcgaatccaaccagatgaacccgtcggtcggcgcgctcaaacgcatccttgacggcattccgatgggacttgcggaattcttcgcgatcgagccggagcggccgcgcaaggcgttctaccgcgccgacgagctgaccgagatcggcaagaagccgatctcctacctgcagatcggcgacagcctgttcggacgcgcgttgcagatcctgaaggagcgctacgagcccggcagcgacaccggccgggtgccgctggtgcatgagggcgaggaaggcggcatcgtggtctcgggccggctcgaggtcacggtcgacgacgagcggcgggtgctcaacgccggcgacgcctattacttcgaaagccgccgcccgcaccgcttccgctgcatcggcgccaagccgtgcgaggtgatttcggcctgcaccccgccgacgttttgaacccggcgcaggcggtgcgcgacccaagccgcaagggccgcgtgtcgcggcgttgcgggtgacgtcgatgccttgctccccacggcttgccgccgccgtcgcggccatctcggtccttgcgtccgctccgtccgttgcgatggacgatttcctacgcgcatcgagcagcgcgccgaccacgatcacgctgtgcggcgacaatggcgacgccacgatcaagactgccgcctgcaagaaggccggcaccgacaggctggtggcgcagatcgacaaggcgttcgacgcggcgctcggcaaaatgccggccaacgtcaagccgctgctgaagcgcgaccaggcctggttcaacgagatgatcatcgacgccgccggggtgctcaccgatgccgacgcggacgagttgaagcaggcttttgccgagaccttgcgccgccgcgcggccgcgctcgaggcaatcgcatccggccggcccggcatcgccggcacctgggtcaacgccttcggcagcatcacgctgacgccggccgatagcggcgcctatcgcctcgccgccgatctgcgcggcgactatggcggcgaccgccggcgcacctgccagctgaccgccgatctgaaacccgcaggcggcggctggctcgccggtcccgtagtgaccgaagcggatacatcgtccaataaggcgaagaccgacgcagccgccgctcccgccaagccgccgtcgttaaagctccgccgccagggcgagaccttgcggatcgtcgggaccatcgatgacgagggctgggacgggttcaacgactgctcgtcgatgtggcaggtcacgggcagctattttgccgccggcaaggatgcggcatccgacaaggcggacaccaccttcgtcacaccgaccttcgactgcaccaaacccgagaccgcgaccgacgaagaaatctgcgccgatcctgatctcgccggcaacgaccagcggttgaaccgagcatggaaggcgttgcagccgcggctcgacgaagcgacgcggcgcgcgctgatcgacgatcagcgcaactgggtgaagagccagaccgagcaatatccggaattcctgcatccggcctggaacaagcagagctcgcaggtgcatttcaccgtcgatgcgcgcgatcacgtcgacggcctgcagcgcgagcgcctggcgcttctcgaaggcttcgacgacaagcgcagcgggcttgccggggtctggctcgcctacaacgccgtcatcaaggtcaccgccgacggcaacggcgccgtgacggccaagggatggaaatgggaccagggcgactggaaagccggctgcgactacgagatgacgggcaagatcaccggcggcgcgttccgctccgacgagcggcgcaagaatccggacacactcgagcgcgaccatgcgatgctgatcgtcaaccggcaggacgacgtctttgccaaaaagcgcaccgaccaggacagcgatgaagcaaaatgcaggcgccggctcgacaactcctcgaccgcacggctgtttcctgcccgcccttcacgcgacatcgacaatttcaagggctcgattcgatagcggcgcgaccgtccggctgcgccgtcacaggttgcgcgtttgcctgtcgccgtaggcgatcacgaaagcgaccgtcgcgaacatcatggtcacggcgatgacgacgagaatggtatccaaggtcatggcgttcctccaagcttgacgaccgaacgctaatgcgccggctggaaggggccttgcggcagatcaattttgatcgaaaacgtctgggcatgaaaccgcggcggcgtcttttgcgtatgctcagtcattgatcagggagcagaccaatgcgcgcgatcgccctcattgccgccatcctgttcaccctcacctcgccggccgcggccgacgatgtcagggcagcgcaggacgtgatccgcgcccaggagcaggcgttcggccgcgacgacgcagctggcgcctattcctatgccgcgcctgcgatccggcagatctttccgcaggccgagatcttcatgtcgatggtgcagcgccaatacgcgccggtctatcgccaccgaagcttcgagttcggcgaagcgcagagcgcgggcgaccggattgcccagcgcgttcatatcgtcgacgccgatggcgaggcgtgggaggcgctttacacgctggagcggcaggccgacggcagcttgaagatcaccggctgctcattgctgaaggcgggtcaggcggtatgagcgcatcggccctcgccgctgtagcttcaggacaagccctttctcagccgaagccggtcttcgagccagtcgaagatgacttcattggccagagtgggattatcgatatgtccttgcatggcagcggtttcggcacgacggaacaggatcaggctggcgtcgcgatgactgttgcccaattgattgccgaattcagtcaacgcacctggaagcagccagccggcttcgcccgcggtgacgagcagcggacattcgatgctgcgcgagatcgcattggcctcctcgagccatccggtctgcgcattgtcgcctgcttgccgatagaagaagcttctttcgtgcgagtcccatattccggcatcgcaaacggcggcggcaaaccgggcatcacttgctgccgcgcgggccaccagggaggaattgcacgcatcagccacgatggcgatccgcgtgctgtcgacaccgggcttctccgaaagaaagtccaggacacgactcatggcggcttcgaacttgtggccgtcgagccgttccggcgacagcgccgcctgcgttccgagcaggtccatggcgagcagcgagaagccgcgctcgttcgcatgaccggcgtatttggtgatcaactcttccttgtaggaacccggctcgccgatgcagacgatgacgggcccatcgtcgcgaaacgccgacggcaggtaataggcctgaagcgacaggtcttcggtccacggaatcgagagcacctggccggccggaacccgggtcttcaaaaagctggttgcacatcgccgcatgccgtcgacggcacgtgtcagcaactcgttggcgtatccgggaggccttgcggcggcgtgaaagtagctcgtggcccgcagccaattgcgacgggcggtgaccagattgttgttcagcaacgaatgctcggcgcgcgcctcgttcagttccgcggtcttgatccactgctcggaccacgagctctccgacgcgaggttgatcttgctcaaggtcaaccagcattcggagaccgtcgaaccgccttcctgcgcggcggccagcagcttgacgaactcggccgacagatcctctcgatccggccaggcaggccaacctttgtcatcgaattcgacgctgcttgacgaggctccgcgcgtcccacagtggtcatgcatgtttcgtcaactcgttcgcacccggctgcgctgccggtatgcgttatcggtacgagcccgcttgttgttgtcgacgaaccgccgcttcggtagccgcgcgacgctggcgccgaaatcgcaaacgccaatcacccagctctcccaaggaatattccaaattcgcttcatataattgaagtaattcggcagcggcaaatgttgatatggcggcgcaggaatgcgttgcgcttatgcctgcggaccgaacgttgctgcagcaatcgtcgccgagcaaacgctcggtaatgttccgcttgcgaacctgccgccggcgcaagtctgctcacaggatcgcgagaaccgatacgccgtcactcactcagtcgtgactgcgcgcacacccagcaaacacgaggcatatccccgcaccgctaatcgggtgcgctgtggctctgtccctaaccgggtagtgcatcgcgacgagatcgagaacgcagcgtcgttcatgcaatccagccagccgtcattgatgttcggctgcatcgcgcacgcgagtcggcgcgagcctaccgtcttcaaatgaagaacctccggcagggcattgccggaggttttggaggctagttcatgaagaagtctgatatctcctcatcatggtcggcagagcaaccgacaccaagtttgtacatgatagactaatgttagtaaatcatacaatgtgctcttcgttcaaaatcaaagcctcgacagtttcccgtcgaggctttgggtcgtaatcaagtcccgatcaaccgggccttaccagttgcgctgcgcgcggagcagcagcatgtaggtatcctggttgctgagcgagtagacggcggccggcttgccgatcgccgcactacccgggtagctgatcgtgcccgcgtagttctgatccagatgggtgtaggtgaagtcggccgagaatgtcaggttcttcaccggagtccactgggtctgcgtaccgatctgggcaacgctgtagtcggggttgcacgaggtcaggttcgaggtggcgccgatcaggacaccgaacgatccgcccacgccggtcccgccggggccgcagatgtagctcttggcggtgccattatagttgacctgggcccacgcaccgtagacgctggtgttccaatagggattccagttgtggacatacgcgccgcgcacgccgtacgtcgtgatcagctgctgcgatccgccggagacgaacacgctgtccggcgcaatgccgaagccgatgctctgataggcaccgggaacgctggtgttgccgaacgaggtgaacgcaccggcacccgagagatcctggatgttgtagcgcgttgcgccgttggtatagacgccctgcacgttgatggtatcgccaggtccggtcgggatgttcttgatcgacagggccaactgacccgcccagccccacttgtcgtcgggatga

SEQ ID NO: 63 - DNA, 20743 bp, Bradyrhizobium enterica
ctctgggattcaacgagtgatcccgccagcgggcactgggtggtcggtggcgtcgcgcaggctgccggcatcgcgatcaatgtgtcgccggctcagttgacgagcacctcgttccagtcgggctccggttcggatgacctgtgggtgcgggccaatgacggtttcacatggggggcctggaaagaattccacgtcaacgcaccgcttgaccatgctcctgtcgtcaccgcagctgacttccacgcgaccgtcctcaaccagaacgtggccgccaccagcctgttctcggtcgccgacgccgacggggacagcatcacccaatatcaagtctgggattcgacatcgtcagccggcagcggccactggagcatcggcggcgtcgcgcagcccgccagcaccgctatcaacgtcagccccgcccagctcgccggcacgaccttccagggcggcaccgtgactgacgacctctgggttcgcgccaacgacggcatgatgtggagcgcctggcaggaatttcatttcatcgtctagcgggaggctcgagccaaacaaaaatggcccgcgagatgcgggccatttcatcggaaccgttgggtccgaacttggttgcggggataggatttgaacctatgaccttcaggttatgagcctgacgagctaccgggctgctccaccccgcgttaaaccgttgcatgccttgcagaaagagtgcccgaacctgccggccaacgctgctaacggcgccgatcgatccgtccggagagcttcctgagaaggcgacccaggccgaagccgtcgggtgcggggcgtatgtatcaacgtgtgcccggtttggaaagccccggatgcgggtttttgaggattttgtgacgtccaaatcaccggttttcctgacaaatttaccgccgggaaccgggccttgccagatcgtgcgtaaaagcggagcttggcgccaacaaaatccgtcaaggaaacgtcatccgaggggaaacgctgatggaccggccattgaagagcccggggctgcacgcgcttgaggaggcctttcaccgccaattcgagctgtcgcgcagcgagccggcgccgaccttgcaggcgcggctggaccggctgcggcgcctgcgcgccgcgctgaccgaaaacgaggcccgattcgcggccgcgatctcggccgatttcggccaccgctccaccgtcgagaccgcgatcgcagagaccatgctggtgctcggcgagatcaagcatgccgccaagcacctcaagggctggatggcgcccgaaaggatcccgaccacggtacagttcgcgccggccaagaaccggctgatcccgcagccgctcggcgtggtcgggatcatcgcgccgtggaattatccgctgcagctgacgctggcgcccgcggtcgcggcgatcgcagccggcaaccgcgccatcatcaagccgagcgagctggtgccgcggttctccgaattgctgatggaggcgatcgcgaagaaattcgacaccgccgaactcgcggtcaccgatatcgacgacgacatcgcgaaagcctttgccgcgctgccgttcgatcatctgatcttcaccggatcgacccggatcggccggctggtcgccgaggccgccggccgcaacctcacaccggtcacgctcgagctcggcggcaaatcgcccgcgatcgtcgacggctccgccgacatcgacgaggccgcgcaacgcatcgcctacggcaagctgctcaatgccggccagacctgcatcgcgcccgactacgtgctggtgccgcaagcctcggtgcagccgttcgcgatgcggttgcagggccacatgcagcacatgttcggcaccgatccgaaaaatcccgactacagctcgatcgtctccgaccggcattacgcccggctcgaggccctcgtcgccgacgccgccgcgaagggcgcgaccatcatgcagccggctgcgccgaacgatcccgagtggaaggagcggcgcaaattcccgccgacggtcatcgtcgatgcgacgcccgacatgaccgtgatgcaggaagagatctttgggccggtgttgccggtcgtcggtacccgcgacgcagcggaagcgatcgccttcatcaacaagcgcgaccgcccgctcgcgctgtactggttcggcaccgatcacgccgcccgcgacgcggtgctggcgcgcacggtgtccggtggcgtcaccgtcaatgactgcctgttccatttcgcgcaggcctatcagccaatgggcggcgtcggcgcctcaggcagcggcgcctatcacggcgaatggggattcaggacgctgaccaagctgaagccggtgttctaccgctcgcgcttcaaccggctcgctgatctctatccgccctatggcgcgaaggtcgcgcggctggagaagctgatgcggttgttgtcttagcagtcattccgggacgcgcgcagcgcgagcccggaatccattcatccacgtcactgcaacgcgatggattccgggctcgatgcttcgcatcgccccggaatgacaaataaaagtaagcatggggaaacaagaatgactgacacattcgatttcgtggtggtgggcggaggctccggcggctgcgcggtggcagggcggttgtcggaggatccggcgacctcggtggcgatgctcgatgccggcggaaagaacgacaattgggtggtgaccacgcccggcgccatcattctgatgctctcgagcaagctcaacaactgggcgttcgacacggtgccgcagaaaggcttgaacggccgcatcggctatcagccgcgcggcaagggcctcggcggctcgtcggccatcaatgccatggtctacatccgcggccatcgcgccgactacgaccactgggcttcgctcggcaataccggctggagctacgccgacgtgctgccctacttcaagcgctcggagaacaacaccgagctcgacggcgagtatcacggcaagggcgggccgctcaacgtcaccggcctgcagtccgacaatccggtcaaggagatgttcctgcagggcgcgcgcgaggcgcagttccggatccgcgacgatttcaacggcgccgaacaggaaggattaggcatctatcaggtgacccagaagaatggagagcgctggagcgcggcgcgcggctacatccatccgcacatgggccgccggcccaatctgcgcatcgagacccaggcacatgcgacccgcatcatcttcgagggcaagcgtgccgtcgccgtcgaatacatgcaaggcaaggagaagaaggtgctgcgcgcaaagcgcgaggtcatcctctcggccggcgcgttccagtcgccgcaactgatgatgctgtcgggcgtcggcgatgccgcagcgctcggcaagcacgggatcgccagcgtgcatcacctgccgggtgtcggacagaacctgcaggatcaccctgatttcgtgttcggcttcgcctccgacgcaccttatttctcgggactgtcgtggggcggcatcggccggatcatcaagggcatcgggcaataccggcgcgagcggcgcggcccgatgacctcgaacgtcgccgaatgcggcggcttcctgaagacgcggcctgacctcgacatccccgacattcagctgcatttctgcatggccatggtggaagaccatggccgcaagccgcgctggggcaccggcttctcctgccatgtctgcctgctgcgcccggcaagccgcggcagcgtgtggctgaacagcgccgacccgctcgcagcgcccgcgatcgatccgaatttcttcggcgaggacagcgacgtcgagaccatggtcgccggcttcaagatgacgaagcggctgctcgacgcgccggcgctgcgcgcgctgcagcagaaggacatgttcaccgcggatgtccgcaccgacgacgacatccgcggcatcctgcgggcgcgctcggacaccgtctatcacccggtcggcacctgcaagatgggcaccaatgatccgctcgcggtggtcgatccgacgctgcgcgtgcatgggatcgagggcctgcgcgtggtcgatgcctcgatcatgccgacgctgatcggcggcaacaccaatgcgccgaccatcatgatcggcgagaaggccgcggacatgatccgggcagagatgcgcgcggggtgatttccttcgtcattccggggctcgccgtaggcgagaacccggaatccattcatccaccgaacctgcggcccaatggattccgggctcgcgctgacgcgcgccccggaatgacggcgagcgtcggcgacgaggatgatttctttaccggcatcgaataggccagacatcgacaggttgccggaagcgggcgattgatcgctacaattgtccttgatgcaaaaccggtttcatcaacccgggaaccgtaggagatcgggcaggaaatccttacccatgaacctcttcgacctcgccgtgaccatcggcttgctgtttgcggtcgtgaccggcttcacgaccggcctgctgcgcagcgcggtcaccatcctggcctatctcgttgcgatgccgctcgcggtcgcagcgctggcgatgatcgggccccacatcgcgacgctgccgtcctcgccctttccgcccaacggcgtgctgctgttcggcctgttcctcgtgatcggcgtcatcctcggaaagatggcgcggacaatgctcgacgacacgatgggcgcagagatcgggatcggcgaccgactcggcggcgcgctgcttggcgccgtcagggtcggcctcgtcgtgaccacgctggtgctggtgttcgaccagctggtgccgctggcgagacagccgcaattcctcaacggatcacaattgcgcccctggttctccgcggccggacaggccggcttccggtcgctgctgcccgaagccaccatggcgatcgagcggctgcggcgcgagcagcgcatctagctcgccgcgttcgcccggctgttcctgcccggcatgcacttatgcattgcacatcccttatcggcgctgcctagcttggctagaatgcatccatcaaacctttacaaaccgacccgacatcacagggagcgaactcgtggatcttggaatcaaaggccgccgtgccatcgtctgcgcatcgagcaagggactgggccgcgcctgcgcgatcgcgctcgccaatgagggggtgcatgtcaccctgacggcgcgcggcgccgaggcgctgaagcagaccgccgacgagatccgcaaggcgcatccgtccgtcaccgtgaccgagatcgtcggcgacatcacgacgccggcgggtcgcgaagccgtgctcaaggcctgccctgaaccggacatcttgatcaacaatgccggcggcccgccgcccggcgatttccgcaactggacccgcgacgactggatcaaggcgatcgacgccaacatgctgacaccgatcgagctgatcaaggcgaccgtcgacggcatgatggcgcgcaagttcggccgcatcgtcaacatcacttcggcggcggtgaaggcgccgatcgagattctcggcctgtccaacggcgcccgcgccggcctcaccggcttcgtcgccggcctgtcgcgcaagaccgtgatcaacaacgtcaccatcaacggcctgctgccaggcccgttcgacaccgaccgcctgcgcggcaccgccaagcccgaggccgagaagcgcggcatctcggccgaccaggtcctgagcgagcgcgccaatctgaaccccgccggccgcttcggccgtcccgacgagttcggctatgcctgcgccttcctgtgcggtgacaaggccggcttcatcaccgggcagaacatcctgctcgatggcggcgccttcccgggcacgttatgagagccgtctggtacgagcgaaccggcgcggcgccgacggtgctcaccgtcggcgagatgccgacgcccgacgcaggtcccggcgaggtccgggttcgcctcgaggcctccggcgtcaatccggccgatgtcggccggcgcagcggcaattatcgcgcgatggagtttccccgcgtgatcccgaacagcgacggcgccgggatcgtcgaccagatcggcgaaggcgtgacgcgctttgccgtcggcgaccgtgtctggctgttcaacggccagcgcaacggccgtgccttcggcaccgcagccgaatacatcacgctcgccgactatctggtgacgccgctgccacatgacgtgtcgttcgcggcaggagccacgctcggcattccctgcatgacggcatggtgcgcgctgtttgccgacggtccggtcgcgggccagacggtactggtcaccggcggcgccggcgcggtcggccactacgccgtgcaactggcgaagtggggcggcgcgcgggtgatcgcgaccgtgagttcgcaggtcaaagacgtcgaggcgcggcttggcggcgccgacatggtcgtcaactatcggaccgaggacgtcgtctccagggtgatggcgttcaccgagaaccgcggcgtcgaccgcgtcatcgacgtcgatttcggcggcaacctcgcgaccacgctgaaactcatggcgctgaactcgaccatcgcggtctacgccaccaacggcaaccgtacacccacgctgccggtgcgcgaattgatggagaagtgcatcacggtgcgctcgctggtgctgttcgcgctgccgccgccgctgctcgccgccgcgcaggccgacatcacgaaatggctggaatcgggcacccgcgtgcacaacatcgccgggcaattcgcgcttgccgagaccgccgatgcccatctcgccgtcgagaagggcgacaagatcggcacggtgatcgtcgactgcgccagataacaagaaccgaggatacgccgcatgcactggaccgtaggcaaggtcaaaatcaccaaggtcgtcgaactcgagaccgtcggcagcacacgcttcatcctgccgctcgcgggccgagaggagatccagagcctgccctggctgatcccgcatttcgccaatgaggacggccggctgaaaatgtcgatccattcgctgctggtggagaccccggagcaccgcatcatcgtcgacactgggctcggcaacgacaagcagggccgcaacgtgccgacctggaacaaccgcagcgatccgttcctggagaaactgaccgcggcgggatttgcccccgacagcatcgacaccgtgctgtgcacgcatctgcatgtcgaccatgtcggctggaacaccaagctcgccggcggcaactgggtgccgaccttcgccaatgcgcgctacgtgttcggcaagaccgagtatgagcactggcgcgaccacagcgacgatgcggcgcatgccgccgtgttcgccgattcagtgaagccgatcgcggatgccggcaaggccgagctggtgccgagcgaccaccggctgaccgaagagatcacgctgatcccgacgccgggacacagccccggccatgtgagcatccacatcaagtcggccggagaggaagggctgctgaccggcgacgtcgcgcatcatccctgccagatgtaccatctcgactggtcgtcgaccgcggattccgaccagaagcaatcggcggctacgcggcgcgacctgttctcgcgctttgccgacacgccgacgctggtgatcggcggacatttcgacgccgggcacatcaagcgcgatggcgacgcattcaggttcatcgcgcccgagagctgagctaactcagactggcacgcgcgaggaacagcgcgtcggcctcgctggccgcgatcgctgccggatagggcaaggccttggcacggccgggcaggctgcgctcgagctccgcgcgttcctcgtcgtcatcagcgatatagaccgtgacccggatcaaccggccgagctcggccttgtgcgccttcatccacagcaccatcggcttgccggcggcgacctccggctgatcgttgacgttgacgatcacggcgagcggccggttcgcggccagcagctcggaatattccacggtccagtcacaaccatcctgctcggtctgcaagcagccggtcgcgatgaagatgccgggttcggcttcgtgaaagaatttcatgggcgagactccttggtgcggatgaggtgtgatcatgactttctggcgaacgcagatcccggcagtgtccgccgcgcctgcaacgcagcggctgcaagcgttgccgccgccagcagcgcgaacagaccggccagcgtggccgcggcggaaaaaccgcgggcgagcgcactcgccagcatggcgtgaaaggtgtccggtgctatgccgagaccgcccggcatttcgtgacgccggatcgcgatggaggcaagttcagccgcgttgccgaccttggcattcatcagggcggtcgtgagcgacgcagttgcggtggtggccagcactgtgccgagcagggagatggagatcgtcatgccgctctgccgcagggcgttcatcgtcgcggacgcgataccactgcgctcgcgcggcgccaccgccatggtcgcagcgcccgtcgccggcaccgagagccccaggcccgcaccgagcagcgcgaacagtggtgcgatcacggcatagggcgtcgcttccgtgaacgagctcatgccgagcatggcaacgccaagcagaacatacccaacgatcatcagccggcgcagcccgaaacgcgccgcccagcggccgaacagcagcgatccagtcgccgcgacgacaaacaccggcgcgattccgctgccagcctgggcggccgaccagccctgcgcttgctgcaagaacagagagaacgggaacaggctgctgtagccggaaaagccgagcgcgaacgaggcgaagttcaccgccgcgaaggcgagatcgcgaaacagatcgaccggcaccaacgggcgcgcggcgcgccgctcgaccatgacgaacagcgccagcgcagctgccgcgacggcgaaggccgtcaaggtggccggcgcagtccagccaccgccggcggcgataaaggcgtaggtcagcgcgccgagaaacacgacgctcaagacttggccggccggatcgagctcggcgtggtcgggatcggcgctctcgtcgatgccgtatagtccgaggccgagtgcgaccgcgccgaccggcaggttgatcaggaacacgctccgccaatcgacggtgtcgaccaggatgccgcccagcatcgggccaaggatgagcgacacggcgctgaaggacgaccagccgccgatcgcatgcgcgcgtccggccggatcggggaacgcctgggccaggatcgacaaggcgcccggaatgaccagcgcgccggcaacgccctgtagcgcgcagccggcaatcaggaccgcaagcgacggcgcggtcacggaggtggccgagccgagcgtgaacagcacgacgccgaacagccaggcgcgcttgcggccgtagcgatcgccgatcggcccggccgagagcatgcaggcggacaggctcagcgcgtaggcaccgaccacccactgcaacccggcaagctcagccccgaggccggcttggatggcaggcagcgccacggtgacgatgctgatcgcaaccgttgccatgcaggtgccgagatagaccgcaagaacggccgcggatttgcgggacagggacatgggcatgccgccgattgttggacacggcggcacaaatacgtattgactgacggtcggtcaatataaccaagctatttcaaagtcattctaaatatgcgattcaaaatcggacatcaggcgcaggtggatgctgacggcatgatcgggaagcggcagacggcggcgccacgcggcgcagcgcagcgttggagacggactcagcccgccgaggtcagggtggacgacctgatgtcggcggcagccgccctgttcatcgcgaagggcatcgaggccaccacgatcgacgacatcgtcgcccgagccggcgtcgctaagggcaccttctatcattacttctcgaccaaggccgacgtgatcatcggcctgcgcgcacgcttctcgcaggacttcctcgcccgcgtcgcggcgtcgatcgccgagcgtgctcccgacgatcatgctgggcggctgtcggcatggctgcgtggcgcggttggaacctatctcgccaatgtcgaactgcacgacgtcgtgtttcacgatttcccgcatcatcagcgtcagtcgcaggaaaaggacgacgtgatcgcccagatcgttgctgtgctggaggatggccggaaggccggcatctgggccttcccggatgcccgcagcgcagcgttgatcgtgttcgacggaatgcacgcagtggccgacgatgcgatcgtcgccggcacgcgcgatccggagccgccatgccggctgctggaagacatgttcacacggatgctggcggcgccgcgccagcaatcatgacaggcatttgaacaaaccgttcaaggccgccacgctgggaggtgatggctgcaatgccgcgaccgtgaagcggttgaatttccgcccgcgctgttccatgaagcgtgtcgaggtataccagcaacaatcctcaggacaccgtagggagtgatcaacatgaagcttgttcgttatggcgaaaagggtgcggaaaagcccggtctgatcgataaatccggccagctgcgcgacctctcggcccatctgaaagacctgaccggcgacgcctacgcgccggaatcgctgaagaagcttgctgccctcgatcccgcctccctgcccgccgtctccggcaagccgcgcttcggcgccccggtcaccggcatctcgaagttcgtcgcgatcggcctgaactattccgaccacgccaaggaaaccggcgcagcgatcccgaccgaaccgatcatcttcatgaaggcgaacacctcgctgtccggcccgaacgatgcggtcgagaagccgcgcggctcgaccaagcttgactgggaagtcgagatcgccgcgatcatcggcagccgcgccaagtacgtctcggaagccgacgcgctcaaccacgtcgccggctattgcgtctgcaacgacgtctccgagcgcaacttccagaccgagcggctcggacaatggaccaagggcaagtcgcacgacacgttcggaccggtcggcccttggctcgtcaccaaggatgaaatcgccgacgtgcagaacctgtcgatgtggctcgacgtcaacggccagcgccgccagaccggctcgaccaagaccatgatcttcacgatggcgaaatgcatctcctacgtttcgcagttcatgacgctgctgcccggcgacatcatcacgacgggcaccccgcccggcgtcggcctcggcatgaagccgccgaccttcctcaatgtcggcgacgtcgtgacgctcggcatcgagggcctcggcgagcagcgccaggaaatcgtcgcggcttgaggtcctgttagcaccagccgtcattgcgaggagcgaagcgacgaagcaatccattcatccgcgcgtgtgggcagatggattgcttcgctcgcaatgacggttcaatccgacagcataggggcctcccatgaaactcaccttctctcccgcctccccgttcgctcgcaaggtgcgcatcgcggcgatcgagctcggcctgatcgacaagatcgagctggtgccggccagcgtcgcaccgggcacggccaacgaggaatactcgaagatctcgccgctgaagaaactgccggtactgatcctcgatcatggcgacgtgattttggattcctacgtcatcgtcgaatacctcaacgagatcggcggcggccggctgatcccgggttacggcccgcggcgctggaagctgaagaccgatcattcgctgatcaacggcatgctcgattccatgctgctgtgccgttacgagaagatggtgcgaccgcagggctcgctgtggcaggcttggcatgacgatcactggaacagggcctgggccggcatggcgcgattcgagcagcgccccgacgtgctggacggctcgtcgttcgacatcgcgcagatcggcctcgtctgcgtgctcggctacgccgacttccgcttcgccgattgcggctggcgcaaggcctatccgaagctcgacgcgttctaccagcgcatgctggagcggccgtcggtgaagatttccgcgccgccagcggcatagcgtgcaaggtggggggatgaggatgcgccatcgcctcccccgcctgctgcttatcggcgcgagcctcgtgctcgcgttgacggcctccatcaccacactgagggccgacgacatgaaagctggacatgaccagccctgcgggtcgccgaccgcgctcgacgatggctggccgatcgcgtcacccgacagcgtcggcatggatggcgagcggctgtgcggcatcgccgcgcggctcggcctgcgcagcagcgaggtgcattccgtcgttgtggcgcggcacggcagactggtgttcgagcaatatttcgccggcatcgaccagccatgggggtacaaggaaggccgcaccgaattcacggcgacgaccaggcacgacatacgttcggcatcgaagagcgtgacgtcgctgctggtcggcaccgccatcgaccgcaagctgatcgccggcgttgacgagcccgtggtgaaattcttccccgaacaccggtcggtaaagtcggccggatgggacgcgatcacgctgcgccatctcttgacgatgtcgtcaggcatcaaatgggacgagacgctgccctggacccatcccgacaacgacgagccgcatctcgccttcgatgccgatccgatcggctatgtcctggccaagccgatcgcagcgtcgccggacacgctctggacctacaatggcggcggcacggatctgctcggcaacatcattgaacaggtctccggcaaaccgctcgaagccttcgcgcgggagacgctgttccagccgctcggcatcaccgatcttgagtggaagacctatccgaagaacggcaagattgccgccgctgccggcctccgcttgcggccgcgcgatgccgcgaaaatcggccagctcttgctcaatggcgggaaatggaacggacagcagatcatctcggccgagtggatcgcgcaatcgatcgtgccgcgcttccaggccgtcggctatttcggcggcacgctgttctatggctatcagtggtggatgggccgctcgctgtccgacggcaaggaagtgaaatgggtcggcgcctttggctggggcggtcaacgcatcatcgtcgtgcccgatctcgatcttgtgatgatgacgacggcagcccagtacggccagcccaaggaagggcttgcggcgatggacatccttgccaacatcatcattcccgccgtgcgcgacgcgcactgacccttttctacgcgttttcttcacgcgaaccggactccacttcgctcgaaaacgctaacgccaaggaatcacccatgagcctgaaatttgcggccggcgatctcaccattcatcgcatcgtggaggaggaaggcaagttcctgcctgcgcaagacatgttgcccgaactgacaccggagctgcttgcggagaaccgagcctggatgaaagcggcccgggcgctcgacgacagcgacacgttgatccttgcgttccagtcctacgtcgtgaagacgccgcaccacaccatcctgatcgacagctgcatcggcaatcacaagccgcggccgggtcggccgagctggaacatgaagaccgacgacagctatctgcgcggccttgcgtccgccggcttctcggtcggcgacatcgactacgtgatgtgcacgcatctgcatgtcgaccatgtcggctggaatacgcggctcgagaacggccgctgggtgccgaccttcccgaacgcgcgctatgtgttcgacaagaccgagttcgactactggaccgagaccaatgccaaggcggaagtcccgccattcgtcgacagcgtgctgccggtggtcgaagccaagcgggccgagctggtcggcaatgatttcgcgatcggcgaccacatgcgcatcctgccgacgcccggccacacgccgggccatctcgccttcaccttcggtcgcggcaaggacgacgcggtgtttgccggcgatttgatgcactcgccgatccagacgctctatccggaactgtcgccgaaattcgacgtcgacccggcgcaggcggcgaagacacgtcgcagcttcctcgagcgctattgcgacaccgacacgctgtgctgtcccgcgcacttcccctcgccatcggtcggcaagatcaggcggaaggggaatgggtttgtgtgcgagacggcgtgaggtgagctgaattcgcggcgaactcgcaaccactcaaccctggagggatcgtttctcgccctccaggggaggatagaagagcattcgctcaatcaaacaaactcggcgtgtggttcaccgccgcgccttcgatctgcagcatcttcagcttggtgaccacgccgccattggccgagaagccgcccggcttgttgcccgccgccagcacccggtggcagggcaccacgatcgggcacgggttgcggccgagcgcctggccgacgtcgcgcgacagctcgacgccgccgagctgcttggcgatgtcgccataggtcacggtcttgcccggcggaatcttccgcgcgatgtcgtagacgccgcggttgaactccggcacgccgtcgagatcgagcacgatgtcggcgagatcgttcggcttgccggcgagcagctcgatcatgccgtcgatcgcgtgctgcacctcggccggcggcgccgcctcggtgaggtcgccgttacgctgggcaatccgcttgcgggtcttctcttcgttgcccatcggcagctgcacgccggtaacgccatgctcgccccagacgacgccgcaggcgccgatcatggtctcgaagattgcaaaatgctggccggtcatggctcactccagatattcgttaggctcacaaactgaagcctgctgttgatctgaaatctaggcttggagaatgttgctatccacccgaattccgtgggaacttgggctcaatcaacaacatctcctgccctccgcgagcccttcaaatgcacagcctccacgtcaacggtttcgacatgccctatctcgatatcggagcggggccgccgctggtctgcgtgcatggttcgctgtgcgacttccggatctggtcggccgtgctcggcccgctgatccgccaccatcgcgtgatcgcggtcagcctgcggcatttcttccccgagcattgggacggcgtcggcgacacctattcgatcgcgcagcatgtcgacgacgtgatcgccttcatcgaggccttcgataccaaaccggtcgacctgatggggcattcccgcggcgggcatatctgcttccgcgccgcgcagcggcggccggacctgctgcgcaggctgatcctggccgagcccggcggcgagctcgacgagagccttgatcccgacttcaagccgggcccctcgccgctggcggcacgtttcgcggcatgcgccgcggaaatcgccaagggcgacatcgacggcggcctgcagatcttcatggatgcgctcgaaggtcccggtgcctggaaacggattccggcgacctccaagcagctgttgcgcgacaacgcgaccacgctgatcggccagacccgcgaccagcgaccgcccttctcgaaggccgatgcagaggcgatcaggacgccgacgctgttaatcggcggcgccaacaccaagggcgtgctgccgaaggtgctgcacgccctcgccgcaaacgtgcggggatcacgcaccgagatgatcccgggcaccacgcatccgatgttcgagcaggccccgcagcgctattgcgagatcgtgctggagtttctggcaagctgaccgcccgcgcgcacgaacctcgtcgcttgcggggcgaggtatcgtccgcctgttcgcacttttccggatcatgcgttagtgtctccttccgctcatgcctgggaggacaatcatgaaattatccgtcaaattgctcgcgtcggccggtctgctttcgctcgccctcgcctcgtcccacgcccttgccgccgcggatgaaaagctgcgcgcggccgccgaacaggcccaaccggcggtgatcgaaagcctgcacgacatggtgctgatcgagtcgggctccggcgatgtcgaaggcctgaagaagatggccgactacaccgaggcgcggctcaaggcgcttggcgccaagaccgagcgccgcaagaccaccaagggcgccggcgccgatatggtgatcggcaccttcgaaggcaccggcagcaggaagctgatgctgatcgcgcatatggacacggtctacgagcacggcatcctcgacacccagccctacaaggtcgacggcaacaagatctatggacccggcattgccgacgacaagggcggcatcgccgtcatcctgcattccctgaagatcctgaacgatgccggctggcgcgactacgccaagctcacggtgtcgttcaatccggatgaagaggtcggctcgatcggctccggcgagatcatcgccgagctcgccgaccagcacgacgtggtgctgtcctgcgagccgacggtcgcaccgccggtggccaagaatgaaagcctgctgctcggcgccagcggcaccgcgaccggcacgctggacgtgaagggcaaggcctcgcatgccggcgccgcgccgcagctcggccgcaacgcgctgatcgagctcgcgcatcaattgctgcagacccaggacgtcgcgaaatcgattccgggcacgcagctgaactggaccaccgcgacggccggcaccgtgcgcaaccagatccccgatcatgcctctgccggtgccgacatccgcctcaccattccggacggcgtgcagaagctgcaggcggcgctcgacgagaaggtgaaggacaggctgatcgcggacaccgaggtaacggtgaaggtcgccgcgggccgcccgcccttcgtcgctgacgatcgcggccgcgcgctcgccaagcagggacaggcgatctacgccgagctcgaccgcacgctggatatcgcggagatgaccggcggcgcgaccgatgccggatacgccgcgcgcagcggcaaggcggtggtcgtcgagagcttcgggctcgccggctggggctatcacgcgcgcgacgaatacatcgacaccaactcgatcgtgccgcggctctatctgatgacgcggatgctgatggagctgggcaaggcgaagtagcggggcgagatcagcggcaatggcgctgagacggtagcaccgatcttttaggccagcgcccgggcccccccccctctccccaccctcccccgcaaggggggagggagcccaacccatgcgctcgcctcacttagctaatcatccgccggcactggggcaccccctctcccccaaccgtcacttgcgggaggcggattgccaaaatatcgaaaacaaccccatgcacagtagctcgaggttgactgggcgccagacccggtgagaacgtctggcacgttcaagccgcaggaaagtttctcactttcaaacgcttagacccaatcacctggagccttgaccggacgcacaaccggcagtagtctgtttccgaatacggaattctgtattccgaattggacagccggcatgatcccgttggacccgcttccgaacctcatcgaccaagtctacgggcggttgctcgaggcgatcatcgaccgcacgctgctgcccgggcagcgcattacccagaacgagctggccgatcggctcggcgtctcgcgtcagccgatctcgcacgcgctgcatctgctgcatcgccagggcctggtcgcggaaagcggcaagcgcggcttcgaggtgacgcagctcgatccgcagcgcattcgcgagctctatgaagtgcgcggtgcgatcgacgcgctcgcggcgcggcttgccgcgacgcgcgtgaaggaggatgccgcggcccgcgcgcagctcgagagcgcgctcgaagccgggcgcgcgatcgatgaccacgcaccgctggcgcgcctgatcgcgctcgatgtcgacttccacagcgcgatctatcggctcgccggcaattccgcgatcgaggagatgatcgcgccgcaatggccgcatatgcgccgctcgatggcgaccgtgctcgccgaactcgattaccgcgacagtgcctggaccgagcacgagaccatcgccgcgcagattttttccggcaatgccgccgccgcggaggctgccgcgctggcgcatgcgcagacggctggacggatgaccgaagagagattgagagcgaccgacgtggcggcgtgaacccgaacctgacggcgccgcaagaacgaagaccaataatcaagggaggaaagcaccatgaaactgacccaagagcaggtcgaatttttccatcgcgaaggctggctgttcctgcccgagctgttcagccaggaagaggtcgatttcctcgcccgcgaggcggtcgcgatctatgacgccaaccgccccgaggtgtggcgcgagaagagcggcgcgccgcgcaccgccttcgccgcgcatctctacaacgaggcgttcggcatcctcggcgcgcatccgcgcatgatcgacccgatcgagcagctgttcggcgagaaggtctacatgcaccagttcaagatcaacgccaaggcggccttcaccggcgacgtctggcagtggcaccaggattacggcacctggaagcgcgacgacggcatgccggagccgcgcgcgatgaacatcgcgatcttcctcgacgaggtgatgccgatcaacggcccgctgatgctggtgccgcagagccagaccgcgggcgacctcaaggcctcgcacgatctcgaaaccacgtcctatccgctgtggacgctggacgaggagacggtgacccgcctcgtcaagcagggcggcatcgtcgcgccgaccggcaagcccggcggcatgctgatgttccacggcaatctggtgcatgggtcgagcggcaacatcacgccctatccgcgcaagatcgtctatttgacgctgaacgcggtctcgaactacatccgcaccccgacgcggccggactacatcgcgcatcgcgacttcacgccgatccagacggtcgccgacgacgcgctgctgcggctcgcccgtgcgccgcggcaggcggcggagtaaacgcgcaactgtcattccggggcaacgcgcagcggcgagcccggaatccatttgaccgcgcacttgttgtgagatggattccgggctcgcgactttgtcgcgccccggaatgacgaattctgaatttgtcgcgtcctgcgcgaccacaccatcggtaacaagcatcatgaacctgcatcacctcctcaaaacccgcgccgccgccggcaagccggtgcgcgtcgtcctgatcggcgccggaaaattcggctcgatgttcctgtcgcaggtgccgcatacgccggggctcgaggtgcccgtgattgtcgatctcgaccgcgagcgtgcccgcgaggcgtgccgcaccgtcggctgggacgacgcgcggattagcgcgaccaccttcaccgacgatggcgcgcgcgcgatcgccggcggcgcattcgatgtcgtggtcgaagcgaccggcaatcccgccgtcggcatccgccatgcccgcgcggccatcgcggccggcaagcatgtcgtgatggtcaatgtcgaggccgacgtgctggccggcccgctgctcgccgaagaggcgcgcaaggccggcgtggtctattcgctcgcctatggcgaccagccggcgctgaccgcggaaatggtcgactgggcgcgcgccaccggcttccacgtcgtcgccgccggcaagggcaccaaatatctgccggcctatcacgacgtgacgccggagggcgtgtggcagcattacgggctcaccgcgggcgaggcgcaatccgccggcatgaatccgcagatgttcaactccttcctcgacggcaccaaatccgcgatcgagatggcggcgatcgccaacgcctgcacgctcgacgtgccgtcggagggattgttgtttccgccgtgcggcgtcgacgatctgccgcatgtgatgcggccgcgcgacaagggcggcgtgctggagaaatccggcatcgtcgaggtggtgtcgtcgctggagcgcgacggccgcccggtgttccgcgatctgcgttggggcgtctacgtcgtgctggaagcgccgaacgactatgccgccgattgcttcaggcagtacggcctcaagactgacgcatccgggcgctatgcggcgatgtacaagccctatcacctgatcgggctcgagctgaacatttcggtgctgtcggcggcgctgcgcaatgagccgaccggccagccgcgcggcttccgcggcgacgtcgcagcggtggccaaacgcaatctgcgcgccggcgagatgctcgacggcgaaggcggctacacggtgtggggcaaattgatgcccgcctccgccagcctcgccgccggcgcactgccgatcgggctcgcgcatcgcgtcaagctgaagaacgacgtcgcccatggcgccgtggtgcgctggaacgacgtcgaggtcgatgaggcgaacgacacgatcaagacccgcaaggcgatggagcgcgcgttttcgcggtagcgctctctttcactcagctcttcacctctccccgctc

SEQ ID NO: 64 - DNA, 20640 bp, Bradyrhizobium enterica
gtagttgccggtgtgatccgagttggtgttcgccagaacgtcgacgcgcaaatagccgcccagcttgatgcaggtgtcggtgcccggaataaagtagaagcccggaccatagagcgagcagaccttgacgtactcgactgccttggccttgaccggaaggtcggccgccatggctccgctgctcgcggcgagaactgccgccgagcccaacaaaaggcccttaactatcttcatgctatcctccaagtgatgccttgctctgccggcaaagcgacaaacgttcccctcccgaaaaccgctgcggcgcagccattttcaagatgcgcgtggtcaactcggccactgcaggcgtgagatggtggatgccccccatctacgatgcggaacaatgcaattgagaggtcacatattcaacttatattagttagtcattctatgtttgcgcagccatgtgtcattcaggcaacggccgcacgaacattttcgtccggcgcctgcttcaaaaaattgctcgaagatgaatttttgttaaggtagggcatgaccgagcgcaaagcgaccgacaaactgcaggaggcgactgagcgactggcttgggaaatcgtgtcgaccagcatccgcctcgacgaattgcgcagcatctgggccaagatgatcggtatcaccggcccgcaatggatgatcatgacggtgctggcgaatgccgaggaccgcaatgtcggcctgcccgtcggcgcggtctcaagggcgctgcgggtcgaccagtccttcgtggtcacgcagtcgaagctgctcgaaaagaagaacctgctgcgccgcaagagctcgaccgaggatgcccgggtcgtgaacctgtcgctgaccgagcacgccaagaagcagatggcgaacctgtccgcgcagcgccgggagttgaacgagttcgtctatgccgagctcgatctgcgcgagctgcagcaactgaccggcaagatggattccatcaagacccgcctggaaaaagcgatcgccagaatctcggtcgatctctaggaagatcgctgatatcagccgcagtcccgatcagattcttgtttggcatgatctcgtcggaaaaccgcttcgcgcttttccggatcatgccagtgccagccgctgccgcgagcgcatcaggagcagcaggataatgctgacattgagcaggttccaggcgaggccattggtgaaggccgcagcataggaaccggtggcgtcgaagatcacgcccgagatccagccgccaaacgacatcccgaacaccgaggcgaagatcacgatgccgatccgcgttgccgcttccgatgccggcatcgcttcgcgcacgatgatggcgtagctcggcacgatgccgccctggaacaggccgaacatcgcggagatgacgtagagcgaggtcaggctgtcgaagaacagatagaacagcagcgcggagccctgcgcgatcgagccgatcaggagcgtgcggatgccgccgatcctgtcggcgagaaagcccgagccgatccggctgattatgccgaagccaagcatcagcgacagcatctcggcgccgcgcgccacgccgtagccgagatcgccgcaataggcgacgatgtggacctgcggcatcgacatcgcgacgcagcaggaaatcgacgccagcgacaggatcgcggtcagcgcgttggtggaaagcctgagatcgacgcgcggcggcgcagcattgacatggctgcgccgggtcgccgcgcccatcaacagccgcagcaccacgagcgccagcgccatcgcgaccgcggtgaagaccccgatcgcgatatgggtggcgcgccagccgaggctctggatgccgaaattgaccagcggcggccacaccgtgccgccgacataattgccgctggcggcaatcgcgaccccgagaccgcggtagcgctcgaaccagtgtgaggcctccgccatcagggggccgaaggtcgcggccgacgacaggccgatcgcgaaatggagcaggatgaaggcccagaccgacggcgcgtagccggcgccgacatagccgaggccgaggatgccgatcccggcgccgatcgccgcaacgatgccgtagcggtcgctgatcttgccggtcacgacctggccgagaccgaaaccgagcatcaccatcgtgaaggcgagcgaggcggttccgcgggtcgcaccgaagtcggtctgcaccaccggcagcgccaccacgaccgaccacatgccgacgctgccgagcgagccgatcaccacggcaacggcaagacgcagccatgcccggcgcgagtcgggaatgaacgttgcggcttcgggggaatattcagaagaaattaccacggcccgcggaacttcgtcggcaattgcctcaaggtcaagccgcattgccgagagattaggcatgcagcagcaaggggacgcgccgaacttcaccggcgcgtgaagcgcctcatttgccgtagttcgggtcctgcgcctggaacggaccgcacttggcgtcgagcccgaaccggtgatcgaaatcgacggtgccgccgccgaggggaatgcgggtcggcggcaggccgcgcgtgtactgatccacggtcacgaatttcttgtccgcgctcatcgtcacatgcaccggctcgaggaccttgcccttgttgagctcggtcaggtcgagcgtgtagtagccgtccgccgtcgcgcccgcggccatgccgccatgcggcgccaacaccaccgattgcggcaaaaagacctccatcaacacgccgttgcccttgcaggcgaccatgcggatcaaccaggtccggtcgtccggcagcgtcgcggcgaaggccggcgccgacagcagcgcaattgcggcagcaagcgccgccatcaaggttcgacccgtccggttcgacatggatcctcgggggtgattggtgtctcgcgtttcgtcgagggccaggccgcgaaagttcaaatccgcttcgtgcaccgcagggatcacagccgcacccgatcgaccgggaatattggcgatcgcaccgtgatccatgttgacgaagaaaactgatacaatgcgagccggttcacactgacggctcgccgtccggacctatcatcccgccggatggcgcgcagctcgcaggtatgaggatcgaagcgcacactgtcggaggcccatcatgcattcatcgtcagcagaatggttacccgttgcgtcagcaccgccggaccgggaactcgaggtttgcatcctcgactatgacggcatggtccatgcgctgatgttcccgtgccaccgggacggtgccgagtgggtcgagcatctcagcagcaggcatctcgacatccagccgacgcattggcgcaactggatgccgtccgccaactaaagcgcctgcccggatattgcgctagatttgccacgtgaggttcaagggtgggccaggaggctcgtcatggaatcacacgtgatccctttcgagaatcgttggacgaacggcgagcatgcctcggagtggcattgcgagctcgagcggccgggcgtgccgacggtccggacgatgtattgcgagcatgagacgcattaccgcggcgagacggcggtggtgttcgacatccctgccggctttgtccacgactggctggcgttccacgcccggcgcgccgcccggcagcaatcgctgtggcgcgccagcgtcatcacgctcggcctcatcgccgcatcgggcgccgtgctcggtgtgctgagataggggcaacgaccccgtccccggaacggccagacggtccgccccgccctttccggccccggaatcgcctgcccaaaagcctgcgacgtcaggcgcagccctccgacggcacttattaaccctttgctaaccatacacccggcaagaattgccgagtgaagtcgagtgtcgtcgaacgcgtctaacgggcggagatccccgtgaacgccagcgcggtgcctcactttcggaacggcggccctgcggccgtcgcgcagacgcttggcggccgcggccgccagtcgcgggggagagcggcaaccatggtcgacatcacggcgggtcagggcacggcgggcaagagcggattgccgagcctcggcgagatcggggatatcctcaagcgcggcgatatcgcgctggcggtcggcgtcctcaccatcctggtggtgctgatcctgccgctgccctcgatcgtgctcgacctcttcctggcggtctcgatcacggtctcgatcctgatcctgatgacctcgctgttcatccaggcgccgctggaattctcgtcgttcccgaccatcctgctgatctcgaccatgctgcggctgtcgctgaacatggcctcgacccggctgatcctgagccacggccacgagggcacggcagccgccggccacgtcatcgaggccttcggcaacttcgtgatgggcggcaacttcgtgatcggcatcatcgtgttcgcgatcctggtgatcgtgaacttcgtggtcatcaccaagggttcgggccgtatcgccgaggtcgcggcacgcttccagttggactcgatgcccggcaagcagatggcgatcgacgccgacctgtccgccggtctgatcgacgagaaggccgccaaggaacgccgcaaggcactggaagacgagagcggcttcttcggcgcgatggacggtgcctcgaaattcgtccgcggtgatgccatcgccggcctcctgatcgtcggcatcaacatcgtcggcggtatcatcatcggcgtcgcccagcagggcctctccttcagcgaagccgcccgcacctacaccgtgctgacagtcggcgacggcctcgtcacccaggtgccggcgttgatcgtctcgaccgcggccggcctgctggtctccaaggccggcatcaccggcgccgccgacaaggcgctgatgcgccagctctccggctatccgcaggcgctcggcatgtcggccggcgtcatgctggtgctcgggctgctgccgggcattccgaccctgcccttcctggcgctgggctccggcgccgcgatgctcgcctggaacgcgcgcaagcagaagcgggcggcgaaggcggccgaaaccgcggcagccgccgctcccgccgcagccgcggccgccgccgctgccgccgcggaagagccgatcgccgccgcgctgaagatcgacgacctcaagatcgagctcggctacgcgctgctgccgctggtcaacgggcctgacggcaccgaccgcctcaccgagcagatcaaggcgctgcgccgctcgctcgcgatcgagatgggtttcgtgatgccggcggtgcgcatcctcgacaacgtccagctcgaggccaacagctacgccatcaagatcaaggaagtcgacgccggcaccggcaagatctggccggcccagttcatggtcatggatcccgccggcaaccaggtgcagctgcccggcatccacaccatcgagccgaccttcggcctgccggcgacctgggtcgatgccggcctgaaggaagaggccgcgctgaaaggctacaccgtggtcgacgccgccacggtgctgtcgacccacctgaccgaactgctcaagaccaacatgtcggacctgctgtcctacggcgaggtgcagaagctgttgaaggacctgccgaaggagcagggcgagctgatcaaggacatcgtgccgagccaggtcacggtgtcgggcatccagcgcgtgctgcaattgctgctcgccgagcgcgtttcgatccgcgatctctcgaccatcctcgaaggcatcgccgacgcattggcgttctcgcgcaatccggcgaccatggtcgagcacgtccgcgcccggctcgcccggcagatctgcgcccagaacacctcgccgaacggctacctgccgctgatcgcactgtcggcgcgctgggaacaggcgttcgccgagtcgatcgtcggcaccggcgacgaccggagcctcgcgatgcagccctcgaagctctcggaattcatgaccgccgtgcgcaacgccttcgagcaggcggcgcgcgaaggcgaggcgccggtgctggtgacgtcggccgcgatccggccgttcgttcgctcgctggtggaacggttccgttcgcagaccaccgttttgtcgcaggccgagatccatccccgggcccgtctgaagacggtcggcagcgtctagcgcttcggctccgaccgcggcggaaccgaagctctgggttgtagtttgacggttttcgtcacgccgggcggggcgtcagttcgcgggaaaaatgctgtagtggccgcaaatcacttacgttttcgcccgtgttttcccgccacaggcaactgatttatgtggaaccggccgaaacggccccatctggaatgcagcattccagcgtcagctcaaggcactgatattacgaaggtttaatgcgatctgagattaccaaagggtcatttttgatcgcgaccgatcacgtatgatcacgctcttgtgatgccatctggggaacggaatcggcaaatcctacgttagcgaggcacgagacgttgaaccgggcaccaagccgaaccgacagattgacagagagcaggaaggcggcaggagacttccatgaaccactcgatctacagcgctgatcgtacgacgcacctgaagattgtggtggtcgctttggtcgccggtatcctggtcgctggcttcggcatctcggcgcacaattcgtcggacgagggttacactcagaccgctcgtgtcatgaaggccggcaagccggtcgcgatcaccagcacaagcaattcgctggtccgctaacaggagagtttcacggaattcacgtagctctttacagccccccaaagtcgctgcgtggatatttaagacccccaactacccccaagttgactatcgaaaacgcccgctccccacgggcgttttctttttgtgcggcgggtgtggctgtctccacgtcactgccgacagtctctcacgatagggtgcggccgctatcgtgacccgggcggcacggtctctatcagcttgccggtgaagatcggcgccgaggtcggctggccgttcggcgaaccgccggcctgttcgacggtcaccgcgtaggtggcgccattgatcacgtcgggatcgtagcccgacagcaccggacgggcggtgaaatcatcggcgccgatcacgccgagcgagcgcggctgcggcagcttgtcggagatcagccagagctcgaagctcttgccgggctccgacgcggcaccgaccttgcgcacggtgaaattcttggtcgcgccgtcgatggtcatgatgaaggccggcccgccattcggtccctgcaacagcgcgacatattgcgccgacggcgtgagtgccggcgccggcgtcttcacttccacggtctggatgcgcggcttcggccggatcgcattcggcaaggcatcgggccggtagatctgcaggccgagcgtcaccagcagcgcggccgcgatcgccgtcgcagcggacgcgatgccgcgccagcgcttcatgcggccggtcagcgcgaccacgttgctgtcgtcgccaaggcgtggccgcaccgatggccgccggatctcggccggctgccgtatcccttccggctgcgaaggctccggatcgaacgccgagccgaactcgacatcgtctgcgatcggcgtcggtggcggcggcgccaccgtggcggccggcgtctcgggcagcaccagcggcgcctgcggcgcgctggcatggccgatcgccgccttgatgttctcccagaccaccgggcgcggctcgaccagaccgaccatctggttgagcggcccgagcctgaactcccaggcctgcaccagcgcgccgaacccgctgtcgacggccatcatggtctcaacctgcgtgcgctcatcggcatcgagggtaccgagcgcatattccgcggcgagcgcgatatggtcttcgctataggccatcaatcagagtccaagacactcccggatatccatcaggctgcggcgcagccaggtcttcaccgtgttcaccggtgtctcgaactttgcggcgagctgctcgcggctccagccgttgtaataggcgagcagcacgagcttctgacgatctggctccaaacgaccgacgcactccagcaaccgcttcaactcttccgtcatctcccgccgcgccagcggatcgggcgagtcggcggcaacctccatagcagccggctcgtcctccaatgaggactcgccacgcttgcgcaccacatcgatggcgcgattacgcgcgatcgacgtcatccacgtgatcggggaagacagggccgggttgaactgcccggcactgttccagatcttgacgtaagcctcctgaatgacctcctcggcgagatcctgacgccgcaagatacggagcacgacgccgaagagtttcgcgcgggtcgcggcgtacagccgctcgaaggcggcctcatcccccttggcgacggcggcgatcagccagaccagctcagccggcgtcagcattcagcgccctccaagcctgcatcccccatcgcctcattgccaccgcgctgccgattatccgctccggaccggtggtagcatattttgggacagcaccatccgccaagtggctgacaagtggccgagcagaggccggcttgtggacagcgcccaacaaaaagcccgggcggtcggccccggctctcaatgtggtctgcggagggagcgaggggtcaggcgatgacgcccagacgggcccgcatcaggccgatcgaatccatgtcggcttgctcgcgggcgctctcctccgcgcgttcgcgcgcctggtcgcgctcgtcgagcagttcgaccttcttcaattcctcgaaggcttccgacagcagcgccttggcgtcgtcgagctgggcgcgcaattcgtcggccgagcgggtcaggttctcgcggcgctggatcgcggccttggcataggtagggtaggcgaagtgcgagggatcgttgatcccggcgcgctcctgctcggtctggatctcgcgctcgagctcgacggacatgcgctggaagtcggcgatcatgccttcgatctgggtaacccgacggcgcttttcatcgacctgaaatttcttcaggcggatcagcgtttcacgtgacttcatcgactcatactccccagaagtccccaatccgaacgcgggacagagccggctccccgctgggccccgccggcatagctatggtgtgccggcgatgatggcctgacaaagttagcgttccgtttccaaacccgacaggatttgagccagttgccggtagccatcgccgaggctggtcgcctcgtccttggcctggcgcaggaagctctccagcggctcgtgcaaccggatcgcctcgtcgacctcggggctggaacccggccggtaggcgccgagccggatcagttcctccatgtcggcataggtcgccatcacctgccgcgccttgttgatgaagggcaggaaattggggtcagccgacttcggcatggtgcgcgagaccgacttcagaatgttgacggcgggatagcggccgcgctcggcgatcgcccgctgcatcacgatgtgaccgtcgaggatgccgcgcaccgcgtcggcgatcggctcattgtgatcgtcgccgtcgaccagcacggtaaatatcgcggtgatggtgccggcgccagtgcccggccctgcccgctccagcagcttcggcagttcggtgaacacggtcggcgtgtagcccttggcggtcggcggctcgcccgccgagagcccgatctcgcgctgcgccatcgcaaagcgcgtcaccgagtccatcaggcacagcacgtcctggtcctcgtcgcggaaatattccgcgatcgcgagcgtgaggtacgccgcctggcgccgcatcagcgccggctcgtccgaggtggcgaccaccacgaccgagcgcgccaatccctcctcgccgagatcctcctggaggaattcctgcacctcgcggccgcgttcgccgatcagcccgatcaccgagatcgcagcatcgacgttgcgcgccagcatcgacagcagcaccgacttgccgacgcccgagccggcgaagatgccgagccgctggccgcggcagcaggtcaggaaagtgttaaggccgcggacgccgaggtcgagcggcggcccgacccgcttgcgcgaatgcgccggcggcggcgagttgcggtaggacatcggcgaggcgccctgcaccaagggccccttgccgtcgatcggctcgcccatcgcgttgacgacgcggccgagccaggccggcgacggccgcacctggcttgccgcgttggcgatcacagcgcggcagccgcgcctgacgccctcgagcccgccgaacggcatcaccaccgcattctcgccggagaagccgatcacctcggccgggatgaagcggccggcgccgacatcgatcacgatgcgggcaccgaccgacatcgcgtgaatggggcctgcgatctcgaccatcagtccgcggacgccgacgacacggccataaatattgacgccgtcgatgtcgccgatctgctccgcgagcgccttcattgcgaaaaccttaagtttccgcaattttgcgccggccgcttaacttcgtgtttacccgcatcattaatcattgcgtcactgtctttggtgactgaggtcgctcgcccatcagaagaagggcgagtcgcgagagtcggttaggcccgattcttaatgtggaaactgaacgagcgcggttaggaaaagcttcttctacgcaatatcttagggcgattcgacaaaaattgcacggttagagcttgcgtcgaggaatcagtttttgttaaccatatctcgtcaggatccgaatcagttgttcaaaggcgttttgtgagtgccgcaagtgcggccgacctgacgcccggagcggcgactataggggactggcatgcgcgttttgctaattgaagatgatagcgccgtcgcgcagtcgatcgaattgatgctcaaatccgagagtttcaacgtctatacgacggatctcggtgaagaaggcgtcgatctcggcaagctttacgactacgacatcatcctgctcgacctcaacctgcccgacatgtccggctacgacgtgctcaagcagctccgggtttcgaagatcaagactcccattctgatcctctccggcctcgccggcatcgaggacaaggtcaagggtctcggcgtcggcgccgacgactacatgaccaaacccttccacaaggacgagctggtcgcccgcatccacgcgatcgtccgccgctccaagggtcacgcccagtcggtcatccagaccggcgatctcgtggtcaatctcgacaccaagaccgtcgaggtcggcggtcagcgcgtgcacctgaccggcaaggaataccagatgctggagctgctctcgctccgcaagggcaccacgctcaccaaggaaatgttcctcaaccatctctacggcggcatggacgagccggagctgaagatcatcgacgtcttcatctgcaagctgcgcaagaagctcgcgaacgcctccgagggccgcaacttcatcgagaccgtgtggggccgcggctacgtactgcgcgagccgcatgaggccgacgaacgcattcccgcctgacgctttctatagcaaacctcctcaaccccgccgcaaatggcggggtttttgtttttgggacgctacgccaccgggaccgcggcaagggcggcgagcacatccgcgcccctgggaacgccgagcccggtgcaggcgctccagccggggccggcatcgtagcctttgccgccgacgcggttgttgccctgctggactacgcggaaggcgccgggattgccgtagagcgccgcattgagcaagccgatctgctcgccgcgcgcggcgatcgcaatcgcgaccagggcggcccatagcggcgtcgcggcgctggtcccgctcatcgccatcggttgcccgttgacgatgatacggtagcccgggcttgccgcggccgcgcaggcgacatcagggacgccgcgccggatcgcgccgtcgttctgcgattgcggcagcgtcagatgcgactgatagtcggggacgggaaacgcatcgctgatgccgccgccggtgccgatggtgccggcgttccagaccgcctccgccgcggccgccccattgcccgcagcaggcccgggctgcgtgccgccgcagctcgtcgcataggggctcgaggccggaaaccagacatggaccttgccgtcggtcaggccgctggttgcgagctggtcgccggaggcgaacagcacactgacgcgcagccgcacggcatcggcgaggaccgcctgcatcgcgtcgcgcccgggcccggtccagaatttctccgcgctgccccagctgaccgagatcacctggggcgcatgcgcttcatcgaacaccgcctgatggatcgcatccgtgagaccggcggcagagttctcggcaaagtagaccacgatcttgctcttcggcagcagcccggcgagcacctggaggtcgagcgcgatttcctgatcggcgacatcgctggtgccgaggccgttgtcattgccggtcggcgggacattgatcacgaccggcggctgccggttcatgccggccagcgccatggcgaggtcgctctcgagatagccgccgccgagggctacgatgccgacacagatcgacgacacgtcgcgatcgagcggaatgccgtagcgggccgcaatgtcggtcggccacagcccgctgtcgctccccgcgctgccgcgggcccgcagcagcggcctcgtggtccggagcggccgctgatcgaagccgagaatggcgcgggtccatggcgcgatctcggccggcaccgtcagcccgccgacccgcgcgcgaaacacgcgctcgccatcacgataggtgcgaagcgtcgcgccgaaggtctcggccatctgcctcgccgtgccctcaagcgccaccgtacgcgcgacgagatcggtggcaacgacggtgaatccgcgctccgccgccagacgcgtgatccgcgcggcggcgctggcatggctgcggtggcgctgcgttgcgagctggcgccgcgtgaccggtctggcgagccgggccagatcgccggcgcttcccggcgtaaactcgtcgggggtgcgccgcttgacatagaccacgacggtgatccgctcgtcgggatcgacatcgccgaccagcgtcgcgccttcgggcacggcgcggttgctgccgggcagcggaatcctgcgctcggaggtgcccgccatcaatgcggtctcacttgccgccgcatggtgtcggctgcaccggattctgcgtatcgtcgtaggcgcagaacgggatcgaccagacaaaatccgccgaggtcgtgaagcgcgtgagacctggcttgccctcgaagatcggcggctggcttgagaacttccagtaccattccggcaacaacggcccgagcgggccgatcggaccgttcgggccgaacgagaggaatccggcctgcgacgacggcgtgccgtcggccttgaagaccgcgcggccgtggcaggtgatgcaggacgaggtcgcgacgaagccatcctcggtgacggaattgccgaccctgatgtcgagcccgacattgtcggtaaaatcggtttgggatcccttcaggcagtaattgctgtagacgggatcgatgtcggcgctcgatagcatcgccgccaatgcgggcgtcttcgcgcaatccggataaccctggccggcggtgcggttggacggcacgaacgcggtctgcgcaccgaaattgtcgcggcagccgatgatgtcgcagcggctcggattgaaccggtgctcgaacgtcgcccaggtccagttcgggacctgcttgctgatcacatgcatcgagaccagggcgtattgcacgccgtccgcgctgttgacgtgataaagctgcggcacctgcgccaccgtcaccttgttgtgggtgaattgcggaatgccactgaccggcacccaattgcccttcacctcgacggagtcgaccggaaacgacagcgtcttgccgaacgcggccttgaggcccgaccgcttgtagagattgttctgcacgatgaagtcgaacgtcggcttgttgtgccgcgcttcctccatctgcccctgcccggcgcccggcggcagcgccggcagcaatccgccgctctgctgcacgccttcttgcgccacctgcggcaggatcggcgggcgcaacgccggcggcgtcgcggccgcgggaaactgcggattgggctggaacaggtcggtatcgctcgcccaggtctcgaaggtcgaattgctgccgccggcgcgggtattggcctggatgaagagctgccaggcgacctgatccggcgcggtcatggccggattcgacggcgattgcgccgcggccggaacggcgggaagcgcaaacagactacaaaggagcagcgcgtcgatcgaccttctcatctttgctctccaaatcgggttcaaggttggaatccgtcccccatccagcgcgcatagagatcgagcgggtcctgcaaccagcggtgaccgggcggcatgaagccggacgacagcgcggcgaagacgcggcgtgcattggcatgatcggcaaaatcaccattgccggccgggtcgcagatccagtcggcgtcgctgagccgaacccccttcggcgtcatgcaggcgatgtcgcccggtcgaaacatcggcaggatgtcgttgccaaagctggtcgtcatcgggatcaccgaacccttcgcgacatgcacttctggttgcatatcgtataaacgaccatcgcacaggccgctgtgaagcggctcacaccgccgcgcagcaatttttccaccggtccgcgcacgccgatgcccacaagccgggggacccttcgaacccaaacttcgcgaattgcgaccaatcagctataggatgaccatctggggcaattcgggcgcatcacatgatcctgcaatccctcgccggcctgccggcgttcctggtctatttctgcacggcgctgatcgccgtggtcgcctatctgttcgtctacacgcgcgtcacgccgcatgacgaattccagctgatccgcgacaacgatccggcggcagcgattgcgctcggcctcagcctgctcggcttcgtgctgccggtggtcagcgctatcgcccattccgccaatgtgatcgactgtctgatctggagcatcatcgcgctgatcgtgcagatcatcgtctattacatcgtgaagatcccggtgccgaacctgtcggcgcggatcgcctccggcgaaatggcggcggcgatctggctcgggctgtcctcgctcgccgcaggtgcgctgaacgcggcctgcatgatctactgagccattgagccgaaccatggcgcgcaaaccaaacccggaattcggcaaacggcggccggtggtgccggcggtaccgccgcggcccgatccgccctccaagcggtccaatcatgtcgcgctgctgatgatgggcacgctcgcggtcggcagtggcgcctacgcgctgatgccgcggcagaattgccagccgatcccgccgacgccgccgggcgtcaccacgccggccgtcccgcaacccggcgccgattgcacgcagcgcagctcgtcgtccggatcgggcggcggtggcagcggtggcggctcgcgcagcagcttctacagcggaagctcgtcgtcgggcggctcttcatcctcgtcaagctcgtcgtcaagctcgtcagtgagccgcggcggcttcggctcgttcgcgcatgcattcggcttcggcggcggctgatgagcacattggcgtgtcgtcgcgtgctttcgcttgcccggcaatcagagctgatggaaactcggcgcggctccgcaaatggcagggcggaaggtagggatcgcgtcgatgaagcgctcacgccgggtctggctgaaactgatggggagcgtcgcgatcggcgcagcttcgatcgggctgacgccggctcacgcccgcagccgtcatcaccatgccggacacaaaacgaagcgcgatccggagcaagtgtcggtgtcgccctccggcggcttcggcggcgcgccgcgcggcctcgcccatttcggccatccgtcgcatggtggcggctgatacgaggctgagtagcgatcaggtccccttcatgcaacgcatcgcatgtcccgagcgcgacgactggcaggccaccgccgagagcgtcggcttcaccttccataccatcgaaggcgaacgctactgggacgagcgcgcctactacgctttcacgctcgacgagatcgagcgttcgatcgaggcgccgaccggcgagatcgatgcgatgtgcctcgagctcgccggacgcgcggtcagggatgagcgctatctgcgccggctcaagattccggaggcgttctgggacctgatcgcggcgagctggcgccgcagggatccaagcctctacggccggctcgacctcagcttcgacggcagcagcccggccaagctgctcgaatacaatgccgacacgccgacctcgatcttcgaggcggcggtgtttcagtggacctggctcgagcaggcgatcgcgcgcaacatcatcccgaaacgcgccgaccagttcaactcgatccacgagcggttgatcgaagcctggaagaccatcggcgccaaccatccgctgcatctcaccggattgaccggcaatgccgaggacgccggcacgcttgcttatctcgaggacaccgcggcgcaggccgggctgaagaccacgctgctcgacatcgaggagatcgggctgcgcgatgacggccagttcgtcgacctcgacgaaagcctgatcgcactcgccttcaagctctatccatgggagtggatgtttcacgacgcattcggcaagaacctcagctcggcgccgacgcaatggatcgagccgccttggaaggcgatcctgtccaacaagggcatcttgccactgttgtgggagatgtttccgggccatcccaacttgctgccggcctggttcgacgacgacccgcaggccgcgcagctaggcacctccttcgtgcgcaagccgatctattcgcgcgagggcgccaatgtcgaactggtcagcgccggcgtcacgctggtcgccgagcaaggcccctacggcgccgaaggcttcatccgccaggcgctggcgccgctgcctaatttctccggccagtatccggtgctcggaagctggctggtcgaccacacgccctgcgggctctcgatccgcgaagatgaaaatccgatcaccggcaacacctcgcgcttcctgccgcacgcgattttgtagccggaagcagttgaagcaagcgcgatcctttcccgtcatccttgaggtgcgagcggagcgagcctcgaaggatgcacggcccggctggtggccgtcgacccttcgagacgccgcttcgcggctcctcagggtcacggaacgcgcagagttgcgcttcccggtctagagagatccagtcaagtcaccgcgcagcggacgcgaccgccttcagcacatgcaacgcggctccggcgcgcgcgaccggggcggtgctgggctgatagagcccgcggcggtcgggatacggccggaacaaattggtgatgccgaccacggattccgccgcgcctagcgccagcacgccgtcaggctcgagcatccgagagatcttgccgaagatgcccgccttggtctgctgatcgaaatagatcagcacgttgcggcagaagatcacgtcgaaggtgccgagatgcgagatgtcctgcagcaggttgagctggcgatgctgcaccatgccgcggatatcggcgttgagctgccagagctcgccctgctgcttgaaatacttcagcagcagctggatcggcaggccgcgctgcacctcgaactggctgaacaggccggccttggacttttccagcaccgcctgcgacaggtcggtcgcgacgatctcgatgcgccagcccgcgaacagcgcggtcatctccttcagcagcatcgcgatcgaatacggctcctgcccggtcgacgatgccgcgcaccagatccgcaggctgcggcgcgccgcgcgcgcctgtgccagcgccggcagcactgcgtccttcagatgatcgaacgggatcttgtcgcggaagaagaaggtctcgttggtggtcatcgcttcgaccacctccgaggtcagcgcctcggcgccgcccttcatcttctggaccagctcgggaatgccggcaaggttcgacctgcgcgccagcggcagcaggcggctctcgaccagatattgcttatcgctcgacagatcgagcccagaacgttccttcagaagcttacgcagatactcgtagtccagcggcgtcacgaacggtctccggcaaacacgcgaacaagcttcgacgcgatctgattgagcggcaacaccgcggcgcagatcccggcattgaccgcagcaccaggcatgccccacaccacgctggtggcttcatcctgggcgatcacgctgccgccggcggcgacgatgtccttgccgccgcgcatgccgtcggagcccatgccggtcaggatcaccgacatgatgctgccctgccagacatcaatggcggaggtgaacatcgggtccaccgcgggcttgcagaagttgaccggcggcccgtcgtcgagcgcgatggtggcgtcgatgccgtggcggacgatgcgcatgtggcgcgctccgggcgccagatagatccggcccggcttgatgctctcaccgtcgatcccctcatgcgccggccgcttgctggcgcgcgccaggtgctcggcgagaatcgtggtgaaggtcggcggcatgtgctgggtgatcagcaccgggacgcgatcgatcaccgcaccgatctccgcgaccagcgacatcagcgcctgcgggccgccggtggaggagccgatcagcagcaccttcggctgcagcaggccgaacgaacggcgcgcgattggggccgacgccgtgggcgctgcagccggagccgccggacgcgatttgtcgtgaccgggcgccagcggcggacttaccgtcgtgtgcacggtgctgcgccgcgccttggcgccgagatgacggatcttctggatcagatcgtggcggaaggtttcggccgcggtggcctcgcgcgtgctctccggcttcggaatgtagtcggacgcaccgagcgacagcgccttcaggctgatctcggcattgcggcgggtcagcgtggaggccatgatcacgatgagatcgcgcttcttcgccagcagctgcggcagcgccgagatgccatcgaggtcgggcatctcgatgtcgagcaccgcgacgtcgggattgatgcgatcgagctggttgacggcatcgaggccggtgcgcagcgaagccacgacctccatgtcgggctcggcaccgatccagcgcgagatcatcccgcggatcaccacggaatcgtcgaccaccatcacccgcaccttgtcggttcgggtcgatgtcgggaccgcagaacttgtcaacgcaacactcatgacttcaccagcgacgcaacacgacgcacaacaaccgttgagccgaaggcttctgccgccggatcgaacagtgaacctagataagcccgacttcctggaacttcgcggtgacgatgtcccggtcgaacggcttcatgatgtattcgttggcaccggcatgcagcgcgcgggcgatatgcgcgacgtcattctcggtggtgcagaacacgaccttgggctgatcgccgccgggcatgcggcggagattgccgagaaactcgtagccgtccatcacgggcatgttccagtcgagcagcacggcctcgggcatcgcgcgcttgcacgcctcgagcgctttcgcgccgtcctcagcctcgacgatcgtgaaatcgagcccttccaggatacggcgggcgaccttgcgaatgacgcttgagtcatcgacaacaagacaggttctcatctgcgacctcaccttcctcatccccggggggacgtttcagttcttcaattctgtcggcccgtctcaggccgccttggcatcaggcaccagttcaagcacgcgatcgacatcgaggacgaccatgagctggccgtcgagccggtggacgccgccggcgagcttggccatgcggagatcgagattgaccgggttgtcctcgcggctgtcgtcgggcagccgcagcacctcgccgatctggtcgatcaggaggccataggattcgccgcgctggtcgacgccgaccgccatcggcttgccgtcgtcggccttcggcagcccgagccgggcgcgcatgtcgaccacggtgacgatgcggccgcgcaaattgagcacgccggcgatctcgctggaggccagcggcacccgcgtcagccgctccggcatgaacacatcctgcacccgcgagatcggcagcccgaacagctgcccgccgatcacagcggtgacgtactcggccatcgcgccttcactggtctcggtcttggtcatcaatgctgtttccttcaagcggcgcgccgcaactctgcggtctgctctttcagcgccgcgatcagcccgggacggtcgaacttggcgacatagtcgtggaagccggc

SEQ ID NO: 65 - DNA, 18385 bp, Bradyrhizobium enterica
cgaagtgacgcgcgtggcgcgcgaggtcggcaccgagggcaagctcggcggccaggccgaggtgcgcggcgtcgccggcacctggaaggacctcaccgacaccgtcaacgtcatggcggcgaacctgacggagcaggtgcgcggcatcgtcaaggtggtgactgcggtcgccaacggcgacttgaagcagaacctcacggtgaagtcgaagggcgaggtggccgcgctcgccgacaccatcaacaacatgaccgagacgcttgcgaccttcgccgaacaggtcaccagcgtggcccgcgaagtcggagtcgaggggcggctcggcggtcaggccaacgtgcccggcacagcaggcacctggaaggacctcaccggcaacgtcaacctgctggcggccaatttgacctctcaggtgcgcgcgatcgcggaagtggcgactgccgtgaccaagggcgacctgacgcgctcgatccaggtcgacgtgcgcggcgaggtcgccgagctcaaggacaacatcaacacgatgatcggcaacctccgtcttacgacggagcgcaacaccgagcaggactggctgaagaccaatctggcccgcttcaccaacatgctgcagggccagcgcgatcttgcgaccgtcggccggctgctgctgaccgagcttgcgccgctgatcaatgcccatatgggcgtgatctaccaggtcgacaatcccgagaatgcgcagctgcgtttgctagcggcctacgccagcgacagcagcaacccgcatccgcaaatcgtccagttcggcgagggactgatcggccagtgcgcgctcgacaagcggcagcgtctcgtctcggatattccgggcgatgccgtaccgatcaattcggccctgatgcggatcatgccgaagaacctcgtcgtgttcccggtgcagttcgagaaccaggtcaaggctgtcatcgagctgtcttcgatctcctcgtttacgacctcgcagatcagcttcctcgaacagctcaccgacagcatcggcatcgtgctcaacagcatcgaggcgacgatgcagaccgaggcgctgctgaaacagtcgcaacagctcgccggcgaattgcaaacccaacagaaggaattgcagcagaccaacgatcagctcgagcagaaggcccagcagctcgccgaacgcaacgtcgacgtcgagcgcaagaaccaggaaatcgagcaggcccgccgcgcgctggaagagaaggcgaccgagctgtcgctgacctcgaagtacaagtccgaattcctcgccaacatgtcgcacgagctacggacgccgctgaactcgatcctgatcctgggccagcagctcaccgagaatccggacggtaacctgaccggcaagcaggtcgagttcgcccgcacaattcacggcgccggtacggatctgctgaacctgatcagcgacattctcgatctgtccaagatcgaatccggtacggtgacggtcgatgccgaggaaattctgacgtcaagtctgctcgagaccgtcggccggccgttccggcacgaggcggagaaccggcatctgtccttcagcatcgatgtcgatgccaacctcgcgcgcagcatggtcaccgactccaagcggctgcagcaggtgctgaagaacctgctctcgaatgcgttcaagttcaccgccgatggcggcgtcagcctgaccgtgtcggccgcgctcggcggctggagcgcggagcatccgatcctcaatgccgcgcccgccgtcgtggcgttcgaggtgtcggataccggcatcggcattccccaggacaagcagaagctgatcttcgaggcgttccagcaggccgacgccggcaccagccgcaaatacggcggtaccggtctcggccttgccatcagccgagagctggcgagcctgctcggcggcgagattcatctgcgcagtgcgcccggcaagggctcgaccttcacgctctatctgccgctgaaatatgccggaccgtcggtcgcattgcggccgcaggctcagccgatacaaatgccgcacacggcggcgccgtcgctgcagtcatcgtccggtacccaggagcgtgtgatcgagcagctgccggatgaccggctcaatctcgagcccggcgacaccatcctgctgatcgtcgaggacgacccgcattacgcgcgggtgctgatcgacctcgcgcgcgacaagggcttcaaggtgctggtcgcaagccgcggcgccgaggcgctcgatctcgccaagcagttccagccgagcgcggtctcgctcgacgtcttcctgcccgacatgctgggctggaccgtgctcagccagctcaagcacaatccgctgacccgtcacattccagtccagatcatcacgctcgacgaagatcgccagcacgcgctggcgcgcggcgcgttctctttcgtcaacaagccgaccacgaccgaaggcgtcagcgcggcgctgtcgcagatcaaggaatacgccaggccgcgccgcaagcgcctgctgatcgtcgaggacaatgcggccgagcagctcagcatcaccgaactcctcgggcacgaggatatcgagatcgtgaccagcggcaccggggcaggggcgctgtcgacgctgcgcgaaaatccctgcgactgcgtcgtgctcgatctgcgcctgcccgacatgagcggtttcgaggtgctggatcagatccgcaaggacgaaacgctctccaatattcccgttgtcgtgtttaccggccgggaactttcggccgaggaagatgcggaactgcacacgatggcgcgcagcatcgtcgtgaaaggcgtggagtcgccggagcgtctgctcgacgaaacgtcactgttcctgcaccgtgtgatcacggaattgcccgtcgaaaaacagaggatgctggagaagctcaatagttccgacgaggatctgattggcaagaccgcgctcctggtcgacgacgacgcccgcaacatcttcgcgctgtcgagcgtgctggagcggcgaggtatgaaggtgttgactgcgacaaccggtcacgaggcgatctcgctggtcgagtccaatcccaagatcgcggtcgtgctgatggacatcatgatgccgcagatggacggttaccagaccatcggcgcgatccggcaaaaccccgcctttgcgcggctgccgatcattgcgctgaccgcaaaggcgatgaagggcgaccgcgagaaatgcctggaggcaggcgcatccgactatctggcgaaacccgtgaacaccgagcaattgctgctggcgatccgcatgtggctgcaccgctgatcggcgatcgaacatgatggaccatgaaaaggtaaatatccttctggtcgatgaccagccggcgaagctgctggcttacgaggtcatcctgaaggaactcggcgagacgctggtcccggtttcgtcgggccgcgaggcgctcgagttcctgctcaagaacgaagtcgccgtgatcctggtcgacgtctgcatgccagagctcgacggcttcgagctcgccgcgatgatccgcgagcatccgcgcttccagaagaccgcgatgatcttcatctcggccatccaggtcagcgacatcgaccggctgcgcggctatgagatgggcgcggtcgactacgtcccggtgccggtcgttccggaagtgctgcgcgcgaaaatccgcgtgttcgccgagctctaccgcaagacgcggcagctcgaacgcctcaatgccgagctcgaggaccgggtgcgtgcgcgcaccgccgagctcgagcagtcgaccacacggctggtcgagagcgaagcgcgccgcagcatggcgatcgccgcaggcaagatgggctcgtgggactgggactgggtcaacggcgactggatgtgggacgaagggcagtacaagatcttcggcgtcgatccgaaatccttcgcgctgacgtcggacaatatccagcaactgtttcatcccgacgatgtcgaggaactgcgcgaagcctgggccgggttcggcaagggacaaacgtcctatgaggccgaattccgcgtcatgcggcctgacggcgaggtgcgctggtgtgtcggcacggctgctgccaccagcgaccggaacggcagggtggtgcgggtcagcggcgtcaccgtcgacatcaccgatcgcaagaaggccgaggaacggcagagcctgttgacccgcgaggtcgaccatcgcgccaagaacgcgctcgcactggcgcaatcgatcgtacggctgacgcgcgcgcagaacgtcaccgcctatgtgcgggcggtcgagggccggatcacggcgctggcgcgcgtgcacaccgtgctgtcgctgtcgagctggcagggcgccgagatccgccggctggtgaccgaggagatcgcaccttattccgaagccggacagatccagatcgatggcgcggaggtgcagttgcagcccgcgaccgcgcagacgttggcgctggcgctgcacgagctcgtcaccaactccgccaaatacggcagcctgtcggtgttgccgggccggctcgcgattacctgggaagtgcaggacgagacgctgatcctggcctgggtggagtccggcgggcctccggtgaccaagccgaagcagaaaggtttcggcacgcgaagcgtcatcgccagcatcgagacccagctcggcggccgggctgacttcgattggcgcgccgagggcctgatctgccggctcacggttcctctcaaggcgatggctggagaaaccgcggtctatcccgacctgtcggcggccgcccaacgcaagccgatggtcagctccagggtttgatcccgcgcccatcgatcatcaagccgggtgatccgacgcgcagcgcctccaacgacaacgacgcagacgacattgtgaccgcagccggcggtcgaaccgcgctatgaactctgcaactgacgcagacatcgcccgaggagcacatgccgaagacgaatctggccggcgcaggtctgtcggtcattctcctcgcagccgcgatcggtatcggagcggcggcggccgagccggtcctgaaaggcacggaggcgttcggcgactggcagcgcgacaggccgggcacggtgcggctgatcaccccgcaagacttgcccagaccgggggcaacggcctccagcagcaatgcgtcacgcgttgtgcagcgacccgcctcggcattgccgcaggtgccggcggggttcaaggtcgagctgttcgcgagcgggctgagcggaccgcggaccatccggaccgcgcccaatggcgacatcttcgtcgcggaaaccggtccgggccgcatccgcgtcctgcgcagcgcggacggcgccgcaaaggctgcaaacaacgaggtctacgcaagcggactgaaccggccgttcggcatcgcgttcttcccgaacggcgacaatccgcaatggctctatgtcgccaacaccgacagcgtcgtgcgctttgcctaccgcaacggtgatctcaaggcgtctggagcgcccgagacgatcgtggcccggctgccgcacggctacggccattccacgcgcgacatcgtgttcacgccggacggcaagcggatgctggtgtcggtcggatccgcgggcaacgcaggcgagggcctcggccggcccccggaaggtatcgaagcctggagccgcgaccacgcgcttggcgcggcctggggcgccgagaccgatcgcgccgccgtgcttgcgttcgatcccgacggcaagaaccagaaactgtttgcgacgggtatccgcaactgcgtgggcctcgcgatccagccgggcagcggcacgccatggtgttcgaccaatgagcgcgacggccgcggcgacaacctcgtgcctgattatgtgacccggatccgcgaaggcgcgttctacggctggccctggtattacatcggcgccaacgaggatcccgcgcatgccggcgagcggcccgacctgaaggacagggtgacggttcctgacgtcttgttgcaggcccactcggcctcgcttggcctgaccttctacaccggcagcagctttccgcccgagtatcgcggcgatggctttgctgctgaacacggctcgtggaatcggtcgaagcgcaccggctacaaggtcattcgcatcaggttgagggacggcgtgccgaccggcgagtacgaggatttcgtcaccggcttcgtcgtcggcgacaacgaggtctggggccgaccggttggcgtgaccgtggcgcgcgacggtgctctgctggtctccgaagacggcaacggcacgatttggcggatcagccacgagtagccgttctgtcggacgccgctaccccaagccgtccttgaggccgtattcctcatagattgtcagcggattggtatcgggaaacaaccggcacttcgcctgcgccagatgcagcgtgacggcgccggcctcgcaccgcgcagtcagaatcttccggacatcctccatatgcgcacgcggctggtgcttcgacggcaactgttccagcgcaaccagcgccgtggccagggcctcggtgaccacccactcgtcgtgtccggtaattcccttccgcggcatcgccacaccctccgtcgcaccggctgcgacattgtagcgcgagaggggtaggggctgtcatcagccaacatgggcagggcaacgcggaaccggttggcgcgcccctgccacgatgcgccgcagggaaccagcatggcagcgcgcagcggcagtgattacaacgacggtcgcgcccttcaccacccagcctgcctggatgtttgaaccctatctctcggcctggagcctggtctccgacggcgacgtgatcgtcacgcacgccgcacggttgctgccggtgcggcagcacggcgaaccggccatgctcaagctttcgcacgagccgaacgagcgcctcggcggcatcgtcatggcgtggtgggatggcgacggcgcggcgcgggtcctggcccgtgacggcaaggcgctgctgctcgaacgggcgatgggtgcagcgtcgctgagcgacatcgcccgaaccggccgggacgatgaggcctgccgaattctctgcgcaacagccgagcggctgcatgcccggagagcaaaaccgaggccggacttgacgccactcagagactggtttcgcgcgttgtggccggcggcgagagcgcacggcggcatcctgaaccgatcggccgacaccgctgaggcgctgctcggcgatccgcgcgagatcgtggtgctgcatggcgacctgcaccatgacaatgtgctcgacttcggcgcgcgcggctggctcgcgatcgatcccaagcatctggtcggcgagcgcggcttcgacttcgccaacatcttcaccaaccccgatcttgccgatccgacacggccggtcgcaaccgaacccggccgctttgcgcggcgtctcgacgtcgtcgtggaaacggcgcggctggatcgccggcgcctgctgtcatggatcatcgcctggacaggcttgtcggcagcatggttcctgggcgatggcgatccgctcgccgagatcgaccttgcgatcgcacgacttgccgtagcggagctcgaccggatggcgtgaaggcgcgcagcgactatgccgccgcgacgctggccccgctcaacgacacgctcaggatccgccacttcgagatatcgaagaagtaggcggccttgatacgtgcggacgcgggatccggcgcctgaatcgccgtgtggaattgccgcgttccatcgctcagcgaaatccggaatgtctgcattggtcgaacctccacgcagccgatgctgcggcaaggagggttaagatccggttgccggtgacggtgtccgcgccgcgcacgcgcgccttacgcgatgcctttcccggccgaagcctgcggcgaccgcaccatcgtatcttctgcaccgacgacgcgtccgtcctgtgcgcgcagttctagtcgccgcaccggcaacccgttctttcgatcgaccaggagcacatgcgcctcgtcgggctcgaagaagaaatcctcgccccactgccggagcgcgacgaggagcgggaacagcccgcgacctttctcggtcagcacatattcctgatacgcgcttccgtccgccgcgggcacggtctccatgatgccgtgcgccaagagattgcgcagccgggcggagaggatgttcttggcaagcccgaggctcttctgaaattcgccaaaccggcgcagcccgtcgaacgcgtcgcggacgatcaacagcgaccaccagtcgccgatcgcatcgagcggccgggccactccgcacatcgagtccctgtggctcactcgcttggccatcgtgatccgcctgacgtctttcatcgcggcgcggcccgaaaagaccgcccgatcgagaactcgatatatcggttgcaaagtaaaacctcaagcgatacatgatggtttcaaattaaaactatccgaggcccaccatgatccaacccgatgcaacgttcgacggcacctttcccttcacgccgcatttcagcgcggcgctgggctttccgatgcattatgtcgacgaaggcccgcgggacggcgaggtggtgctttgcctccacggcgagccaacctggggctatctgttccggcatctggtgtcggtcctgcgcgcaacgcaccgcgtggtcgtcccggatcacatgggctttggcaagagcgcaacgccggcgcagcgcagctactggctgcaggatcatgtcgacaatctcgaggccctggtccttgcgctcgacctcaccaatatcaccctcgtgatgcatgatttcggcggtccggtcggcatggggttcgcggcacgccatccggatcggatccgccgcgtcatctcggccaacggaccgacgccgttcgggcaaagtgatctgttcgcgcgcgtcaccgcgaatgcgcaggtctcgccctggtttcaatggatcgcagcagccgagacgaacggcgagctcgagccggtgctcggccaactcggcttcaatattctcagcacgctgaagctcaacggcttcgagaacaacgcggtcatcaccgacgcctggctcgccgcctacggggcgcctttcgcgcgcccggccgactgcctcggcgcgatcggatgggcgaagggctttgcgaccggggcgcaccaattcgaggcgccgacgcctgccgccgatcgcgcgatccgcagcaggccggcgctggcgatctggggcgaagcggaccgcacgctgcatgcagaccatttcctgccgctgttctccgcgatcttcccggcggcgccggtcaggcgccttgccggcgtcgggcattactgcttcgaggatgcgccgcaggacattgccggcctgatcgtggagttcattgcgctgacttgacggcggcccggcaagacctggccgtcgggatcacgcagcagagatccgggacattgattggattacgcctgcacggacgacgcgcaggccgtccgcattcccatccaaatcggcgcgtagcggttcagctcgcgccggcgaggatgacgaggttgttgatgacaggcgtcgagcagaacgccacgacaagggcaatcttggcaaggctttcactgcgccacagcagcgcgatgacgagataggtcaagccaagtttcgggatcagccaccagacgccgaaccaggcctgggccatctgcatgaacggattcgcctcgccgaatccgagctccagaatcctgttggtggtggcgaggtcagcgcatcccagaaccagtacggaaagcaacagcagtgccttgacccaattcatctcaacctctcggtgccggacgccgaacgggcattgcacctaccattcaagctgattcgttaattgttggttggggcagggaactgcaaccgggccagcttgcggaggcggtgagcgtggcggaaggggtgtcctgtcaactcggctggaatgatttggcattttgaatcatggtcaccaaaagccacggtatgaactacggtcagcgacagttggggtgggcgcggattggtctttgctggcgagcatctgagcatcgagattctgccattcaaaattcagtcctcgatcatcagacccgacggcaagtaagcaagtaactttccgtccggcggaccgtatctccaaaagcgggcggcgcggtgaaagccatcgattaatatcagaaagctgaacgagcggccaaacgtgatcggatccgcaggaaattcatagctcgttcccttgcgaagcacgtttcgaggatcatctggatcgacgcttgtcgttgtcatgtattcctcgaacgaaacaaagcgtccctcgctttcgggatcccacacatttggcggcacgaacatcgagcccaatctggtccggccaatttcgataacgtcgaatgagagcactccggtcagaaatgcgagcaggacgggccgagcgcaagcggtaccaaaggcgagctcatattgttcggcttcggacaactgctcgaatgccgtcccgctcgatcgctttgtgacgagatgctccagatgagaatagtgccgggcggccgcagaatctgtcagctcgctgtaagcccatcgagcttgaacttccaacaggggcacgttttgcagtctcaagtcatccactttctctcgatcgaaattgggctagctctatccaggccattccgcgattgcgccacattgacagtaatcgcgctatttggtgctcagccggtcgctgacaccatcgtcgcgctgaaccaccaggggagggatgcagacgtagctttgcaatgtgggataagccaagttcatagcgccgtcgatcccctgatcctgatcgacgatcgatgttcctggaaacggcacgaactgcttcttgagcggcagaacgctgcccaagaggcgcctcgctccgcgtggactaattgagtatgcctgtgttccgtaggcgtgcctgagcctgtgggggtgataaattggtcggccgtccgaagtatcgctccaggtaaaaggttcggttcgatcgtaaaaccgcatctccgaggcggagaatccaagatcgatccagaggaaaagtggatcgtaaatgaacccccacaatattatatcccaatcggttggaagctgggccagcaccgccaggcggtgctcatcgaatacaggatgactaagcgcgtcgtcctcgaagatcgtcaacggctggtcttgagacgcggccttttgccaaagctgtatgtgagacagcgcgcaacccaaggctcccgcgctgtagtcaagttcaggggcaatgagcccttgtctttcgaggtctaagcgatccagcttgcggccgtcgatcgctgaaactcgctcaaagttgccgagcttggcattgcgagatctgaacttatcccagcgagccgtgcttcggtccaaattgattacatgaatagcattcgctgattgcttattcttttgcgccgctcgaaatggcgcgtttgacccctttgctagcaggtacgaacctaagccatttgatacgatcgagcgagccgcagcctcggcgccgatcggatttaggtgaaatgcgtcttgaaaaatgtcggtacggccagccaattgcgcttccaaatcgcacagggcgtgttctccagaacgagcagccgcgcgagtggtctcgttgatcagtacgcgagttcgggcgatgccgggatcgatactttcgtcccgcagatggggaatagtcgcgaaccaaagctcgataccaaacgatcgcgcggctagggaaaagagatcgagtagccgacgacgatccgcgacgttcggcgcggaaagcaggttttggtcgcgccacgagttgtttgcattaaggtcgacgatcggctcgagccaacaatcgcggctccaaaagctcgactcgagattcgcaacatccacatccacaatccctgtcatcagaatgacgacgtcaggcttgagcggtatgatcttgttgagaaacaagttcagcatatggagagtggtcgcaccgctgtagcccccgtttctcacgatgacatctacagcattctcgctacgcagaatggtctctagctttgcgcaaaatcggtcatcgggatcgaggtacataccttcgaccacgctgtcgccgagaacgatcacggtttgggccgctgtagtcggggactttgatccacgaatgaagccgagagcgtcagtctccagaagatatggctttcggacgagagtatgattccgactttggacgtactcatctgaaggtgtgtgagagaaggacgcatttgccggatactccttcaatcgtatcgctcttttcccatcgctggctggaacggtgtcctttctcggtgcttcccgtgcgggcttggcggcaagttctccggcgatcagcggtcggattgcctccccatcggacgcgaaggtcagccatccgtagacttcgcgagtgtctaatatctgtgagattcccgcgcgtcgcgcgctgtcggcgaataccacatattcataccggcccgatccatcatcgtaggtcaattgcggtatggcgtctgcgcgaaccagatatgtgcaatgcaccaccggcacctcgtggaggcccggcgacgaccggctgagaatagtgttgtattcgtcgctcggaagaaaatatccgttcgcgtcgatcttctggtgatagttcgagtacagcggccggtcggcgtcgacacacttgagcagcggcgctacgatcggaagattgagttctacaaggtgccgcaaggtgaggggacgtaggtagttgtcgacgtcgaccacgaaataatagtcgcatcccagagccaaagtctggttcatgctgtgttggcgaattcgacctagcacggagaagcgagtggcattccactcatggtcagcaaagtcctgaacgcgttccgaaacattgctatcgtcaagttctacgtgcgaatatcgcgatccgacacgctgaagccagtcccggagaatttcggcggtatcatcccggttgttgttggtccggacgtggagcgcgatccgctccgacggatagtcgagcgcttcgatgcagtccagaaacagcggcaagtggccagctttgcttttggcaagaattgctatcagcactttgggaagcggacgatttccgtcgggttcattgagtgcattcggtagttcgaccctttcggatatccggtccttcgcaaaacgcagattgtcttctacgcggcttctcaggccttcatcgattgacggattctgaaggatgcgaaggcaggcgtccatgcagccttgataatcgccagcccaaaaagcgttgacggcgaattcatcgagtagtccgaactcatagatccattcctcggcgaacagcgctccaacaggcatcggcaaatcaatgccgcggcgcgcgatatcagctccctccttgttgcgaccctttgaacggcagtagcggctggcaccatgcaacgcctcagctcgcgcgagctgagaatcggcggcccgctgataagccgcgatgacctcgtgttcaggatgatcgagcgcttccttgagccgcgccgcagaatagagagaaataaagacctcttcctgccaaaagcccatttcagcgcgcgccaagtagtggggcagcgctttctcgggctcgttgcagtcacgatagctttgagcaaggtagaacgtgtaacgagagcggagaaacgcgtccgtctcgttctgcagggcgccctccagcagcgctgcatctttgcggtatttctcgggatcctggctgcgtgcaccgccgccgccaatctggatcgcaaagccggaagcggtctcccgaccgcgagcgtcggccggcgcttccacgaactcgtgcaagacacctcgaaaatagaactccttcttgttgctgcaaagctgaggccgatgatggcggatgccgttgtggttgatggccacgtcatagaggtcggcagtcatgccagacttgaaggcggcgacgtcaaaccccggctcgatggtgagcgcgtcatcggcgtcgatgatgagggcgtagtcgacgtccgggttccggcgcaggcaagcgagcgcatgcgatcggttgtaagcgaaatcccgccagggttcgtcgatgacttcgcctgtcaatccattgctgtcgagccactgtcgtatgatgtcttgcgtgccgtcggtcgagccggtgtcttcgatcaacacatagtcgatcatcggtcgaacgctgtcgaggcaacgaacgataaccgccgcctcgttcttgacgatcatgcacaggccgatcgactttccgtttggtttcgacaatccggactccttgaccacaggctctttattgctgcgctcgttctcgcaccgctgggaagacggagcagctgaaaccgcggttggcggcgccgaattgccttcaagtgcagtactcacttcggccgcctcaatcgaggcgatccaggattcgctatcggcgacaccgtaagatacgagcaggcgacggccgtctggatgccaagccagccccgccgcgaactcgacccctttttccttgaaatagaacgggcgactaagccggcgcagattattttcgctatcgaaccatacaaagcgatgctgatagaaccttcgatcgttctgccactgaacttcatgaacgagtgcgagccatccttcgtcaaactcaatgagttgtgttccgcctcggaactgttcgacggcgaagccggcatcgctctctgagacggtttcacccctgtcgtttacgatcctggtcgggtcgcatgagtagatgaaatgcagacttgcgcccttggcttgcggcatccagttcttttcatggagtcgtggaccctcaggacgaagcacgagccactcagcgagtcgggtttccgaattgcttcgttgttcaatccgggcgatcaactgttcgcaccagccttcagcattcaactcgcggacgcatgagctgccccatagcgagccattccaactgaacaaacgaatatcctcgagtccttgcacttcctcgaattgggtttttgggaagtcggcgggcagcagaagttcggccgcagtttccacctcaagatccgcgttcaaccgtagcagatagttgcgcgttcgaatgggagcgccgttatctgtctcataggtgccgtctttgagcaggcgaaaattcactgtccgctgcacgagatagaggtcatttccatgacgcgagacagagggattggttggccgatagccttgagggacgtcgcaatccacctgtcgtgcagaaaatgatccaaatagccgctccgccggctgcaggtaaaagaataagtttgtccgcgcgagctcacgtggggcgtccggaattgctcggttgagcgccaggctgttgcaaatcgagtagccacggtcccagcgggcggcgtcctgactataatttgcggcgatcgagaattcctcgcgaaggccggtctggtagacgtcggtttcaatgaaaaggatgtcgttttcgggggccgatatcgaaaggccgagctcggaaaagtggaggcttgtctcatacctgccgcgttctcgatagtatcgtgccagttcgtaaaggggttccgcgcgtgtcggcctttgcttgaacgcttcaagtgccttgctgacgaagccgtcttcgtcgcccaggtctcgcaggcaccgtgcgtgctgcagccgtgccatccacgcttcttcgtcccagccttccatgtccgcgcgcttggcaaaggctgcggcggcttcgacatattggcaggcatctcggtaggaccacgcaagataaaaccagtaccgagcgttgtcgggctcaaggtcgagcgccgctttgagtagtcggatatcccgctctgatttgtcgccacgattcgatccatcggcgtgatcgatgtaccaggcgccctgcagttcaacgacgtctcccgggacgtcgatatattcgtgcgtcactccaaagtacttcgaaccactgtcacgccgaaccagtcgggtgttccagtagctcaatccgcccgacgcgcgctgcaagaggcggtagcctggaccggaaagggacttacgaaattcggcgttgtcgacgatgagctccatatcggcgtcgttgaacaggacgtaatcgaactcaagctctgaggcgcaggcacgatcgagcgcgtcgttccgagcttgtccgaaatcgtggaacggaattgtatgaagttctcccggaagattgcgccgggcaaagaacgtcttgatgaagtcctgcgtgccgtcagacgaaccggtatcgcagatgacccagcaagcgatgtggtcagcgaccgccgccaggcagcgctcgagatttgccacctcgttcttgacgatcatgttcaggcaaaggcgcttattttccaccaccgccaaactttttcggtttccgcaagcaattgtaaaaagttcaaaccaggaaatattgtgctcgacgccctaggtcagcgaacccgttgttccatcgaacgtcgcgaaacaatttagctgaaattgttcgggcagcaaattcagtgagttgtgcgctacatgcgaggtcagcccgctggttaatggaaatggggagcgaaataatttgatgtattttgatttcgatcttgaattttcttgcgctcgctttctcagtctgctttacatcttaagggataattaattttgcggtccgtctgcgattcaggcgggaactttttgaatgacgttcaatcttggaatgtgatcttcagcgcgtttttggcgactgaagtgagtgtagcgggtaccacccaaggttgaaccactaaattgtggttggttcgagcgtcggtctccggacaaacgtgctccgggattcgatctcgtgaaatgcgttgggtggcgccgtatggttaagtcaggtccggccgataagtcggcctcttcccgcagctctgtttccgtcacacctcccttaacgggagaaggcattgccaaatatgcggggcttctctccgcgggcatctcaaacgaaatcacggtaaccggatcgttgccgcgtggcgcgaccacccagaacattacctacttcgtcgtcgatcgagccacgaagacgatcgtttcccaggtcattttaccagacgcgtccgatcgcttcagcgcggtcgagatgcggatgaaggtcgggcgctacgcgagtgcctacgacatcggcacttttgattcgaacggcgagtttacggtctgtccgtttctgtccgtccgaagctctctgagtctctcatcaccaagcggaccaagtagcaaatagtctgaacgcactacagagcgtctgcacattgatttgggctgaggcggcaacccgcgctcggcctgacgtgaattgttgtaagtcaaaacaggaccaatttcatggcccacaaatcagagcttctgttcgtcgatccgctcgttcccgacctgaacacgctgctggagaatctccggcccgaggttcgggctattgtgctcgacggtgcaaggcctgctgcaaggcagatggcggaagcgctggtggggatcgaaggcctcgatgcgattcacattgtcgcgcatggcgcgcctgggcgtgtttgcttcacatccggcgagtggtcagttgataccctgccagttcacgccaaggacttggcccgaattggtagcgctcttgctcaagaaggagatgtacggctctggagttgcgatgtcgctcgaggctctttcggcgcgagtttcattggggcgcttgagcatgagttcggcgctggcgttgcggcggcatgtgggccgatcggcgacatgcgccgcggagggacgtggcgcctggaaaggtcaaattgcaacgggcagtacttgccgtttgcgccggagatgcagtcaacctatgcgggacttttggccgttgtcgatgactacgttacgatcagcggctccgtaggtaatggcagtggtcacctgtcgagcggcacctactatatcgaaacgacaatcggtggcgtggtcaccgttgttggctcgtttacgatcccgaatatcaccaacgttgcgttccaactcaacgtactcgtcagctccacaggcaattacaccgtcgtcaattttttcggtttgacggttgacggtacgagtagcggtgagaccttcacgctgacaggtcccaacagtaatgtgggtcccaccggcgccacgggttcgaccggttcaactggcgccaccggcgcaacaggatcaactggcgctacaggtgcgaccggcgccacgggcaggacgggcgcgacgggatcgaccggcgctacgggcggaacgggcgggacaggatcaaccggcgccacaggtgcgactggcgccacgggcggaacgggcgggacgggatcgaccggcgccacgggtgcgac

SEQ ID NO: 66 - DNA, 17498 bp, Bradyrhizobium enterica
tcaatgacggcagcgcgctctcggaggacgaggtgccgagcacgatcaggagctcgtccttaatgtaggccaggaacttgaagatcgagaacccggcgatgcgcgcgatgacgccgagcaccacgaggacgaacagcgcggcggtcaggtagaacgtcgcgatcaaccccatcagattgaggatcgcgccggtgccgaacttgccgatggtgaaggccatcgcgccgaacgcgccgatcggcgccgcccgcatcacgatcgagatgacgccgaacaccgcgtgcgcggcgtcgtcgatgaacgagcggatggtgtggccgcgctcgccgaggcccatgatcgcgaagccgaacagcaccgagaacagcagcacctgcaggatctcgccctgcgcgaaggcgccgaccaccgtgtccggaatgatgtgcagtacgaagtcgacgctcttctgcgcttccgcctgcttggcatagccggcgaccgcttgcgcgttcgctgcggcattgccgaagcccgctccgggcttcacgagattgccgaccagcaatccgatcaccagcgcgaaggtcgagacgacctcgaaatagaccagcgccttgacgccgatgcggccgaccttcttggcgtcctggatatgcgcgatgcccgagaccacggtgcagaagatgatcggcgcgatcaccatcttgatcagcttgatgaagccgtcgccgagcgccttgatccactcgttggtggcgagcgctggccagaacgcgccaaccagcgcgccgagcacgatcgcaatcaggacctggacatagagaactttgtaccacggcttgccgccggcgctcgccggtgcggccgtggcaatggttgccgttgccatgtttcactccccctcagaaatggcggaaacagccaagatcaacttggccgttcaagtcaaatggaactgtgtgggcccttccgtctgtccgcgacgatctgccgcgtaccccgcagcaaggcgccgcttgcgaaaccgatctgatcgacccgacgaacgcggaaggctcttgaagtttgcgcgctatttaagccaatgcgcgatccgcgcaactgcttcctgcatctccgcggccgaacgcgcataggaaaatcggatgaaggctcggccgtggatcggatcgaaatcgacgcccggggtcgccgcgacatgcgccttttcgagcatctcgctggcgaaggcgaagctgtcggaggtgaagtcggagacgtcggcatagagatagaaggcgccgtcggccggcaggaatttggtcaacccggccttgggcaggccttcgatcaggatgcggcgattctcctgataaccacgcttgatcgcctccatctccgcgcggccctcgaacgccgcttcggccgcgatctgcgacaaggtcggcaccgagatcgagaggttctgctgcagccgctcgatcggccgcaccagcacctcgggcaccaccatccagccaacgcgccagccggtcatgcagaagtatttcgagaacgagttgatcacgagcgcgttcggcgacagctcggccgccgtcacggcgggaaacgcgtagtcgagcccgtggtagatctcgtcggagatgaagcggattccggcgctgtcggcggccgccatcaggttcgaaagcgcctcgcgcgacatcatcgtgccggtcgggttggcggggctgccgaccagcacgcccttcagcggcgccttgcgatgcgcggccagcagcgcctcgccggtcagcgcgtggcgggtgtcgccggaggtctcgatcagcaccggctcgcagccgagcgcagtcaggatgtgccggtacggcggatagcccggcacggtgaccgcgacccggtcgcccggctcgaacatcgctaggaacgccaggatgaacccgccggacgagcctgtcgtgacgatgatgcgctcggcatcgaccgcgcagcgatacgtgtcgcgatagtgccgggcgatgcgcgcgcgcagcgaggggatgccgagcgcggaggtgtaatcgatccgtccactggcaagcgccgcctgcgccgcggcgatcgcctgcttcggcgcgccctcggcgggctgccccacctccatatggatgacatggccacccgcggcctcgattcgctccgcggcggccatcacgtccatcaccatgaacggtggaacatcgctgcgcccggatgccgtcaaaaggctgctcacatggtctctcggtgtcgcttcacgcatggatttctgctattgcacggccgctgccggatttgggttcccgttaccgctactgccccagactggccgcattcggtggctcgttatagcgctttcaggctcagtgaataccccaagtgaatatccggttcgcgtgaagaagaactgcaaaaacaacagactgcgccacgcgcctgatccagtcgggccaggaaccggacgttgccgcggcgcagctccctatcgccgatagatcgcccatgctgtttcgcctcacgctccgcaccagagggttcaagctgaccgcattgctgaccgcggtcgcgctcgccgtgggtccggtcgtccccgcgcgagcccagcagaacggtccgccggtgctgcgcgacactgagtccgagcaattgctgcgcgaatataccaggccgatcctgcgcgcggccggtctggagaagcagaacatccagatcgtgatcatcaacgacagttcgttcaacgctttcgtcgccgacggccgccgcatcttcgtcaattacggcgtgctgctgcaatcggagacgccgaaccagatcatcggcgtgctggcgcatgagacgggccatctcgccggcggccatctggccaagatgcgcgagcaactgacgcaggcacagacccagatgatcattgcgatgctgctcggcgtcggcgcgctcgccgcgggcgcgggtggccggggcgccggcaacggcttgtccagcgccggcgccgcggcgatctcggcgccgcaatcggtcattcagcgcacgctgttgtcgtaccagcgccagcaggaagaaaacgccgatcgcgccggcgtcaaattcctgactgcgaccgggcagtcggcacggggcatgtacgagacgttcaagcgcttcaccgacgagagcctgttcgccgcgcgcggcgccgacccctatctgcagtcgcatccgatgccggtcgatcgcgtctccgcgctccaggaactggcgcgctcgagcccctattgggacaagaaggacgatccggcgctgcagctgcgtcacgacatgatgcgcgccaagatctcgggcttcatggagcggcaagacactgtctatcgccgctatccgttgtccaacaccagcctgccggcacgctatgcacgcgcgatcaccacctatctgcacggcgatctgcgttcggcgatcgcgcagatcgatgggctgatccaggtccagcccaacaatccctatttctacgagttgcgcggccaggccctgctcgaaggcggccggccggcggaggccatcgcgccgctgcgccgcgcggtgcagctctccaatagttcgccgctgatcgagatgctgctcggacaggcgctggtcgcctccgacaacaaggccaccaccgacgaggcgatcaacatgctgcgcgccgcggtggcgcgcgagcccgaggcgccgctcggctacacccagctcgcgatggcctatggccgcaagggcgactatgcccaggccgaccttgcctcggcccaggccgcctatctccgcggcgacaccaagaccgcccgcgaacttgcgtcgcgcgccaagacgcggttcgcgatcggcacgcccggctgggtcaaagctgacgacattgtgagcgccaagccgatgccgggtcagaaaaacaactagaaataaaccgtagttccatacaacgatcaccgaaaccggcccacggccgtgccgtatttcgggccacctcgaacaaggatttcgtccatgccagcgcttcgtttcctcgcccctgccctgctcgcgctcggcatctgcgccgcgccgctgaccgcgtccgcgcagagcttcagcgacacccagcgcggcgacatcgagaccatcgtgcgcaattacctgatcgcgcatcccgaggtgctcgaagaggcgatgaacgagctcagcaagcggcaggccgccgccgaagccgagaagcacgagcagagcgttgccaagaacgccgacacgatcttcaactcgccgcgcggcgtgatgatcggcaacaaggacggcgatgtcaccttcgtcgagttcttcgattacaattgcggctactgcaagcgcgcaatgtccgacatgctcgacctgatgaagtcggatccgaagctgaaggtggtgctgaaggaattcccggtgctgagccagggctcggtcgaggccgcgcaggtcgcggtcgccgtgcgcatgcaggatccgaccggcaagaagtatctcgaatttcaccagaagctcttgggcggccgcggcgcagccgacaaggcgcgcgcccttgcagttgccaaggacgtcggcctcgacatagcgaagctcgagaaggacatggcgagccccgaggtcaaggcgaccatcgaggagaatttccgcctcgccgaatcgatgggcatgaacggcacgccgagttacgtgatcggcaagcaggtcgtgatcggcgcggtcggcgtcgacggcctcaaggagaagatcggcattgcccgttgcggcaaggcgacctgctgagcgtcgacagcgctcatttcgttcgacaatatccggtcgttcgacaagatccggctgcctggcagccggatttttttgttgcggcaccgaaccacgtccgcgccggctgcaaccaagggccatcaccaacaatggaagccgcgcgatgcccttggccccgccaacccttggctacgacctcacgctcctgaagacggcgccacagcgtggctccgaccatgatcacggctggtgctacggcctgccatcaggcatacgcgccgagcagtggccgctcagcccccacgacggctttccgatgcagcactgcttcacgctgcgcgtcccggcgcagtatcgcgccaagggcgatacctatgtcgcgctcgcgatgttcgccgatcagcaatatgacgaacccgtcgagatcgacgcggtcgcgcaatatctcgcggcggagaccatcgaacgtccgtcagatccgaatctgttgccgtacttcgcgtaccgacagaaccgtcatccgatggagttccggatgaaggacatcatcgaccacaatttcgcggcgatctggctcacggaggccgagttcgcggggccgctgtgcgaaccacccgagcttgccggcaatccgttgctggaagccaatccgccgccgcgctggctcctgaagggcgcggcgcgcacggcgttcgacgtcaatgtcggacgcagtacccggatcgacgagttggagaagacccactggtatcgcctgttcggccacgtccccgcgaccggacatcatgcgtacggcatcgcgctggcgccgcgcgacgacgatcccaatgtcggcaagccgccacgcgatcatctgctgcacaagggcgagctcggcgactatatcgcgccctacagcgaggtcggcactgcgcgcggcctcgaccggttgcatggtcgcaaccatctcggcggcacgatgtttcccaatcagtggacgccgaaatacagcgcgacctatctcgagatcgaagagcatttcggcgggttcaatttcggcggcggcaacggccagctcgatcttgcgagcatggagttcgactgggcctgcggttgaagcgcgcgctgttcatcgcgcattcacacaggaaacaaaccgcggggaaccgcaaatctacaggaacatcgcacatcctctctcgttgtcggcgcgggcaatgctgaaaaacgaggaggaatttcgatgtctaaacgctttctgatttcggtcgctgcggcggctttgctcgccggcaccggtttcgcgaacgcacagggcgcgggcggcgccaacaaggaatccggggccggcggtggcgcgaccacgcagcactctgcaccgtcaggtggcgcgtcgtcgggcgcgatgcagcacgattcgggtggcatgaagggttccgagcattcgacgaccggtgagtcttcttcgggcatgaagggtgaatcgcccggcatgaagggcgccgagtccgacaaggccggacccgccaccaagggcgcccaggaaaatacccaaaagtcgaagggcatgagctcggagaacgagaccaccaagggcaacgaaagctcgaaggacatgaaggccgagagccgcgacaagagcggcaacatgaaagccgagggtcgtgagaagaacggcaacatgaacgccgagagccgcgagaagaacggcgccaccaccaaccagaacgcccagaccaagagcccgtccgacaccaaccgtgcgcagaccaacgacaccagccgcacccagaccacgactggcaacgcggcgacgtcggccaccgcggctccgccggccgagaagcgcaccgagatctcgaccgcgatcaagtcggaacacgtcaccgaagtcaccaacgtgaacttcaacgtggcggtcggcacccgtatcccggccgacgtgcacttctatcctctgccggaacgggtcgtgacgatctatccgcagtggcgcggttatgacttcatcctggtcggcggccgctacatcatcgtgcagccggagacccacgagatcgtctacatcatcgagggctaagccggcctctgcgcgagggtgccacgacgggccctcgcccccattctcagccccgcccctcacgggcggggctattcgttcgccgtatcgggcagatggcggtggacggctggccgggacgccccctcgacacgccttccatgaggtttggttaaccagcaatttccgcaggttacgccagctacctaataggctggaggaagccgctgaaggcgttccgatttcacctaaaggcttcccctgcggccggttgttacctataacccggcccacttcacccctcgccggaacccctcggaccccttgtcggacctattggccggaacctttggcaggaatcttttgcaatggctgctgccggaacgatctacgtgctgaacggcccgaacctcaatctgctggggacgcgcgagccggagacctacggccacgccacgctcgccgatgtcgagaagctgtgcgcggacaccgcacgccagttcgccctgaccgccgactgccggcagtccaaccgcgagggcgaactgatcgacttcatccatgaagcccatgccaaaaaggcggtcggcatcatcatcaatgccggcggctattcccatacttcgatcgcgctgcatgacgcgctggttgcggtcaggattcccgccgtcgaggttcatgtcagcaacatccacgcccgcgagagcttccgggaccactcgttcactgctaaagccgccttcgcgtcactttgcggcttcggcatcgacggctaccggcttgcgatcatcggcctcgccaccaagatcggtgccaagatcgatgcaaaggcaaagacttaatcgtcaatcctgacgttccccgtcaccagatagagatttcggatcaaacaacatggcgcgccagccagacgacaaatcagccgcaaaatccaagagcgactccaagagcgacgacagcgtcctcattcgcgagctcgcgctgctgcttgctgagaccaacctcaccgagatcgagatcgagcgtgccggcctgcgcgtccgtgtcgcacgcaacatcagcatcgcggcatccgtgcccgctgccgtccacgcggttggcgcgccggccattgtcgcagcacctgctgccgccgttgcggctgcgaccgacctcgccaagcatccgggcgccgtgccctcgccgatggtcggcaccgcctattggtcgcccgagccgggcgccaagccgttcattgaagtcggctcgaaggtcagcgccggccagacgcttctgatcatcgaggcgatgaagaccatgaaccagatcccgtcgccgcgcgcgggcaccgtgacacagatcctcgtcgaggacggccagcccgtcgaattcggcgagccgctcgtcatcattgaatagcttccgtcaacgtcaggcgctgcgatgttcgacaagatcctcatagccaatcgcggcgagattgcgcttcgcgtgctgcgcgcctgcaaggagctcggcatctccaccgtcgcggtgcattccaccgccgacgccgacgccatgcatgtgcggctcgccgacgagagcgtgtgtatcggcccgccgccgtcgaaggattcctacctcaacataccggcgctgctcgccgcctgcgagatcaccggcgccgacgccgtgcatcccggctacggcttcctgtccgagaacgcgcgcttcgccgagatcctcgccgaccataatctcggcttcatcggcccgaaggccgagcatatccgcctgatgggcgacaagatcgaagccaagaagaccgccaagcgcctcggcatccccgtggtgcccggctcggacggcgcagtgacctctgagaccgacgcgctcgccatcggcaaggagatcggcttcccggtgctggtgaaggcggcggccggcggaggtggccgcggcatgaaggtcgcccacaccgaggccgacctcgcgctggcgctttcgaccgcggccaacgaagccaagtcggcgttcggcgatgcctcggtctacctggagaaatacctgcagaagccgcgccacatcgagatccagattctcggcgacggccgcggcggcgcgatccatctcggcgagcgcgactgctcgctgcaacgccgccaccagaaggtctgggaggaaggcccctcgcccgtgctggcggcagcggcccgcgccaggatcggcgagacctgcgccaaggcgatgcaggacatgaagtatctcggcgtcggcaccatcgaattcctttacgaggacggcgagttctatttcatcgaaatgaacacgcgcatccaggtcgagcatcccgtcaccgaaagcatcaccgatatcgatctggtgcttgagcagatccggattgccgccggcggcgaactcccggccaagcagagcgacatcgcgatcatcggccacgccatcgagtgccgcatcaatgcggagaacccgcagaccttccgtccctcgccgggacggatcacccaattccatccgccgggcggcctcggcgtgcggatcgattccgccgtctatcagggctacgtgattccaccctattacgactcgctggtcggcaagctgatcgtgcacggcaagacccggggcgaatgcctgatgcggctgcgccgggccctggacgagatggtggtcgacggcatcgagacgacgctgccgctgttccgcgccctggtgcgcgagcccgacatcatcgagggcgactatcacatccactggctggagcagtatctcgccggccagccatccgacgccccgaaatagttggaactctttggaacccaaccacctgttcaagcgtactagtggggtattggctttccacggggacgcattgaatcccactgccacgaagagaccgtcgtgaccccgatttcacgacgccggtccacgttgcaaatcctgctgctctcggcgggatttttcgtgctggtcgcagtcagcgtggcgtcggtcctgctggtcaacaaggcacgcgaggacaacgcctgggtcgtccatacggtcgaggtcgaaggccaggttgctaacctgctgcttgacgtcaggcgcgccgaaagcgcgaccagggcctatctgctgacatcagcaccacaatacctctcggagtaccagtcggccgcggcggcaatccccgccgcgctcggccatctccagatgatgaccgtcgacaatccggcgcaggtcgccaatgccgcgaagctgaaggccgccgtcgagcagcggctggcggagttcaccctcaccaacgagcgcgtcaggaacaacgacaccgcgaccagcatcgacgtcctgcgcaacagcacatcgaccgacgcgctggaagcgatcgccaggatcggccgcgacatgcgcgccgaggaggatcgcctgctggcggcgcgcaccgcgaccgccgacaggacccaggtgctcgcctcctccgtcaccatcgccggctcctgcctggtgctggtgctcgccgccctctctctcgtgctggtgcggcaatcgtcgcgggcgcgcgacgaggccgaggccaagctgcgcgacagcaacgtcaatctcgaaaccatcgtcgacgaacggaccgccgacctgcgcgaggccaacgaggagatccagcgcttcgcctatatcgtcagccatgatttgcgctcgccgctggtcaacatcatgggcttcaccagcgagctggaggaattgcgcggcgacatcttcaggcggatcgccacgctcaatcgcaccgcgtcgctggcgccggcgatggaagacgcgaccgacgtggccgagcccgagctcgaaggctccgacaagcagctatccgacgatttcagcgagtcgctcggcttcatcaaatcgtcgatcgccaagatggaccgcctgatcagtgccatcctccatctcacccgcgagggccgccgcgagttcaagctggagcagatcgatctcagcgagctgatcaacggcatcgtcaggacgatcgcgcatcaggcggccgaggcgcatgcgaccatcgaggtcggcgcgttgccgaatatcgtcagcgaccgcctcgcgctggagcagatcttctccaatctgatcgacaacgcggtcaagtacctcaagaacggcgtgcccggcgagatctcggtcaagggccgcaccaagctgggctttgcgatcttcgaggtcaccgacaacggccgcggcatcgatcccaaggaccaccagcgcatctttgatctattccgccgcgccggaacccaggacaagccgggtcagggcatcgggcttgcccatgtccgcgcacttgtgcgcagactgggcggcaccatgtcggtagcatcggaacttcacaacggcagcacgttcacgatcacgctgcccatcaattggtcaggcaagacctcagacaagaaccgggatagggaatcatgagcgatccagtcaccatcatcatgatcgaggacgacgagggccacgcccgcctgattgagcggaatatccggcgttcgggtgtcaacaatgagatcgtcccgttcaccaacggtacagaggccgtgaactacctgttcggcaaggatggcagcgcggtcgaccgcaagaaccaggccctgctcatcctgcttgatctcaatctgcccgacatgaccggcatcgacattctgaagcgggtcaaggagaacaaacatctcaaggcgacgccggtggtcatgctgaccaccacggacgacagccaggagatcaagcgttgctacgaactcggttgcaatgtctacatcaccaagccggtgaactacgaaagctttgccaacgccattcgccagcttggcctgttcttttccgtgattcaggtgccgccagcttccatatgaccagcgcaacgccgacactgctctatatcgacgacgacgcggcgctggcgcgcctggtcgaacgcgggctgacgcgcgcgggctacaaggtcgtgcacgccgcaagcggtcaggaaggcctcgagcggctcgcccagggcggcatcgacgtcgtcgcgctcgaccaatacatgcccggcctcgacgggctggagacgttggaacaaatcctcaagattccagacgcgccgccgatcgtgtttgtcacggcctcgcaggattcggcgattgccgtcaccgccctcaaggccggcgcggcggactatctggtcaaggacgtcaggggtgaattcatccccctgctccaggtcgcggtgaacggcgcgatccggcgggcggcgatccagaaagcgcgcgacgaggccgaggccgaggtgcacgcctcgcgtgaccgctacgccgcgctcgccgccgagcgcgaggtgctgctgcgcgaggtcaaccaccgggtcggcaactcgttgcagatcattgcctcgctgctgcatctgcaggccaattccgcgagccagcaggatgtcaaggcggcgctcaccaacgcgatgggccgggtcgccgccgtcgcgcaggtgcatcgccgcctctacacttcgcacgacttcaagacggtgatgctcaaccagtatctcgaggcgctgctggaggacctcaggcgatcggccgaaggcaaccggatgtcgcggctgacgctgaaagccgacccggtcgagatcgatcccgacagcgcggtcgcgatcggtatcatcgtcaacgagctggtgatgaacgccgtgaaatacgcctatccccacggcgccggcccgatccatgtcgagctgaagcagcacgcggacgatttgcagcttgcaatcagcgacgaaggcgtgggcttctccgacaaggccgacccgcgcggcaccgggatgggccagcgcatcgtcgccgcgatggccgtcaagctcgccgccagcgtcgagcgcgccccgagtcaaaagggcacccgcttcgtggtgcggttcgcccgcgtcagcccggcgcaggcgaaatcgacaagcgccgccgcgagttagcccggctgcgggcggccgattgatcgatttttcgagttggccttaactgccgcgtcaccttgttgtttgatcgccaccggctgccctgaccagttaagggaaatctcggcattgtttgccaggcttttcccccagcttggcaggaacgacacgcaatgttcgggcgcagggtggttttcggaaagaagcaggagaccttgggcgagctcaaggaggccgagcgtccggtacggggcgccgacgtcgcggtgcctgcgtttcacaagacgcagtgggatgatccacggatcgggccgatgctgcgtgatgccggtttcgcgcctgacgacgccggcagcatcgcgccgacggctgacaatcgccttgccgtgttcgctgcggccaatgagcggctgcaggagcgcacagaggctttcaaccgcgacatggcggcgcgccacggccactgcaacgcgatgccgttcctggtgatcgaccagaagatctgggacgggccgcacggcgcatttctctacgcgcagatggacctggtcggctacgacgagtggaacgtgatcatgctggcttcagatccgcagaccaccgcgtcatgcggcctggctgcgcatcccggctttcttccggccgagacgcagatcatgaccgagcatgtgatcgagtggaaggcacggcacaacggcctgctcaaggcgttcggaatccccgaaagcggcgtccgcgtcgtgaatgagcaatatgagatggaaaaggacgagctgcgcagggagatcatcgacaaggtcggctggatgaagccgcgcatcatcgacgacctgttgctcagggggtagagcgttccgaacgaagtggttgtcggtccgcgtgaagaagacgcgtcaagctcttgagacgcgccccgcttccgaacatcactcgtacctgtcgcggtgccgccgtgggcggtacggacggcagtcctgacacggcgcaccgaagatcacctgcgacggatacggccgcggcgagtgatacggcgtcgagccgaacaatccggccgcaccgaaacccgcgctgaacggatcggcggcaaagctgcccggaaacgagccgttgctgcggaaatcgcgatcgtcattcctgccgtcgaaatacgctcccccggtgctgccgtagcgcagcggccgttgcggagccaattgctgggcagatgcggcgaccgagccgagcgcgatggcggcgcaggcgatcaatgctctggtggcggtcatcgtcacagccctcattgcggattggtgccccagtcgcccttccaggcgatcaggcgacccctgccgaattgcagatagagcgcgtcactgcgccgcgacagcacgctgcccttgacattgggcagcgccacgaacatttcattgcccggcgtaccgcgaacgtagctcaggggaacgccgagcgaccggctggcctggtccgcattcatgccgaaggccagcggcacgctgttcggcggccgctgctgcgcgcgggccgtgccggcaggcgcgcccagcgtgacgacgagggccatgacggaggctgtaacgaaccgctgcatgaccgacctcatggcactgccgccgcgagtgtgccggcgggcgtccagccgccgccgagcgcctggaacaagctgctcgccgccagcagcttgttgagcctgaccgtgaccagattgttctcggccgtgaacagcgtctgctgcgcctgcagcaccgtgatgaggttgaccgtgccgccgcgcaattgcgtctcggcgacctcgaacgccttgcgcgaggcggcgacgacgtcggactgcaggcgctcctgcaacgtgtacttctgcagcgcgatcagcgccttctcgacatcggcgaaagccgacagcaccgccttgcgataggcctgcaggtattgcagttgctgccccttggcgagcttgaactggctctccagcaggaagccgtcgaacagcggctgggtcagcccggcggccagcgtgtagtaccaggcgccgggtgcgaacagcgaggccagcgccgcactctggaagccggtggtgccggtcagctggatctgcgggaagaacgccgcgcgcgccgcgtcgacactgaagttggaggatgcgagctgcgcctcggcctgacggatgtcaggccgctggtaaagcaattccgacggcagcccgggcgtcacccgcggtatggcgatctgcgtggtgctgccgccgcgcaccttgaaatcggccggtgcgcgcgccaccagcacggcgagcgcggcgatgttctgcccgaccgtcacctcgagcggcgggatcgccgcgcgctgcgtggcgaccagcgcctcctgctgcgacaagtcgagctgcgaggcggtgccgccggcgaattgcgacttgatcagcgcaagaattcgttcggctgctgccagattgcggcgggtaacattgatctggtcctgtgccgccagcacctggaaataggtattggccaccgtcgccatggtggtcagcgcgacgacctcgcgattgtagcgggcgctggttgcgctctcctccgacgccgacagcgtcgcgcggttcttgccccagaaatcgacgatgtagctcgcgctcagtccgaggctgtactgggagaaggtgctgcccccgccgagcgatgtagtcgatcccgtggccacccgctggcgctcggcattcgccgatcccgagatcgacggcagcagcgcggcaccggacacaccggcctgggcgtcggcctgcacgatctgggcgatcgccaccgcgatatcgagattgtattgctgcgcggattccatcagcccggtcagctccgccgagcggaagccgcgccaccaggcgagcgccggaacggcggcgtcggcatcgcccttggcggccgcgcgatagctcgccggcacttcgaggctgagttcgggcttctccaccccggggatgcacccggacagagcaaggcccagaccgagactgaggccgccgaacgccgccccccgcaaaaaccggaccggcttccgcaatgtttgaagactatgcaacgctgtacctgtcggcatttactcgcccggttgaagtgaggagcccggccgcaatgcggcaccctggcggacgcgctgaacccacaggcggaaccggtcgagatagagatagatgaccggcgtcgtgtagagcgtcagaacctggctcaggatcaggccgccgacgatggcgataccgagtggctgccgcagctcgccgccgtcacccatgccgatcgccagcggcacggcaccgagcagcgcggccatcgtcgtcatcatgatcgggcggaagcgcaacaggctggcctccctgatcgcctcgagcggctccagcccgcgtccgcgttccgcctctagcgcaaagtcgatcatcatgatggcgttcttcttcacaatgccgatcagcaggatgacgccgatcagcgccatgatactgaactcggtcttgaatgccatcagcgcaagcaaggcgcccacacctgccgagggcaatgtggacaagatggtcagcggatggacgtaactctcatagagcacgccgagcacgatgtagatcgtgatgatcgcggccaggatcaggaacggctggttgttgagagaatcctggaacgccttggcggagccctggaacgtaccccggatcgtggccgggacgccgatccggttcatcgtcgcctcgatgctggcgaccgcggtgctcagcgagacgttcggcggcaggttgaacgagatggtgttggcgaccagcaggccctggtgattgactgccagcggcgtggcgccctgcttgaaggcagcgaccgccgacagcgggatcatggtctcgctgctggtcgagaccgccgatccggtcgaggccgcgcccttcccggtcgagccgatcgagttggtggcctggttgcgcgcggcctgcgcgttggccgaactggccgcgcccgagtttcccggcgccacgacggtgccggccactgcgttggtcgattgcgatccgccgaccgatgcgcccgaggtgctgatatagacgtccttcagcgtttccggattctgccagtagcgcggcgccacctccatgacgacgtggtactggttgcgcgcgacatagatcgtcgacacctggcgctggccgaaggcgtcgtagagggtgttgtcgatctggctgaccgtgatgccgagccgcgctgcggcgtcgcggtcgatcacgaggtcggactcgaggcccttgttctgctggtcgctgttgacgtcggcaaggttcggatcgcgctgcatggccgccgcgatcttcggcgtccagtcattgagctcctccagcgtcgagccctgcaacgtgtactgatactgcgcgttggactgccggccgccgacacggatatcctgcaccgcttgcaggaacagggtcgcaccgggcaccgccgacatctggcggcgcagccgcgcgatcaccccgtcggcaccgagcttgcgctggtcgagcggccgcagcgacacgaacacgaacccggaattggtctgcccgccgccggtgaagccgaccacggtctcgaccgccgggtcgcgcttgatgatgtcgacgaactgcgcgagcttctgctgcatcagctggaacgacacgctctggtcggcctggatcgagccgaccagccgcccggtgtcctgctgcggaaagaagcccttcgggatcacgacgtacagatagcccgtcagtccgatcgtgacgaagaagatcagcacgacgctcagcggatgttcgagcgcgccggtaaa

SEQ ID NO: 67 - DNA, 17035 bp, Bradyrhizobium enterica
atcgaatccttgatgcgcgcgcatcccggcgtcggcgagcggctgatcgtggagatcaccgagaccgtcgcgatccaggacatcgacgacgtccgcggcttcgtcacgcggctgaagaatttcggcagccggatcgcgatcgacgatttcggcgccggctacacctcgttccgcaacctgcgcaagctcggcgtcgacatcgtcaagatcgacggcgccttcgtgcagaacatcgtgcgctcggccgacgatcgcgccttcgtgcagacgctgatcgatcttgcgcgccggcttgagatcaagacggtcgccgaatgggtgcaggacgaggaagccgccgtgatgctgcgcgaatggggctgcgacttcattcagggccgcctgatcggcctcgcctcgccggaccggccgtggaacgtgccggcggaaaaggttgtgcccgccgcgggctgactcggattgcccaacaaacggtgtcgtcccggcgaaggccgggacccatacgccgcggcttctcaatgaggcgatccgggagacgcctcgggcaacaacaatggatctgtggttatgggccccggctttcgccggggcgacgatgcggtgaggtccgcgctggagaacgaaaagctactcgtccttcttcgccggctgcgacatgcgctcgagacgttcctgcatgtccttcatctggcggcgcaggtcgtcgatgttgccgtcgtcgggcgcgggctccggcaccttctcggcttcagtgccgccgcgctgcggcacgaacggcttgaacatcgagaaggtctgctggaacagctccatgttacggcggacctgttcttccaggggagcgaacggcgtgccgctcagggcgcccgcgatctgcttgcggaatttctcctgttccttggtcagcgtctcgatcgactgttcgagatatttcggcaccaccatctgcatgctgtcgccgtagaaccggatcagctgtcgcaggaacgtggtcggcagcaggttctgcccggccttgttctcctgttcgaagatgatttgcgcgagcacggagcgggtgatgtcgtcgccggtcttcgcgtcatagacgaggaaatcctcgccttccttcaccatcgccgcgagatcctcgagcgtcacataggtgctcgtaccggtattatagagccgccggttcgcgtatttcttgatcgtggtcggttgttcagattttgccatgggctctcacttcaacaccgaagaacctggaacccgacggcatcgccgcagggctaaatgcaacgcatcgcagcaaaggtaagcattttcaaagcggttcggctaccgttttgtgctgtgcggttaattccaaagcataggatttgctcaggaatgtgccaagggcgtcattttgagtgcgtcgcggcgcgatttgcgccacagtttgattgacatgcctcaatgagctttacaggatagccgttaagagacaggccagccaaaccggccgcccgccgtcgagaaacccagctacaacccataggagatgtccatgtcagacgatgtcgtcatcgtcagcgccgcccgcaccccggtcggcagcttcaacggcgcattcgcgaccacaccggctcacgatctcggcgcgattgccatcaaggcggcgctggagcgtgccggcgtcgagggcggccaggtctccgaagtcatcatgggccagatcctcaccgcggcgcagggccagaacccggcccgccaggcctccatcgcggccggcattcccgtggaaagcccggcctggggcgtcaaccagctctgcggctccggcctgcgcacggtcgcgctcggctaccaggcgctgctcaacggcgattcctcgatcgtcgtcgcgggcggccaggagtcgatgagcatggccccgcacgcgcagtatctgcgcggcggcgtcaagatgggcggcctcgagctgatcgacaccatgatcaaggacggcctgtgggatgccttcaacggctaccacatgggcaacaccgccgagaacgtcgccaagcagtaccagatcacccgcgcgcagcaggacgagttcgcagtcggttcgcagaacaaggccgaggcggcgcagaaggccggcaagttcaaggacgagatcgtcccggtcacgatcaagagccgcaagggcgacatcgtggtcgatgccgacgagtatccgcgccacggcgcgacgctcgacgcgatggccaagctccgcgccgccttcgagaaggacggcaccgtaaccgccggcaacgcctccggcatcaatgacggcgccgccgccgtcgtgctgatgaccgccaaggaagccgccaagcagggcaagaaggtgctcgcccgcatcgtctcctggggccaggccggcgtcgatcccaagatcatgggcaccggtccgatccccgcttcgcgcgcggcgctgaagaaggccggctggaacatcgccgacctcgatttgatcgaggccaatgaggcgttcgccgcgcaggcctgcgccgtcaacaaggacctcggctgggatccggccaaggtcaacgtcaatggcggcgcgatcgcgatcggccatccggtcggcgcgtcgggtgcgcgcgtgctggtcacgctgctgcacgagatgcagaagcgcgatgccaagaagggcctcgcgacgctgtgcatcggcggcggcatgggcatcgccatgtgcgttgcacgcgactgaacaaaaggcagcgaggccggctaggtgatgaaaagatcatctgtcaaccacggcgcgaactgatagaaaagatgcccggctttgcgccgggcatttttgttttgcgcgagcatgatccggaaaagtgtgaagcggttttccgaacggatcatgctcaaaaagggagcggaagcgcgacgatctcatcgcgcttcgttgtgagtgcgtagaccggagttatccggttataaaagacggccaaggaggagacggacatggcacgtgttgcattggtgacgggcggaacgcggggcatcggagctgctatcagcaaggcgctgaaagcggccggctacaacgtggcggcgagctacgccggcaatgacgccgcggcggagaagttcaaggcggagaacgggattcccgtctacaagtgggacgtcgcatcgttcgacgcctgcgcggccggtgtgaagaaggtcgagaccgaactcggccccatcgacgtgctggtgaacaatgccggcatcacccgcgacaccgcattccacaagatgacgctcgagcagtggaatgccgtgatcaacaccaacctcggctcgctgttcaacatgacgcgccaggtgatcgagggcatgcgcgcccgcaagttcggccgcatcatctcgatctcctcgattaacggccagaagggccagttcggccaggtcaattattcagcggcgaaggccggcgacatcggcttcaccaaggcgctggcgatcgagaacgccaagggcggcatcaccgtcaatgtgatcgcgcccggctacatcaacaccgagatggtgcaggcggtgccgaaggatgtgctggagaagaacgtgattccgcagatcccggtcaatcgcctcggcgagcctgaggagatcgcgcgcgcggtggtcttcctggcggccgacgatgccggcttcatcaccggctcgacgctgaccatcaacggcggccagtatcacgcgtaagcggcgcagcgccgcacgcgacctcgatcaatgcgtcatgcccggccttgtgccgggcattttcgtcgttacaaccgcgaggcgtgaagcaaagacgtggccggcccggccatgacggattgaattgaaatgaccacccggactgccacccttgtcggactgaccgccatcctgatgtggtcgctgctgtcggtcatgacggtcgcgaccggcgcgatcacggcgttccagcttgctgccatgacgtttgcgatcggcgctgcggtcgcgttcgcaagcttcctgttgcgccctgccgcgttcggcgccttgaagcagccgctgctcgcctgggtcgtcggcgtcggcgggctgttcggctatcacgcgctgtatttcctggcgctgcgcttcgcgccgccggccgaggccggcctgctcaactatctctggccgctgttgatcgtgctgttctcctcgctattgccgggcgaacggctggcgatccatcacatcgtcggcgcactgcttggccttgccggcaccgtgctgctgtttgccggcaacacctgcaatttcaccagggaacagattccaggcttcgcggcggccttcgtcgcggcattcgtgtgggcgacctattcggtgatgtcgcgccggctcaaggcggtgccgacagatgccgtggcgggcttttgccttgccaccgcagtgctggccgcgctggtgcacatgatggtggagaccacggtgtggcccgcaacgccgctgcaatggttggcagtggtcgcactcggcatcggtccggtgggcgcggcgttctttgcctgggacatcggcatgaagcgcggcgacatccgcgtgctgggagcagcgtcctacgccacgccgctgctctcgaccgcgttcctcatcctggcgggtttcgccgagcccagcgccaacatcgccatcgccgccgttctgatcgccggcggtgggttgatcgcggcgaaggacatggtgttgcggaaatgaatgtaggatgggtagagcgcagcgaaacccatcatctcgccgcgaggagagaagtcgatgggtttcgctgcgctctacccatcctacgagtgcagctcctacaagagagaatcctactaagctggctcccaacccttcggcgccagctcgaacttcgaaaactcgaatcccggcgcgaccgtgcagccgaccagcgtccagtcgccgctgctttccgccgcctgccaggcgcccgccggtacgagcgcctgcggctgttcgccgcgcgcgacatcaccgccgagcgtgatcgattgctgcgggccgccgtcctgcgcaatccgcaaggtcaacggcgcgccggcataatggtgccacatctcgacggcgtcgatgcggtgccaatgcgagcgctcgccgcgcgccagcaggaaatagatcgcggtcgaatgcgcgcgcccggcggcatcgcagcgctcgtcgcgaaacgtctcgcgataatgcccgccttcgggatgcggcttcagcgcgagctgcgcgatgatgtcggccgcggagggctgtgacatcaggacttgttcttgcgctcgcggagctcgccgaacaccagcgccgggtcggcgcccttcatgtgcagcttggccgcaaccgcaggctcgtcggcgcgcaggaacacgttggccttcttctcgtcgccgagcagcacgggaatcgtcggcttgttctcggcgcgcagccgcgtcacttcctcggcgcgcgcttgcagatgcggattgtcggcctcgatggtgagcgcgaacttcacgttcgaggcggtgtattcatggccgcaatacaggcggaaatcatccggcagcgaacgcagcttcagcagcgaatcccacatcatcggataggtgccttcgaacacccggccgcagccgatcgagaacagcgtgtcggcggcgaacacggccttctcgccgtcgaacacgtaggagatatggtcgagcgtatggccgggggtttcgaccacgcgggccaggagactgccgatcttgatgacgtcggcattggcggcgcgcaggtcgacattggcgatcttcgccgactggtcgtgcggggcgacgacgcggcagccgtatttctgcttcagctcggcgacgccgccgacatggtcgccatggtgatgggtgatcaggatgtcggtcagcgtccagccttcgcgctccagcgccttgatgatcgggccggcttccggcgcgtcgatcgacgccgtcgccttggttacgggatcgtggatcaggtacccgaaattgtcggtgaggcagctgaaggtacgaatttcggcggtcatgatatctccacgaacaaacgggacggacgcttcagagcatgatcttctcgaaaagccgatgcccactttttcggatcgtgctcttaacgcgtccaatataggtgtgaaatatggcgttaacgctccggcggcaacgcaattttccgcgcaccccggcggcagggggcatggtaggctgagatcatggacgtcatcgacctccgcgatttctattcgcagcgcctcggcatcgtggcgcggcagctgatcaaccgcggcatccgtgcgcggtggccgaacgcggaaggccagcgcgtgctcgggctcggctatccgacgccctatctcggcctgttccgtgatagctgcgagcgctgtattgccttcatgccggccgcccagggcgtgctgaaatggccgaccggccgccccgcgttggcgaccctgatcgacgaattctcgatgccgttaccggatgccgcggtcgaccgcgtgctcttggtgcatgcgctggagatgtccgacgatccggagcggctgctgcgcgaggtgtggcgggtgctgtcgccgtcggggcggctgatcgcgatcatcccgaaccggcgcggcgtctggacgcgcaccgatgcgacgccgttcggccatggccggccctattcgcgggcccagatcacccagctgttacggcagacctggttcacgccggcgtcatggggcgaggcgctgttcatgccgccggtgcaaggcagctggttcctgcgctcggcgatggcgtgggagcgggtcggcgcggcgctgtcgatgcccttcgccggcgtgcatatcgtggaagcgagcaagcaggtctatcgcgcgatcccggcgcgccgcgagcggccgcagctgatcccgtcgttgcggccggtgttggtgccgtcctcgacggcgacgcgcaaatccagccactcggaatgacgtgaatcagccaccctcccctggaagggagggtggctgcatatgtgctttactcgttgcccggattgaagtcgtcgccgctcggcgcgggctgcgctgccatgtcgggacgcggaccgtgcggacggcggcggcggcgcgggaagcgctcgctgcgctcgccgcgttcggcaccaccgccattgctggcttcataggcgccaccgttgacctgcggctgcgcgccaccggtgatgaacgagggcaggcgatcgacgccgccggcatcggccatcgcgggctgcggctggttctgcggttgcggctgatattgcggctgcggacgatgctcgcgttcgcgatgctcacgcggcggctgctggtcacgctcgcggtgctcgcgcggctgctgctgctgctcgcgctggaagggctgctggccgttgtcgcgcatgaagggctgctgctgcggcacgaagcccggctcctggccgaagctcgaatagccgtcgctgtcgtcgtcgccgtcttcggtcgcgaccggctcggcgtcggggcgcggctgctgctgattctgccggaactgctcctgcgcggccgcgatgatccggtagtagtgctcggcgtgctgatagtagttttcagccgccaccggatcgccggaggagcgtgcatcgcgcgcgagctggacgtatttctcggcaacgtgggaggccgtgccgcggatcttgatgtcgggcccgttcgattcgtacacccgtgtcaggggattctggccgcgccggttattgttgttgttattattgttgttattccggttgcgcatccgcttgttgttctgaccgtttctcatctgtcgccttttattccagccctgaagttattgccgtccacagtccgattccagaaagtccgattgctcagaagtccgatttgcaaagtccgatttgcaaagtccgattcggcgcgcgccgaggcgcacggaatcgcagcaccgttcgaagtggcttcgatgtcgctgaccatcgcgttcagcaaatacgcgttccccaaccgccggcaaaagccgccagcgaccaaatcattccgcccgtcgagacaggcccagttctcgtgcgtaagtcttcaagcgcaataacaggctttcgttcgcttggcggtcgagagcagcacagctttggctaattgcgctctgtgagacctgcgttcctggaacctttcgatcggcgggctctgctgaaccctggtcatcacccgtaacggtttacggggccagcaccgatgttgtgcccggaacgtagtcgttccccggggatattccaagaggtttttttgcgttccaataggactttatcggggcggccggcgggcggaaacggccctcggaatgccccccagatcggccctcggcggccccgttggggataagccggaagccgtcatcagggcttcaatgtcgtcgctttggccctgcccagtttcaacaaccagaaatccacccgaggccaaaagacccgcagattgcgaaatcagggagcggtaggcgtcgagcccatcggcgccgccgtcgagcgccgcgcggggatcgtgcgcgcgcacctcgatatcgagaccggcgatatcggccgaggggatgtaaggcggattggatgcgatcaggtcgaacgcgccggtcagcgcgctggcgtagtcgcactggacccacgtcgtgcgatccgcgagcccgagctcggcggcgttccggcgcgcggtctgcagcgcctctgccgaaatgtcagtggcgaagccatgcgcgttgggcagttccgagagcagcgccagcaggatcgcaccggaaccggtgccgagatcggcgatccgcagcgcgcggtcggccgcgccgtcggcgcgcagcagttcaagcgcacgctcgaccacggtttcggtgtcgggacgcggcaccagcgtcgcggccgagagatgcagcggcagtccccaaaattccttgatgccgagaatgcgcgcgaccggctcgccggcgaggcggcgctgcgcgagggcttcgaggcgcgttgattcgtcggccgtcagcgcgcgatgcgccgcggtgatcatgccggtcaaatcgaggccgagcgcggcaccgaccagcagccgtgcatcgagctcggcggagtcgttggcagcggctgccaatcgcgttgcaagcgcgcgccgggccgcgtcgatcgtctggccagtgaactggttcacggacatcaccgccatctcatagcccggatttcgcttcgctccatccgggctgccaatctcacgccgccgcgccctgtgccgcgagctgcgcggcctggtgctcggtggtcagcgcgtcgatcagttcgccgagcgcttcgcccgcgatcacctgcggcagcttgtagagcgtcaaattgatgcggtggtcggtgaccctgccttgcgggaaattataggtgcggatgcgctcggagcggtcgccggagccgaccttctccttgcggtcggcggagcgcgcggcctcgacgcgctggcgctcggcgtcatagatccgcgagcgcaggatgttcatcgccgaggcgcggtttttgtgctgcgagcggctgtcctgcatcatcaccacgatgccggtcggcagatgggtgatgcggatcgccgattcggtcttgttgacgtgctgaccgccggcgccgccggcgcgcatggtctcgatcctcaagtcggtgtccttgatgtcgacatcgacgtcctcgacctcgggcagcaccgcgacggtcgcggccgaggtgtggatgcggccctgcgtctcggtgtcgggaacgcgctgcacccggtgcacgccggattcgaatttcagcttggcgaacgcgccgcggccctgcacctcggcgatgatttccttgtagccgccgacggtgccctcgctcgccgagatcacctcgaccttccagccctgcaaggcagcgaagcgctcatacatccggaacaggtcgccggcgaacagcgaggcctcgtcgccgccggtgccggcgcggatttccagcatcacgttgcggtcgtccatcgcgtccttgggcagcagcgcgatccggatctgctgctcgagatcgccgatccgcgcctgcagcgtctccagctcggcttccgccaagctgcgcatctcgggatcggtgcctgcgtccgccagcatcgcctcggtatcggcgagttcagtgcgagcagcgcgatagagcttcaccgcatcgatcagcggattgagctcggcgagctcgcgggtgatcgcaacgtagcgatcggacttcacctcgccgagcagctcggcctcgagcgaggcgtgatgggcgagcaggacgtcgagtttggcttcgggtagcatggcggtatctcgaatttgctgaaagcgcgaagggcgcaaaaggggcgatagcggcgacggcagcgtcgctacaaggccagcccctcggtttccgcaaacttcgtcagcgcctcgcggatcgagacgctgccgaccggtgcgtccagcaggggattgatcatcgcctccgccttcctggcgtcgaggtcgaggatcatcgccttgaccgggccgtgcgcggtcgccgacagcgacagcgagcgatagccgagcgcgatcagcgccagcgcgccgatcggtttcgaggccatctcgccgcacagcgaggcggccttcttcgccgccctggccttgcgcacgatgtcgcgcagcgcgcgcaggatcggcgccgacaggatgtcgaagcgctcggagaccttggcattgccgcggtcgaccgcgaacaggaactggaacaaatcgttggagccgaccgacacgaagtcgaccttcttcaagagctcgtcgagctggtagagcagcgccggcacctcgaccatggtgccgatatcgatccgctcgggcagcgaatggccgtgctggcgcagataggtcagctcgcgctcgacgatcgccttggcctggtcgaattcggcgatgtcggagatcatcggaaacatgatcttcagcgcgcggccgccgccggcgcgcagcagcgcgcggatctggccgcgcaacaggccgggacggtcgaggccgagccggatcgcgcgccagccgagcgccggattttcctcgaccaccgtctccatatagggcagcgccttgtcgccgccgatgtcgagcgtgcggaaggtgacgggcttgttgcccgcggcatcgagcacggtgcggtacagcgcgagctggtcgctcgagcgcggcaggctcgggctcaccatgaactgcaattcggtgcggaacaggccgatgccggcgctgccggtgtcctcgatgtgcggcagatcgatggtcaggcccgcgttgatcaggagctcgatcggctggccgtccttggtcacgcaggccttgtcgcgcagctccgaatattgcgcctgccgccgcgcccggaatcggacgcgctcggcataggccgattcgatctcggcggaggggcggacatagatctcgccggaaatcccgtcgacgatgatggcgtcgccgggatcggcgatgccgggcgcgttcggcacctcgccgaccgcgggaatgccgagcgcgcgcgccacgatcgagacgtgggagttcgcggtgccttcttccagcaccaggccgcgcagccgcttgcggtcgtagtcgagcagcgccgccggtcccatcgcacgcgcgatcaggatggcgttgtcgggcagctgctcgcgcgacggtgcatgatcctggccgaccagctgccgcatcagccgatggccgagatcctcgacgtcgtgcagccggtcgcgcagatacggatcggtcgagcgcagcatgcgcgcgcgggtgtcggactgcacgcgctcgacggcggcttccgcagtgaggccggtggcgaccgcctcatgcagcttgtgcgaccagccctggtcgttggcgaacatgcggtaggcttccagcacctcgcggtgctcgccgccttcggcgacgtcgccgcgctccagcatgcggtcgagatcggcgcgcagattggcgagcgcggtgtcgagccgcttgatctccttcggcaggtcctcggcgatgtagttggtgatgacgacgcgcggctcgtgcagcacgacatggccgagcgcgatgccgtcggacagcaccgcgccggtcttgtgcagcgagtgccgcgcggcgggctcggcgcccggctgggccagcgcggcgagctcgccggatgcgatcatctccgccagcaccatggcggtggtctgcagcgcctcgacctcttcctcgacataggtccgcttggcgcggttctgcacgacgaggacgccgagcgtgttgccggcgcgcaggatcggcacgccgaggaacgagtggtaggcctcttcgccggtctccgggcggtaagcgaaggccggatggctttgcgcgtcggacagattgagcggcgtcgcctcgctggcgacgaggccgaccaggccctcatgcgcgctcagcacggtacggtgcacggcgtcgcgattcagaccttcggtggcatagagctcgagcgtgttgtcgacgcgcagcacgtagcaggagcagacctcggccaccatgttggccgcgatcagcaccacgatcttgtcgaggcgctcctgggcggagacttgctccgccatggtttcgcggagccgtctcaacaggatgcgtgggcctcccgacgcgctccgcatgtgcttcagtccctccccgcaaggccggcgcagcgggccggccggccgctggcgcgaaactcttcaaaaacaacaattttagtcattcggtgtcgccgcacgcgccagttcccgccgattcgggatcaccaaactgtgccacagtttgcgacagcctacctgactggccgtatagccaatcgaggctcgctttgccaagcaaaacgcctgccagtagcaaataacgtctgcgtcagcccaatgctgcgcccgctaagagaaattctaactccggggtaggggtgagggagtacggctcctgcttctcccgtcattccggggctcgcgaagcgagagcccggaatccattcatccgcaaaactcgtggccccatggattccgggctcgtgctgcgcacgccccggaatgacggcggagagagcccacccgccgctcggatgccggtcgctcctacgcctgatccaggccgtacagcgtgtgcagcgtgcgcaccgcgagttcggtgtaggcggcgtcgatcaggaccgagaacttgatctctgacgtcgtgatggcgcggatgttgatgttgcgctcggccagcgccttgaacgccttcgccgcgacgccggcatggctgcgcatgccgctgccgatcaccgacaccttggcgacgtcggtctcggtgtcgagcctggcatagccgatcctggccttggcggaggtaatggtgtccttggcgcggttgtagtcggtggccggcacggtgaaggtgaggtcggtggtcttgccgtcctccgacacgttctgcacgatcatgtcgacgttgatgttggcatccgcgagcggcccgaagatcgccgcggcgacgcccggcttgtcctcgatctggcgcacggaaatctgggcttcgtccttggagaaggcgatgccggtgacgacgtgcatttccatgatttcctcctcgctgcagatcagcgtgcccggcggctggttggcgtgcgggtcgatatcctctggcttgtcgaagctggagcgcacgaagatcggcatgttgtgcaccatgccgagttccaccgagcgaacctgcagcaccttggcgccctgcgaagccagctccagcatgtcctcgaacgcgatcttgtcgagtcgccgcgccttcggcaccacgcgggggtcggtggtgtagacgccgtcgacgtcggtgtagatgtcgcagcggtcggctttcaacgcggccgcgatcgccaccgccgaggtgtccgaaccgccgcggccgagcgtggtgatgcggccggtctgcgggttgatgccctggaagccggcaatgacagcgacttccttgcgctccttgaaacggtcgatgatctcggtaccgtcgatctcgaggatgcgcgccgaggcatgcgcgtccgaggtcttgatcgggatctgccagccctgccaggagcgcgcctggatgccgatgccctgcagcacgatcgcaagcaagcccgaagtgacctgttcgccggaggcgaccacggcgtcatattcgcgcgcgtcgtgcatcggcgaggcctcggtgcaccaggccaccagctcgttggtcttgccggacatcgcggagacgacgacggcgacctcgtggcccgcgtcgacctcgcgcttcacgtgctgcgcgacgttgcggatacgatcgatattggcgacggacgtaccgccgaatttcatcacgaggcggcccatgacgacgcgtctattcctttaagaggataagtaggttaacccacgccgaaaaccgcaagcgcggggaccgaaaggcgcgtatacatagcgccgcgcccgggggcaagccggttcctgggggtgttacggccggttgcaggccggttgtggcgctgaggtaactcgaaggcgggttggatgggacgttacatcgacgaaatcctgcagcccggcgagaaggtgctgtattccaccaatgcgcactggatcttctactggccggccatcatcgcctgggttgcggcgctggcgctgctgatcctgtcgaggttcacgaccgtcgacggcctggtgctggcctgcctcgcgacggccgccgtggtcgcggtcgcggccctgtactggaccgccgcggcctggttccaccgctggaccaccgaaaccgacgtcaccaattttcgcgtggtgcacaagaccggcttcatcaagcggcgcaccttcgagatgagcctcgacaaggtcgagagcgtcgacgtcaaccagagcatcgcggggcggctgctcaattatggcgacgtcaccatccgcggcgtaggcgagggcatcgagatcatcaagaccatcgcttcgccgctatcgttccgcaattcgatcaccgcgcgataggggcgcgcgcaatcatggccacgcaaacaactctttccagtgcctccgccagctcggtcgatccggccgagatcgcgaagttttcgaaactgtcggatgaatggtgggatccgcgcggcaagatggcgccgctgcacaagatcaatccgctgcgcctgacctatatccgcgacgccgcctgccgcaagttcgagcgcaacgtcaagagcctgagctgcctgtccggcctgcgcctgctcgacatcggctgcggcgccgggttgttgtgcgagccgttcacgcggttaggggcccaggtgatcgggatcgatccgtcggccaccaacatatccgcggcgaagctgcacgccgacaagggccatctgtcgatcgactaccgttgcaccacggtggaggagatggacgtccgcgagcgcttcgacatcgtgctggcgatggaggtcgtcgagcatgtcgtcgacgtcggcgccttcatcaagcgctgcgccgtcatgctcaagcccggcgggctgatggtggtctcgacgttgaaccgcaactggaagagctttgcgctggcgatcgtcggcgccgaatacgtgctgcgctggctgccgcgcggcacccatgagtggagcaagttcgtcacccccgccgagctcgaacgctatctcggcgacgtcaacctgaccgtcaccgaacaggccggcgtggtctacaacccgctcgccgacaaatggaccgtctcgaccgacatggacgtgaactacatggtggtggcggaagaggtgtagggttgttcgcatccacacaaccggtgtcgtccctgcgaacgcagagacccataaccaccggcgccaatagttgggcaaggtccgcgttccgatttgttgtaggtcggcggtccggccatcgtgccccaaatagctccctggggttatgggcccctgcgttcgcaggggcgacacggagcttgtggcgcgaccgttgaagatgtgagacgctatgtcctccagaaaggtgtcgtccctgcgaacgcagggacccataaccaccggcccgaataatcgggcgaggtccgcgttccgagcatgtactacgtctacatcctcgccagccaacgccatggcacgctgtatatcggcgtgacgaattccgttcagaagcggcttgaggagcatagagccggaaagggctcagcattcgtcaagacatatggtgtttaccgccttgtatatgtggaagcctatgaacgggctgaagaagccatcgcacgcgagaagcagctcaagaaatggaagcgtgactggaagatcgagctgattgagcgagagaatctcgaatggcgggatctcagcgacctgcttgtctgaccggtgtgccacataccgctccctgtggttatgggtccctgcgttcgcactagggcatgcacagatctctgagggaccatccagcggctgcggcgtggaagtattgcaggccgtgtttcatagtgatggggcccggcggtttggacgatggatagccgtcccagccgccgagccggccgataatccaggcggcccaagcgaggctgtcaggcgggtgcgggtttctcagccgcttgctttgggcttcgaggttgcgattgagggcggcaagtgtagcgacttccccagcattgaaggcaattcggacagactggttgtcgcgaccatcgcgcgcctgcacaagctgaagggagatgactgccgccttggccgcgatcgcgaccagcttgagaagccgctcggcggtcccgatctgactgtcttcgagcttgaggccttgtgtcttcaagatgcggaagaactgctcgatcagccaccgccgcttgtaccattcgataatgcgccaggcctcttctgcattcgtcaccggatgcgtggtgagcagccgccagtgcagcggctcgatcccggcctgcggctcgatctcgcgcacatcgaccaggatcaagggtaggcttttcggcagatggcgcaggaacttggtttgcggtcgggccagttcgacggcgccgaagcgcagatcgagaagcgcagcccgctcaggccgttgtgc

SEQ ID NO: 68 - DNA, 16689 bp, Bradyrhizobium enterica
ggctcgcgacgccgtggcgccggactgggccgcgatcggcgccccggtcgctgccctgatggacggcatcgccgtgcgccaccctgccccgccggccgccgccgcgccggcacgcccgcctgcgatcgccgagatcgatcgcgcgatccgcaggacggctgcgcatctgctcggatcgttcgcgacaaacggcttcatcccgacctacgccgcgttcaacctgatcggcgatgccgacatcggcggacgcgagatgctgatggcgctgaccgggctgaacgcgcgcggctacaagaactcgaccttgctgttcagcctggcgcggatcttcatcgcgcattcgccggcgcgcgcgctgatcaacccgccatggcgcggcatcgccgagccgatgtgggagccggtgcagatccgccaccgatcggcctattacgacgcattcttcaccgaagcgctgctcagctttgtcgagaccgggctggcgtcgccggatgaagccggcgcggcgcggcgcgcgatcgccgagatggtggacttctgcctgaagaccagcgccgaggaggtgccatcgcatgacggctcgaacgtgcgcgtcatcaccgcgctggcaccgggccggcatccgcgcttctcgcgcttctttgcccagatcaagcaggacctcggcttcggcgtctacgtgcccgactgcgacaccacggcgtgcgcgttctcggccgccacgcaagccggctgcgacgatccgatcctcgcgcagccgctcgtggatttctaccgcggctaccaggtgcgatcgggcgccaacgagcctgtcgtcaccgtgccgctgaacgacaacatcgactatgagggcggcgtcgtcacctggatcgacaaccttaggggcgagcggccctatggcaacgacctcgacccgacgctgaacctcgacatcctcgaggtctcgttccgcaaccttgcccgttggcagatcatcgagacgccgcagcggctggagacggtgcatcgcatcatcgccttccaggagaggttggtcgaaagcggcgcgttcaggaatccgcgctcgcacatctattatctgcccgagctctactcggcctatttcggccgctgctatgccgcgttcatcgcgctgccgctggcggcgcagcgcgtgatcgatcccggcaacgtgttcgcgctgatccgcgcccgcgtgctcggctatgtccagggcgagctgatcacccatgagatgaacccgttcgatgccgcgctggcgctgatggcgctggcgcatcttggcgccgaggtcgcgagcttcacgccggcgctgcactgcatcgtgcagggcctcggcgagggtggcagaaagggaccctacaaggcctatgaatggaacaagatgaagacgccgacacggatactggtcggcgggccggaggtgacgtcagcgttcgtgctgatggcgctggcgctggcgaggaagcggatggctcattcataatcggatgacgcgaagttgagactggcggaaacacgacagcactggcacggttgcccaattgcccgcacaatcgttgggcactgaacgccaagaacctggccgggaaacgccgatgctgaagacgctgctcactgctggcctgttgctgtcgctgccgacgctggcggtcgccgccgacatcaccggcgtgccgaagatccgcgacggcgaccagctcatgatcggcagcgtcaagattcggctcggcggcatcgacgcgccgtcgaccgaccagctctgcctcaataccaagggcgagcgctggacctgcggcgtcgccgcgcgcgacgagctgatcaagcatgccggcaacaagagctggacctgccatgcccgcacggtcgatcgccgcggccgcaccatcgcgcgctgcgaggtcgatggcgaggacatccagaagtggatggtcagcaatggctgggcgctggccttcacccgcatctcgcgtgactacgagccggatgagaaggaggcgcgcgaggccaaggccggaatgtggcagggcgcgttcattgcgccgtgggactggcgcgtgcgcaacaagaagacccccgtgctcggcgccgcgaaagtgccggagagtgcacactcgatcctgctcgcctccgcttccggtccggtcgcgccctcgcccgactgcaccatcaagggcaacgtcaaccgttccggcgagtgcatcttccaccagccgagcagccgctggtacgccaagatcgagatgaagatctccaagggcacgcgctggttctgctcggtcgaggaagccgaggccgccggctgccgcgagacgcggcgttagggcgctgactgaggctcgacttcgacagaatgagactcgaacgcaaccgcattggcagtgcgcaccctctcccgcttgcgggggagggctggggtgggggtcttgccacgagcgatactcatcgcgtggagacagcccccacccggattgcatcttcgatgcaatccgacctcccccgcaagcgggagaggtgaaggaccacggcatgaccgatctcgagatcaacctgcttgcgccgcgccgtcgcaagcgcctgcgctatctgcagctgctgctgttcgtgctcgccacctatttgatcgcggcctatctggtgctgccggcgctgtggacgcatcacgagcatcagaagggcctcgccaatttgccgatggtgacccgcaccgcgcagggaattcccggcgacccgatgaatgtcgggctgatcggcgacgtcagggacgtcgtctgcgcgatgcacgaggccggctggtttccggccgatccggtgacgctgaaatcctcgatcgaaatcgtgggttccgtgctgctcgatcggccctacagggatgcgccggtgagcaatctgttctatctcggccgccgcgaagacctcgccttcgagcgcccggtcggatcgagcgcggatcgccgcaaccatgtccggttctggagggtgctagaccagggccaggagaagcgcccggtgtggctgggcgctgcgacgctcgaccgcggcgtcggcatcagccactacaccggcgcggtgacccatcacatcgcacccgatctcgacgccgaacgcgccctgctcgtcgccgacctcgagtccgccggcatggtcaccgcgaaataccaggtcaccggcatcggcccgaccttcaacgggcataatggcggcggcgacctctattacaccgacggcgaaatctgggtgctgcggctggtcgaagcctgcagcaagaaccacggcgccgtcgcacagatcccgagccccgccgcgaccgagttcaaggaccagatctggcgcgcggtgatggaatcgatcggcaaataggacgcgtgccccgcggttttggaaacgctggattgcttcgcccggctcgcaatccgcagtgcgatggaatatcctctccgcttgacccctcagacgcatgatttgcgttgctttacccaaaaggaacaggacgatgaccgttcgcgcgggccgggaatttctggccatccccgggcccacaacgatgcctgatcaggtgctgcaggcgatgcaccgcccggcgctcgacatctactccagcgagatggtcgaactgaccgagagcctgctgcgtgatctctcgaacctgttcgccaccgcgggcaaatcctacatctacatctccaacggccatggcgcctgggaggcgacgctctccaacgtgctgtcgcgcggcgacaaggtgcttgtgctggagagcgggcgcttcgcgatcggctggggcatggcggctgccgcgatgggcgcggaggtcgaggtgctgaagggcgactggcgccgcgcgatccgcccggccgaggtcgaggagcggctcaagcgcgacaaggaacacaagatcaaggcaatcctcgcggtgcagatcgacaccgcctccggtgcggtgaacgacatcgaggcaatcggcagggcgatcaaggcggccggccaccccgcattgttcatggtcgacaccgtcgcctcgctcggctgcatgccgttcgagatggacaaatggtatgtcgacgtcgcaatgagcgggtcgcagaagggcctgatgacgccgcccggcctcggcttcgtcgccgccagcgatcgcgcctgggatgcgcacaagaaagccaatctgcgcacgccctattgggactggaccgagcgcgagggaagcgagcactaccgcaaatatgccggcaccgcgccggtgcacctgttgttcgcgctgcgcgaggcgatcaacatgctgcacgccgaaggcctgcagaacgccttcgagcggcaccggctgctcggcgaggcggtgcgccgtgcggttgcggtctgggcggagggacaggtgctcggcttcaacatcgccgaacccaccgagcgctccaacaccgtgacgaccgtgaccgtgaagggcgccgatcccgccgcgatccagcgctatgccaaggagaaatgcggcgtggtgctcggcaccggcatcggcgatctgcaaggccaggccttccgcatcgcgcatatgggccacgtcaatgcgccgatgatcctcggcacgctcggcgtcgtcgaggtcgcgctgaccgcgttgaatatcccgcacggcaaggccggcgccgacgccgccatccagtggctcggcgagaacgtgaaggcgtaggccgagcgcaggcagccggtatcctgaggcaccggcggggccacacgctccgctgtcgtcccggcgaaagccgggacgacactgagtgtttggcgtcgctggtgaatgatccgctcacaaggacgacgggatgccgtgcatgcaacgcattgctaaggccccaacacttttcgtcgtcatcgttttccgctttactgccggcaacagccgggcacggatccctgcgacaaaacaaaatggagggatcgcttggcatcggtggaattgcgcggcctggtcaagcggtttggttcgtttgtcgcggttgacgacgtctccctcacgatcgatcacggccggctggtctgcctgctcgggccgtccggctgcggcaagaccacgacactgcggctgatcgcaggcttccttgaaccgtccgacggcgagatccgtgtcggcgaccgcgtggtgtcgtcgaaggcgcgcacgctgccgcccgagcagcgcaacatgtcgatgatcttccagagctacgcgctgtggccgcatatgacggtggccgagaacatcgtctatggcctccgtttgcgcaaaatggaccgcgacacgatcgcgaagaaactcgccgcgatcctggcgaccaccaagctggaaccgctggcgcagcgctatccgggcgagttgtccggcggccagcagcagcgcgtcgcgctggcacgggcgctgatcgtcggccccgagacgctgctgctcgacgaacccttgtccaatctcgacgccaatctgcgcgaggagatgcggttcgagatccgccgcctgcacgacgaatatcgctacaccacggtctatgtcacccacgatcagtccgaagcaatgacgaccgccgacctcatcgctgtcatgaatgccggcaagatcgaccagctcggcagcccggaggacatctacgcgcggccggaatccgaattcgtcgcgcgcttcatcggcgcggccaatgtgatcaagggcaccgcacgcgatgcgacccatgtcgagttcggcggcacgatactggaagtggtcggggcgaggctcaccgccggccagggtgcgccggtcgcgatccgccagcatgagatccagctctcgacccggccgcccgccgcaacgcagaacacgctcaaggccatcgtgacgcggcaggtctatctcggcatgaaccgcgactacatggtggaaacaccagacggcacctcgctgcgggtgaccacgccgaccgagaccgcggtcgagaaggggcgcgaggtctggctgaacttgccgcccgagcgctgccgggcgctcagccgataacgagaaagaaaccgagggacgcgatgcggaagcaaatctccagacgccaagtcccgaaaagttctgcggcgcttgcactcggcaggatattcgcgtcgcacgcgatgaccgaagagatcaagacgcgctatgcgcggctgtttcgggtgtgaggatgccatgtaactttcacgatcgtcattccggggcgcgcgcagcgcgagcccggaatccatttctccacctgcgcctgcggcccgatggattccgggctcgccgcttcgcggcgcccccaggtgcgcaattgcgcaccgagaatgaccgggagagaggcttcacatgacaaccgtcaccacctccccctccgcaaaaccgcgcatcgactggacgcgccccgtgctgtggctgttcgctgcgctcctcgtcctgctgatcctgctgccgttgtcgtggctcgcggtgttcgccttcaccgacaagaaccgtcatccaacgcttgcgaatttcgtcacgctgttcagcaatcccgacttcctcgatccgctgctgaccaccgcgatcatcgccacgacatcggcagtgatctgctgcatcgtcgcggcgccgatcagctggctggtgtcgcgcaccgacatgccggggcggcagatcatccgcgcgctggtgacggcctcgttcgtgacgccgccgttcctcggtgcggtcgcctgggagttgctggcggcgccgaattcggggttgctcaaccagctctatcggctgttcgccggcgaagacgccgatgcgctgttcaatatctattcgatgaccgggatcatcttcgtgatctcctgctacacctttccgttcgtgttcgtgctggtggccaatgcgctcgacaccatgccgggcgaactggaagacgcctccgcgatcctcggcggcaacgcctggaccacggcacggcgggtgaccatcccgctcgcgctgccggcgctcgtcgcgggcgcgttgatcgccttcctgcaggcgatgacgctgttcggctcgccggcgatcctggcgctgccggccggcttccacaccatgacgaccaagatctggagcctgttccagtatccgccgaagctcgagctcgcagccgccgccgcggtgccgctgctggtgctgaccatcctgctgctgcagggccaaaaggcgctgctcggccgccgcggctattcggtgatcggcggcaaatatggcgcgccgcgccgggtcgagttgcgcggctggcgctgggctgcactcggcttctgcctcgtggtgctgctcaatccagtcttcctaccctatctcgcgctgctcaacgccgcgttctcgccgaacgcgaccacgctggtgacgccgtcgacggccaccctgcacaacatcgtcttcgtgttcaccgagctgtcgtcgacccaactcgcgctgaagaacaccgtgatcctcggcaccgcaacggcgacgatcggcaccatcctggcgctcgtcatcgcctatgtcacgacacgcaaggtgatcgccggccaccgcctgctcggcttcctcgccaccgcgccggtcgcggtccccggcatcgtgctcggcgtcggcctgttcctgagctacacgcggcggcccttcgtgctctacggcacgctgtggatcctgctgctggcgttcctcaccatcaatctgccttcggcctaccagcaattgcaggcggcgttcgcgaccatccatcccgaactcgaggaagcgagccgcatcctcggcgcgacccggttgcaggcgctgcgccagatcaccgcccccttgctccgcaccggcgtgatcgcgacctggtgcttcatcttcatcggcgtgatgcgggaactgtcggccgcgatcgtgctgttcacctcacagaccaaggtgctgtcggtcctgatcttcgatctcaacgaaggcggcgacctcgctgcgatcgcggtgctcggcatcgcgatgctggtgatcaccttcgccgtggtgctggcggtgaaccagatcccgatgtccggcggcaatgcgggcgcgaagctgcggaacgggtaggacgcccagtccgcgtgcgcgcggacgggcgcaccatctggcaatcgccacattcatcccgatataaagcggaaccccgcaccatgaggatcttgtgacccaatcgaccaagccatcgccccccgttgcgccgcgccggccgcattccttcaccacccacggcatcacggtgaccgacgactatgcgtggatcaaggatccgaaatggcaggaggtgctgcgcgatcccttgatcctcgatcctgatatcaggacctatctcgaagccgagaacggctacaccgagagcctgctcggccataccgacggcttgcagaagcaactggtcaaggagatgcgcggacggatcaaggaggatgattccagcgtgccgtcgccggacggcccgttcgcctatttcaggaaattccgcgaaggcggccaacatgagctgttcgcccgcacgccgcgcgacggcggcgaggcgcatgtcgtgctggacggcgacgcgctggcgaaggaccataaatatttcaagttcggcagcagccggcattccaatgaccaccgcctgcacgcctggagtgccgataccaagggttcggagtatttttcgatccgcgtgcgcgactgggcgaccggtggcgatctcgacgatctcgtcgaggagaccgacggcggcgtggtctgggccgcggattccaagagcttcttctacgtcaagctcgacgacaatcaccgcccgatgcaggtgtggcggcacaggctcggcaccaagcaggccgacgacatcctgatctatgaggagcaggatgccggctggttcacccatctgcacgagagcgccagcggccgcttctgcgtgatcgccgggggcgaccacgagacctcggagcagcggctgatcgatctcgccaatcccgacgcgccgccgcgcctcgtcgcggcgcgcgaggaaggcgtgcaatattcgatcgccgaccgcggcgacgagctgttcatcctgaccaatgccgacgacgccatcgacttcaaggtcgtcaccgcgccgctcgccgcgcccgcgcgtgccaactggcgcgacctgatcccgtatcgcgagggcgtctatgtgctcgacgtcgagctctatgccggccacatggtgcgcttggagcgcgccaacgcgctgccggcgatcatcatccgcgacctcaggagcggcgaagagcacgcgatcgccttcgatgaggcggcttattcgctcgacaccatgggcggctacgagttcgagaccacgaatctgcgcttcgcctattcatcgatgacgacgccgtcggaggtctatgactacgacatggcgacgcggacccgtgtcttgcgcaagcgccaggagattccgtccggccacaacccggctgactacgtcaccacgcgcatcatggcgacctcgcatgacggcgcgcaggtgccggtgtcgatcctgcatcgcaaggatttcgtgcgcgacggcaaggcgccgctgctgctctatggctacggctcctacggcatggcgatgccggcctcgttcgcggccaaccggctgtcgctggtcgaccgcggcttcgtctatgcgatcgctcatatccgcggcggcgccgacaagggctggggctggtatctcgacggcaagcgcgagaagaagaccaacacgttcgacgattttgccgcggccggccgggcgctgatcgagacgaaatatacgggcgaaaaacgcatcgtcggccatggcggctcggcgggcggcatgttgatgggcgccgtcgccaaccgcgccggcgagctgttcgccggcatcgtcgccgaagtgccgttcgtcgacgtgctcaacaccatgctcgacgacaccttgccgctgacgccgccggaatggccggaatggggcaacccgatcgagagcgcgaaggatttccgcaccatcctgtcctattcgccctatgacaacgtcgcggccaaggactatccggcgatcctcgcgatgggcgggctcaccgatccgcgcgtgacctactgggaaccggcgaaatggatcgcccggctgcgcgccacgatgcgcggcggcggcccggtgctgctgcgcaccaacatgggcgccggccacggcggcgcctccggccgcttcaaccgcctcgacgaagtcgcgatcgtctatgcgtttgcgttgtgggcggtggggatggctgagaaggcggaggtgtaaggcaccttagcccggctacccccccatcgtcgtcctggcgaaagccaggacccataccgcgtgatctttcgagcaaggaagtcgcagtaccacggcacatccggtcttcgccaaacttctccctgtgcttatgggtcccggccttcgccgggacgacggcggaatgcgcggcgatcgctcgtcgacagcgacggggaatgtggggtgagacctaccgccccttcgccttccgccagaccgcaaaatcctgcagcgtctgctcgtccgtcgcgggataaagaccgaagatgccgcggccgttctggacctgctcggtgacgaaatcctcgaacgcggtcatctcgaaggtctcgtccgcgatctcgtcggcgaggtgggccgggatcacgatgacgccgtcgctatcaccgagaatcacgtcaccgggaaacactggcgcgtcgccgcagccgatcggaacgttgatctcgatcgcctgatgcaaggtgagattggtcggcgcgctcggccggtgatgaaacgccgggaagccgagccgcgcgatctcggccgagtcgcggaagccgccgtcggtgacgacgccggcgcagccgcgcttcatcagccgcgtcaccaggatcgcaccggccgacgccgcgcgcgcatccttgcggctgtccatcaccagcaccgcgcccacgggacaatcctcgatcgccttgcgctgcggatgcgcacgatcgcggaatacctcgatcgtgttgagatcctcccgcgccggcatgtagcgcagcgtgaaggcctcgccgaccatggtcggctgatccgcgctcaggggatgcacatcctggatcatctggatgcggaagccgcgcttgaacagcgcggtggcaacggtggcggtggagacggatttcagcttgttgcgggtggtgtcgctgagtttgggcatggctacgttgctctctcttctttcgtcattccgggatggcccgcagggccaggcccggaatccatcaggccgcatagcttgaggagaaatggattccgggctcgcgcttcgcgcgccccggaatgacagggactagtaaatcgacggctcgcccaccggcttgccgaaaccggtctcgaggaaatcgaagtcgcagccttcattggcctgcttgatgtgcttcgagaacatccagccatagccgcgctcgaagcgcttttcgggctgcttccattcggcacggcgcttcaccaattccgcctccggcacatcgagatcgatggtgcgcgcggcgacgtcgagcgtgatgcggtcgccgttccgaaccagcgccagcgggccgccgataaaggattccggcgagacgtgcaggatgcaggcgccgtagctggtgccgctcatccgcgcatccgacagccgcaccatgtcgcgcacgccctgcttcacgagcttggtcgggatcggcagcataccccattccggcatgcccgggccgccctgcgggccggcattgcgcaggatcagcacatgatcggcggtgacgtcgagatcgggatcgtcgactgccttcttcatcgacggataatcgtcgaacaccagcgcaggcccggtgtgcttgaggaagcgcggatcgcaggctgacggcttgatcacgcagccgtcgggcgcgagattgcccttcagcacggccagcgcgccttccctgtagatcgggttgtcgacggtgcggatgacgtcgtcattgtggacttcggcgcccgcgatgttctcgccgagcgtcctgcccgtgacggtgatgcaatcgagatgcagatgcggcctgatgcggttcatcaggccgggcaacccgccggcgtagaagaaatcttccatcagatagaggtcgccgctcggccgcacgttggcgatgaccggcaccttgcggctcgcgatctcgaaatcatcgagcgagatgtcctggccggcgcggcgcgcctgcgcaatcaggtggatgatcgcattggtcgagcagcccatcgccatcgcgaccgcgatcgcgttctcgaaggcttttcgggtctggatctgctgcggggtcagatcctcccacaccatctcgacgatgcggcggccagcctccgagctcatgcggatatggttggcatcggccgcggggatcgacgaagcgccgggcaatgtcatgccgatggcttcggcgatcgcggtcatcgtcgacgccgtgcccatcgtcatgcaggtgccgtagctgcgggcgatgcccgcttccatgtcgacccagtccttgtcggagatttttccggcgcggcgctcgtcccaatatttccaggcatccgagccggagcccagcgtcttgcccttccaattgccgcgcagcatcggaccggccggcaggtagatcgccggcagattcatgctggtggccccgagcagcaggccgggcgtggtcttgtcgcagccgcccatcagcaccacaccgtcgaccggatggccacgcagcaattcctcggcatccatcgccagcatgttgcggtagagcatcgtggtcggcttcagcagcgattccgacagcgacagcgccggcagctcgagcggaaagccgccggccatcagcacgccgcgcttgacgtcgtcgacccggctcttgaagtgcatgtggcagggctgcgcatccgaccaggtgttgatgatcgcgatcaccggccggtcgcgccactcctccggcgcgtagcccatctgcatcgcgcgcgatctgtggccgaaggcgcgcaggtcgtcgggcgcaaaccagcgcgcgctgcgcaattgatcgggagtcttgttctttgtcgtcatcgccatgtacttcgatattgcggggtctcgacgttgctcgcacgcgcgcggcccccggcgcgtatgccctgcgccacgcatatacaggatttcctgacatgtcgtcccgcgcccggcgcagacgtgccgttcgccgggcgtgcaccgcgcagcctccgcagcgcggaagccggagcgtaggccggccttgaccagcctcggcttacttctgctgcgccgtcatcacgatgcggaccagatcggcggcattgcgcgcaccgagcttcttcatgatgttggcgcggtgatcctcgatcgtgcgcgggctgatcccgaggtggcgcccggcctccttgttggaggcgcccgccgtgaattgctcgagcacctcgcgttcgcggcgggtcagcggctcccgccccgggaaatgcagcgtcgcgatgcgcgacgccgaagtctcggcctggcgcctcgtataggcgtcgatcgcctcattcaggcggctgacgatctcgttgccgcggaacggtttctcgatgaagtcgagcgcgccgttcttgatggcgctgaccgccatcgcgatgtcgccctggcccgagatcatgaagatcggcgccggataatcctcgccgtgcaactcccgcaggatatcgaggccggatttgccggggatatgcacgtcgagcaggatgcaggccggcgtcctgctgcgcgccaccgcgagcagcgcggcgccgtccgcaaagcagatcaccttgtaaccggcggtcgacaggaccacggaaagcgtctcacgaacggcggggtcgtcgtcgactacgaaaatttccccgcgaggagcgccattctcaaccatatgcatcgtccatcagtggtgaaatgtgccgcccagactgcacaagacctaactcgaccatctcgatcaatggaccagtatttgtacgggacgtccgcttaacgcacaagtagcaccacagtccctaaaagtgacggcagtggagaaacatgcatggaaaatgcagcggcggacagcgttgcggtgtgcctggacgaggacagcgatccctaccgcctgatcgtgacggacctggtcgcgctgatcggccatgtccaggcgagcctgcggctgatcgaggcggcgatcgcccgggaggcatttctggccgagcaggacgccgccgccaatgtcttcgtgctcgacgacgtcaccccgcgctacgcggcggcctccacggccctgaaggcctgcgacaccggcctcggcatggcgctcgatcggctgcgcgagccagacgccccggcgcgtttcctgaactgaccagccggaccggccagcgccgagttcggcgacatcatgcagattgtgcctgcgagccccaactctcgaggcaacgacccgttccaggttcggattggcggccgacgttgccctaaccagccggggcaagccttcctgctatcaggccctgacccgctcgtcgtcggcgcctgagcgccgcttgctcggcttgcccttgaggaagctgatgtccatctcggtgccgttgacgcggaccagttcgcagcggcgataggcgagcccggtcgaggacagcagcaggaagaactccttcaggttgagcccctgaatggaaccttcgacggtcaatgccgcgtcattgtcggagatggcgttgagctgacagtcgcgccgccaggtgccgtcgatggccatgatgcagacatcgacgccccggctgaaggtgacccgctcgatggatttgccgtcgtccgtcatcgttcagtatccgaccgccatggcaggccgcggcatcgcaagcggcgcccgcactccgctcggccggtacaggccacgccgctcgggaagcggcttgaacgtgtcggtcaggccgaccacggtttcagcggcgccgagcaccaggaagccgtcggcctccatcaaccgggcgagacggttgaagatgttgatcttggtgtcctggtcgaaatagatcagcacgttgcggcagaagatcacgtcgaaggtgccgagctgggagaaatcgtgcagcagattgagctgacggtgctgcaccatcgcgcgcaactcgggactgacctgccagaattcacccgactgcttgaaatacttgaccagcagttgaatcggcagcccgcgttgtacctcgaactggctgtagatgccggccttcgacttctccagcacctcctgcgacagatcggtcgcgacgatctcgacccgccatccggccagcgccgcgcccatctccttgaggcacatcgccagcgaatagggttcctggccggtcgagccggcggcgcaccagatccggacgctgcggcgcgcagcccgcgccttcaatatatcgggcatgatggtgtcgcggaaatggtcgaacggcaccttgtcgcggaagaagaacgtttcgttggtggtcatggcctcgaccacctggacggtgtgggtcgacgagccggccttgatcttggcgaccaggtcggggatgccggacaggccgcatttgcgcgccagcggcagcaggcggctctcgatcagatattgcttgtccgcggacagatcgagaccggaatggtccttcaggagcttacgcagatactcatagtcggggggcgtcacgggagcctcgcaaaggcaaagggtgaaactgggtgtcaggcttcggcggacgcatcgagcgccagcagacccacttcctggaatttcgcgatcacgatgtccttgtcgaacggcttcatgatgtattcgttggcgccggcatgcagcgcccgcgagatatggtcgatgccgttctcggtggtgcagaacaccactttcggcacgtcaccgcccgccatgcggcggagctgcacgaggaactcgaagccgtccatcacgggcatgttccagtcgagcagcaccgcgtccggcatcgcctgcttgcaggcctcgagcgcgaccgcgccgtcctccgcctcgacgacggtgaactccattccttcgaggatacggcgcgcgatctttcgcaccactccggaatcatcgacgacaagacatgtcttcatgtgttggcctccttgtagaatccgccgtctccgcggcggagcgttacgctgcagcagctgttctgggcaccagttcaagcacgcgatcgacatcgagtacgaccatgagctggccgtcgaggcgatggacgccgccggcgagcttggccatgcggggatcgagattgaccgggttgtcctctcggctgtcgtcgggcagccgcagcacctcgccgatctggtcgatcaggaggccataggattcgccgcgctggtcgacgccgaccgccatcggcttgccgtcgtcggccttcggcagcccgagccgggcgcgcatgtcgaccacggtgacgatgcggccgcgcaaattgagcacgccggcgatctcgctggaggccagcggcacccgcgtcagccgctccggcatgaacacatcctgcacccgcgagatcggcagcccgaacagctgcccgccgatcacagcggtgacgtactcggccatcgcgccttcactggtctcggtcttggtcatcaatgctgtttccttcaagcggcgcgccgcaactctgcggtctgctctttcagcgccgcgatcagcccgggacggtcgaacttggcgacatagtcgtggaagccggc

SEQ ID NO: 69 - DNA, 16647 bp, Bradyrhizobium enterica
gtcccggcgcaggccgggacccacaaccacgaatggctgttgtcacacgatgtcggaacgacgagtcccttcaacaatgtctgctgcggcgtatgggtcccggcctgcgccgggacgacaattgcgggcgtactcaaatcgatcacatcgctggaacgacagcggagcgtgtggcgcttacccctccgcctcgagccactccgcggcgccgcgccacagcgcgtcgcggtgttcgctgcggaagaagccgaaatgaccgatcttcggcacgccggcgtccgcggggctgatcgcgatgatctcgggcgtgatcgacgtgaaggcggagcacagcagttcgaccgcgggacgcgtcgcccaggtgtcgtcggtgatggtgagggcgcggagcttgcccttgaacttcggaaaattttcgcgcgcggcaagcgcagggtcgtcgagcagatagcgctcgcgcatcacccagctgcgccattgctcgaacacgccgcgcggcaggtccatgccgaggccggcccaggcgggcacatagccgagtgtgcgcgccaatggcaggccgatgccgttcatgaaggcgacgacgcggtagcgctcgggcgaggccaccagcttccaatgcgcggcctgcgaagcgatcagcagcgcgcgcgggatctcggcgttgttgggcaacagcccgagtgcctggccgccgaaggagtggccgacataggcaaacggcaggtcgcggtagcgctcgcgcatccagcgcacggcggcggttgcgtcgagcgcggcccagtccgccatcgtggccttgaagccggccagcgacttcggcttgttcaggccggtcgcggccatcggcctgctatcgccggtgccgcggtagtcgtaggtgaggaccgccgcgccgcggcgggccaggtagccggcaaaaccgcgatagaccttgcgcggcaccgcggtcgccgagttgatcaggacggcgtggcgcttcttggcccggggcaggaacagcgtcgcggcgagcggatagccgtccgccgccggcacgacgatgtcgtcgctaaaaacgtcgtccagcgcggcggcggccacggcgatttccccggcattcatgctatgctctaccaaatgcgaattcggattttcttgcaagggcttgacggaattgcaggaatccttctagcgggagaccggcgccctgtgtataagccgggctttcgtatgcccgcgattaagtcgcggtttttgctcaggagttgacctcatgtccgagcggtggacacccgatagctggcgcgccaagaaggtgctgcaggtgcccgattatcccgatgccaaggcattggccgatgtcgaggcccagctggcgacctttccgccgctggtgttcgcgggcgaggcgcgcagcctgaagaaggcgctgggccgggtcgcgggcggcgaggccttcctgctgcagggcggcgactgcgccgagagctttgccgagcacggcgccaacaacatccgcgacttcttccgtgtgctgctgcagatggccgtggtcatgacctatgccggcgcgctgccggtggtgaaggtcggccgcatcgccgggcagttcgccaaaccgcgttcgtcgccgaccgagaagcagggcgacgtcgagctgccgagctatcgcggcgacatcgtcaacgacatcgccttcacgccggaagcgcgtgttcccgatccgcagcgccagctgatggcctatcggcaatcggcggcgacgctgaacctgctgcgcgcgtttgcgaccggtggcttcgccaatctcggcagcgttcatcaatggatgctcggcttcctgaaggactcgccgcagtcccgccgctacaaggagctcgccgaccgcatctcggacgcgctgaacttcatgcgcgcctgcggcctcgacctcgagagccatccggagctccgcgccaccgatttctacaccagccacgaggcgttgctgctcggctacgagcaggcgatgacgcggatcgattccaccaccggcgactggtacgcgacatcaggccacatgatctggatcggcgaccgcacccggcagctcgaccacggccatgtcgaatatttccgcggcatcaagaacccgatcggcctgaaatgcggcccgtcgctgaagccggacgagctcttgaagctgatcgacgtgctcaatcccgacaacgagccgggacgcctgacgctgatcaaccggttcggcgccgacaaggtcggcgatcatctgcccggcctgatccgcgccgtgcagcgcgagggccgcgtcgtggtctggtcgtgcgatccgatgcacggcaacaccatcacctcgacctcgggctacaagacgcggccgttcgaccgcgtgctgtcggaggtgaaatcgttcttccagatccatgcggccgagggcacccatgccggcggcgtgcatctggagatgaccgggcaggatgtcaccgaatgcatcggcggcgcgcgcgccatcactgatgaggatctcaacgaccgctatcacacggtctgcgatccccgtctcaacgccgaacagtcgatcgacatggccttcctgatcgccgagctcctgaagcaggagcgcgccggcaaggtcaagccgatgccggccgccgcggggttgtgacttggggcaggtgacttgggtagctgacttgagggcagtgacttgctgaggttctggcgagccaccatcaactcgcgcaacgggctggcattcgccatccgctcggagcaggcgatccgcgaggaggtcgtggcgctggcgctgtcggtgccgctggcctggctggtcggcgccaccgtgatgcgtcgggtcgaactggtcgcgaccgtggtgctggtgctggtcatcgagctgctcaacaccgcgatcgagaagctcgccgaccgcctgaccatggatcacgatccgcagatcgggcgggtcaaggatatgggctccgccgccgtcggcgtcgcgctcgccatggccggcctgttctggctgttcgccctcgccgagcgcatgggtgcgttttaaccgtgaccgtgaataagccgatcaagcttgcggtgatcggacgaggtctgatcgggtcggcggctgcgcgacatctgagcaagatgggccacgaggttgcgctgatcgggcccggtgagccggccgattttccgcgccatgacggcgtgttcggcagtcactatgatgaaggccgcatcacgcggacctacgatccgcaagccttctggcggcagatgaaccgcgcggcgattgcgcgctacggcgagattgctgcggaaagcggtgtcgatttctaccgggaagccggcgcgcttcacgtcggcaacagcgaaaccaccgatgtcgcgtcggttggccaggtctgcgccgacgaggcgatcgggtgtgaggcctatcgggatgcggcgctcgccgagcggtttccgtttctgcaatcaacctccggcatgctgggctatttcgagccgcgcaatgccggatatatcagcccgcggcgcctggtgcgggcgcaggcgatcgcggcggagcacgcgggcgcgcggatcatcgacgaagctgcgctcgggatttcggaaaccgcttccggtgtgacgatccggacgcgatcgggcaacctcgaggccgagcgtgtgctggttgccgccggcgggcatacccaatcgctgctgggccgatcgttgggtgttacggtctatgcgcgtaccgcggcgctgttccggctcgatcgggcggaagtcgaacgcctggccggcatgccgtcgatgcgctgtctcgggccgaagggcgataacccctatatcctgccgccgatcccgtatccggacggccagacctggttgaagctcggcggcgatccggtcgatcgtccgctcggcagcgaggccgacatcaaggactggttccggtcgggcggttcggtcgacgtcgcggatcacctgcaagcacagatcctcgatcgcattcgcgacctcgagttcgaggagcgccgcgtcgtgccctgcatgaccagcttcggcgacaccggcttgccgctgatcggaccgctgtcggagcgggtcaccgtcgcattctgctgctacggcaagagcgcgaaatgttcggatgaactgggccggttgggtgctctggcgctgctcggcgaggtgagggcggagcttgcaccctgacgagggatgccagtgcgatttctgcaatcgcaccatgaccggacgaccattgaagtttgcccttgtgcgggacaacataaagctatgagcgaacaacagatcaagatcaccctggcgcaactcaatccgacggtcggtgacgtcaccggcaacgccgcgaaagcgcgtgccgcgcgcgagaaagccaaggccgacggcgccgacctcgtggtgttgtcggagctgttcctcgccggctatccgccggaggacctggtgctcaagccggcgttccagtcggcctgccgcgcggcggtcgaggagttggcgcgcgagaccaaagacggcggcccggccatgctgatcggcacgccgtgggtcgaggacggcaagctctacaatgcctgcgcgctgctcgacggcggacgcatcgccgcgctgcgcttcaaggccaatctgccgaattacggcgtgttcgacgagaagcggctgttcgcgcgcggccccgcgccgggcccggtgacggtgcgcggcgtgcgcatcggcgtgccgatctgcgaggatatctggctcgaggagtccgaggactacgagaacgtcgtcgaatgtctggccgagaccggcgccgagattctcgtggtgccgaacggctcgccctatgcccgtgacaaggccgatctccgtctgtcgatcgtcgtggcgcgggtcaccgagagcgggctgccgctgatctatttgaacgaagtcggcggccaggacgagttgatcttcgatggcgcctcgttcgcgctgaatgccgatctgtcggtggcggcgcagctgccggcgttcgaggagaacatcacgacgctgacctggcgtaagaccgcggacggctggcgctgctccgggccgagcacggcgcaactcgagggcgacaaggccgattacgctgcctgcgtgctcggcctgcgcgattatgtccgcaagaacggatttcccggcgtgctgctcggcgtttctggcggcatcgattcggcgctgtgcgcggcgatcgcggtcgatgctctcggcgccgacaaggtgcgcggcgtgatgctgccgttccgctacaccgcgcaggtctcgctcgacgatgccgccaagctcgccgccgcgctcggcatccgctacgagatcctgccgatcgccgacgccgtgaacggcttcgagaagatcctggcgccggtgtttgccggcatggagcgcgacatcaccgaggagaatctgcaggcgcgcgcccgcggcacgctgttgatggcgatctccaacaagaccggcgccatggtggtgaccaccggcaacaagtcggagatgtcggtcggctacgccacgctgtacggcgacatgaatggcggcttcaacccgatcaaggacatctacaagaccgaggtgttccgcctgtccagcctgcgtaatggctggaagccggatggtgcgctcggcccgtcgggtgaggtgatcccggtcaacatcatcatccggccgccgaccgcggagttgcgcgagaaccagaccgatcaggattcgctgccgccctacgacgtgctggatgcgatcctcgaacgtctcgtggagcgcgaggagccgcttgcgaccatcatcgcagccggcttcgaccgcgatgtggtgacccgcgtcgatcgcctgctcaacatcgccgaatacaagaggcggcaggccgcgcccggggtgaaggtgacgcggaagaacttcggccgcgaccgccgctatccgatcaccaaccgcttccgcgatttcggcaaggccttgccggagcccgacgagaagctggtgacgcgcacctcgcgtgcgtcggcggaggcgttcgaggggtaaatcctactgcttcttctgctggatgaaggtcgggccgaccgtgcggatctggccgtcgctcgcgggcgcggccggcgccgtggtggcgtcagcggcggcaggctgctgttgagctgtcgctgccggcacgcccttcttgccggcggcagccttggtctgggcgcgctgctgcatcttccgcgcgctctcctcggtgacgatgatgtcgccctgctgcgcagccgccgactggtcgtcgaccgccttcaacgcctcggcccagctctggccggccgccctgcacgagcaggacggattgaactcggtgcggtacttgaaggcgttcggcagcgacgagtaggactggccgctgatcgagaccgcctggttgatgtcttcgccgggattacggtaggcgaacaggctggcctccgcggccgggcactgcgccttgcagacctgctcgtcggcggcaaagcgcgcctgcgtggttgcgaacgagatcgggaaataggcgccgtcgcaggtgcggacgcagacggtgcggaaggtgccggactgtccggcatattgcgcgtcgggcgggggcagcggattgccgggattgccgccaccgccgccgccgaacaggttctcgatgaaattgccggggccgcgcgcagccgccgcggcgtattgcgggccgcaattgttctgcgccagcgcggtcaagaccgagcggcgctggttctcgcggtcggcgccgccgaggccgccggtgcgcagccgctcgagattggcggtcatctggtcgagattggcgcgcatctgctggatctggttgttgaccggaccgcactgcgccgaattgttgttgaacagagacaagaacccggagctgtcgcagcccatgcgccgcgcctgcgccgtcacccgatcgagctcgccctgctgccgggttgccgcatcctggtagcggcggatctgctcgtcccgtgccggatcgccgctgccgccgccgcgatcgatcgccgccagctggccctcgagccgcgcgcacatcgggttggcctgcggcgcgccttgcggagccgggccgggcggacccggggggacctgcgccaaggcatgcgtcgcgggcagggcgatgccggccagcagggcgcaagtcaaaaaccagcggaagaagcgagaacgggagctattgggcatatccggccattagaacgacgccgcgcggcgagcaacgccaagcgcaggcaaggccgtgcaatagccttttctcggggcagcgtcacgtcgtttccggggcgccggtgtggcaataaccccgtttatccagcggcttggctcagcgctggcaggtgatggcgacgtattcgccgcagctattgccggtgcatttggcgttcgcggcatgcggaaccgcgccggtgatctcgtcgggatcgacgcggcggtaattgctcgcctgcgcaaaatcgcgtgagcggcagtaggcgcgggcggcggaggcgccgcaacggtcgccgcgggcgatgcactggtcgatgccgtagccgtcggcctcgttagcgatgatgaaaacccggctgtcggccagcgcggccgaggcgacaaggacaaacgtgcaggcaatcaatgctgaaatgggccgcatggtgcaccgatgatatggcggggaatccgctggccctcccgtacgctcaattccttaataatgattaaccatgaaggcgttggcgtgatttcggtagagggcgggccgcaaatcacccgaaaacagccccttgacgcgataagggggccgtgagagatggtggaaccatgaacggccacctcgccatctgcagcatttgccgcgagattatgagctagcgattcgctggctgaggccgtcttttctcaatcgcctgagaatcaccggacgcctcgccgcgaggaacaggtgatccatggatttgcgcctctacgatacgctgacccgggagaagcggcccctcgtgccgctcgatgccaacaatgtccgcatgtatgcctgcggaccgacggtctacgacttcgcccatatcggcaacggccgcgcggccattgtcttcgacgtgctgttccgcgtgctgggccatcgctatggcgccgatcacgtcacctatgtccgcaacatcaccgacgtcgacgacaagatcaacgtccgcgccgcgcgggactatcccggcgtgccgctgaacgaggcgatccgcaaggttaccgagctgacctatcagcagtaccaggacgacgtcacggcgctcggctgcttggccccgacggtgcagccgcgcgcgaccgagcacatcccggagatgcgcgcgatcatcgagaagctggtcgccggcggcttcgcctatgtcgccgaggatcatgtgctgttctcgccgcaggcgatgaacgcggccaattcggtgctgccgcgctacggctcgctgtcgaagcgctcgctcgacgagatgatcgccggcgcccgcgtcgacgtcgcgccctacaagcgcgacaacaccgacttcgtgctctggaagccgtcgaagccgggcgagccgtcctggccgtcgccggccggcattgcggtcgagggccggccaggctggcacatcgagtgctcggcgatggcctggaagcatctcggcgagaagttcgacattcatggcggcggcatcgatctggtgttcccgcaccatgagaacgagctcgcccagacttgctgcgcgttccacaccgaccgtatggccaatgtctggatgcacaacggcttcctgcagatcgagagcgagaagatgtcgaagtcgctcggcaacttcttcacgatccgcgatctcctggccgattggcccggcgaggtgctgcggctcagcatgctcaagacgcattatcgttcgccgctcgactggacgctgaagagcgcggaagagagcgcgaagacgctcgacgactggtacgcggttgcggccgatgccgagcccggcgcgccgtcgcaggccatggtcgaggcgctctacgacgatctcaacacggcgcaggcgatggccgtgctgcatggcctgcgcagcgcatcgtcgagcagcgagcagagtcgcagggaatttgccggctcgctgcggttgctcggtttcctgtccgagagcgcggcggcctgggagggccgcaagcggcaagcgagcggcgtcgatgcggcggccgtcgaggcgctgatcgccgagcgcacggcggcgcgggcgcggaaggatttcaaggagtcggaccggatccgtgatcagctcgccgcgatgggggtggcgatcaaggatggcaaggacgccgacggcaaaccagtgaccacctgggaggtcgcgcgatgagccgctccgcacccgcgttgcgcccctatctgcctgatgacgcgccgttgctggcggcgatcttcgcggcctcgatcatggacctgaccggcgacgattacagcgaggcgcagcaggaagcttgggcggcggctgccgacgacgaggcagcgttcggcaagaagcttgccggccagctgacgctgattgcgacgttgcagggcgcgcctgtcggcttcgcctcgctgaagggcgccgatcacatcgacatgctctatgtgcatccgagtgcggtcgggcagggtgtcggtgccgcgctgtgcgatgcattggaaaagatcgcaagcgcccgcggcaccaagatcctgaaggtcgatgtcagcgacaccgcgctcgaattcttccgcaagcgcggctatgtcgcacagcagcgcaattcggtcaccatcggcgacgagtggctcgccaacaccacgatgcagaagacgctcgacggcgtcgccgcgcccggagggcacgcatgagccgcgagcgcctctatctgttcgacaccacgctgcgcgacggcgcgcagaccaacggcgtcgacttcacgctgcaggacaagcaggtgatcgcgggcatgctcgacgcgctcggcatcgactatgtcgagggcggttatcccggcgccaatccgaccgataccgagttcttcagcaggaagcccgcgttcgatcatgcgcgcttcaccgcgttcggcatgacgcggcggccgggccgctcggcctcgaacgatccggggctcgccggcatcctcgaggccaaggcggacgcgatctgcttcgtcgcaaaatcctccgcctaccaggtccgggttgcgctcgagaccaccaatgaggagaatctcgcctcgatccgcgacagcgtcgcggccgccaaggcgatcggccgcgaggtgatggtcgactgcgagcatttcttcgacggctacaaggagaaccgcgactatgcgctcgcctgcgcgacggcggcctatcaggccggcgcgcgctgggtggtgctgtgcgacaccaatggcggcaccatgccgcatgagatcgaaaccatcgttgctgatgtcgtcacgcaggtgcccggcgctcacgtcggcatccacgcccataacgacaccgagcaggcggtcgccaactcgctcgccgcggtgcgtgccggcgcgcggcagatccagggcacgctcaatggccttggtgagcgctgcggcaatgccaatctctgctcgctgatcccgaccctgaagctgaagcaggagttcgccgagaagttcgagatcggcgtcaccaccgagaagatggcgacgctgatgaaggtgtcgcgcacgctcgacgacatgctgaaccgcgcgccgaaccgtcacgcggcctatgtcggcgagagcgctttcgtgaccaagaccggaatccatgcctcggctgtcatgaaggatccgcagacctatgagcatgtgcttccggagactgtcggcaaccaccgcaaggtgctggtctcggatcaggccggtcgttccaacgtgatggccgagctcgaccgcgccggcatcgtttacgacaagaccgacccgcggctgacgcggctggtcgaggagttgaaggagcgcgaggccgcggggttcgcctatgaatccgccaacgcatccttcgatttgctggcgcgccgcacgctcggcaaggtaccggaatattttaaggtcgagcagttcgacgtcaatgtcgagcagcgctacaacgccaacggccagcgtgtgaccgtggcgctcgcggtggtgaaggtcgatgtcgacggcgagcatctgatctcggccgccgaaggcaatggcccggtcaatgcgctcgacgtcgcgctgcgcaaggacctcggcaagtaccagaagtacatcgatggcctgaagctgatcgactaccgcgtgcgtatcctcaatggcggcaccgaggcggtcacgcgggttctgatcgaaagcgaggacgagaccggcgagagctggaccacggtcggcgtctcgcccaatatcatcgacgcctcgttccaggcgctgatggattcggtgttctacaagctggtgaagtcgggcgcgccggcgtgagtgaacgacaaacaacgcacagccgtcattgcgaggagcgatagcggcgaagtaatccatgcctccacgtgcggcgcgatggattgcttcgtctcgttcgcaatgacgagggagaacggcacatgatcgaccacgtctccgtcggcgtccgcgatctcgagcgcgcggcgcggttctacgagccgacgctggccgcgctcggcctgaaccgtctcgtcacgcggccggcgacgatcggcttcggcaaggcctatcccgaattctggatcaatctgcgcgccacgatggcgcacgtcgcacatgagagcggcacccatatctgcctgcgtgcgaagaccaccactgaagtcgatgccttccacgccgccgcgctggcctccggcggcctgtccgatggcccgcccggcctgcgtccgcacgaccgcgtgcgctactatgcggctttcgtgctcgaccccgacggcaaccggatcgaggcggtgacgtttccgagcgcgtgagcgaggctgaacccgtcgtcctgaggtgcgagccttgcggcgcaattgcgccgctgggcgagcctcgaagggcgaacggccgccagccgggccgtgcatgcttcgagacgcgcgttccgcgctcctcagcatgacgggaacaatttagcgcgttcgagcgatcacagccgccgtgccacttcgggggccagctccttcgcggcggccggcttgccggctactgcggaacgcagccgcggcaggatgtcgtcgacacggtcggccatcaggacgttgatcggcaatgtcgggcggatgaactccgtcgtgcgcatatggctcaagagcgagagcaggggctcccagaagttgtcgatattggcgagcaggatcggcttggagtgacggccgagctgctgccaggtcagctgctcgaccagttcctccagcgtgccgatgccgccgggcagcgcaacgaacgcatcagagtgctcgaacatcaggcgcttgcgctcgtgcatgtcgggcgtgacgatcatctcctggaccgaggtcagcgcattctcgcgcgcccgcaggaactccgggatgatgccggtcaccgagccgccatggtcgagcgtggactttgcgaccgcgcccatcaggccgatcgagccgccgccatagaccaggcgcacgttgttttcggcaaaggccttgccgagcgcgacggcagcttcaacgaagcggggattgttaccggggccggagccgcaataaacacagacggtcttgatttggttcatacgttccttgtggcactgcagcgtaaacagggtcaagactcccatatggggattgagagccaaaaaatcccgtaaattcccgcgaatcgcgaacaattttcgtcataagcctgtacgccgcgttcaaacgatctatatgacgggcacaatggcaaatcgtggaaaagatgtggcagcgcgccggcgcgccatgacggcgagagcgggatcctgatggtgccgccgcaacagaggatgaccgctggcggagagcccacggccgcgacgacgcccgccgagaagggcacgctggtcgggaccctggttcatctctggccctacatctggccgggcgatcgcgccgatctgaagatgcgcgtgatctggtcggtggtgctgctgctgttcgccaagctcgcgacgctgtcggtgccgttcaccttcaaatgggcgatcgatgcgctgaacggcgcgggctcggctccggtcgagtcgtcgaactgggtgctgtggctgatcgcctcgccggtgctgatgacgatcagctatggcgcggtgcgcgtcatcatggctgtgctgacgcagtggcgcgacggcatcttcgcccgcgttgcgatgcatgcggtgcggcggctcgcctacatcaccttcgtccacatgcacgagctgtcgctgcgcttccatctggagcgcaagaccggcggcctgactcgcgtgctggagcgcggccgctccggcatcgagaccatcgtgcggatggtgatcctgcagctgatcccgaccatcgtcgaggtcacgctgctggcggcggtcttgctctggcagttcgactggcgctacgtgctcgcggtgctgatcacggtcgtggtgttcatgcactacacctacgtcgcgaccgagtggcggatcgagatccgccgcaagatgaacgattccgacaccgaggcgaacaccaaggcgatcgactcgctgctcaactacgagacggtgaagtatttcggcgccgaggagcgcgaggcgaggcgctacgaccgctcgatggagcgctacgagcaagccagcgtgaagacctatacttcgctcgccgtgctcaacaccgggcaggcgatcatcttcaccgccggcctcaccgcgaccatgctgatgtgcgcgttcggcatccgcaacggcacccacacggtcggcgatttcgtgctgatcaactcgatgatgatccagctctatcagccgctgaacttcatgggcatggtgtatcgcgagatcaagcaggcgatcatcgacatcgagaagatgttcgacgtgctggcgcgcgatcccgaggtgaaggacgtgccgggcgccaagccgctcgcggtgtccgccggcagcgtgcgcttcgaggatgtccggttcgcctacgagcccgatcggcaaatcttgaaaggcttgagtttcgaggtgccggccggcaagacggttgcgatcgtcggtccgtccggtgccggcaagtcgacgatctcccggctcttgttccggctctacgacgtatcgagcggccgcatcctgatcgatggccaggacatcaagaccgtgacccaggcctcgctgcgacaggcgatcggcatggtgccgcaggacaccgtgctgttcaacgacaccatccgctacaacatccgctacggccgctgggatgccggtgacgacgaggtggaggaggcggcgcgccttgcgcagatcgacggcttcatccggatgtcgccgcagggttacgagacccaggtcggcgagcgcggcctgaagctctccggcggcgagaagcagcgcgtcgcgatcgcgcgcaccgtcttgaaggcaccgccgatcctggtgctggacgaggcgacctccgcgctcgacagccacaccgaggccgaaatccagggcgcgctggagcgggtgtcgcgcaaccgcacctcgctggtgatcgcgcaccggctgtcgaccatcgtcggcgccgatgagatcatcgtgctggaccagggccggatcgccgagcgcggcacccacgcgcggcttttggccgccgacggcctctacgccagcatgtggaaccggcagcgcgaggccgaggaggcccgcgaacggctcgcccaggtcgatgacgacggcacggcgccgaatcgcctgccgccggcggtcactgaatcctcacaggattccagccccgttgcgggtgagaagcccttgccgaccgccgcggaatagtcgatctagggcgtctcccgccaaccggggcggggaaacccaagcgagttctgatgtcgatcgccaattccatccgcgcgcagatcccgccgatccaccccgagggctaccccttcattggcgggttcgcccttgcgagcctgatcctgttctggatctggaccccgctcggctggatcgggacgctgctcacggtgtggtgcgcgctgttcttccgcgatcccgtgcgggtgacgccgctgcgcgacggcatcgtggtgtcgccggccgatggccgcgtctccatggtggtacaggcgctgccgccggccgagctcggccttggcgacaagccgctgccgcgggtttcggtgttcatgagcgtgttcaactgccatgtgaaccgcagcccggtggccggccgcatcgaccgcatcgcctaccggccgggggccttcatcaatgccgagctcgacaaggcgagcgaggacaatgagcgcaattcgctggtcatctccagctcaaacgggcggatcggcgtggtccagatcgcgggcctcgtggcgcgccgcatcgtctgtttcgtcaaggaggggcagtcgatcggtgccggcgagcgtttcggcctgatccgcttcggctcgcgtctcgacgtctatttgcccgagggcaccaaggcgctggtctccgaaggccagaccgcggtggcgggcgagacgatcctggcggatttccgcggcgccgatccgggccgcacctaccgcgccgattaacgctgtttcggccggttgatcagccggttcccgtgccgatggcggagcggggccatgcttgctatatttatcggaccatgacgccattcgataacaattccagcgagcttcgccgccgccggttccgcccgatcccggtgcggatgctggtgccgaacatgatcacgctgctggcgatctgcgccggcctcaccgcgatccggctgtcgacggaagggcggatggagctggcggtcgccgccatcgtgttcgccgccatcctcgacggcatcgacggccgcgtcgcccgcatgatcaagggccagtcgaaattcggcgccgagctcgacagcctcgccgacttcgtcaatttcggcgtagcgccgggcctgatcctgtatttctggcagctgcatgaactcaacaacggcggctggatcgccgcgatggtgtttgcgatctccggcggcctgcgcctggcgcgcttcaatgcctcgatcgacgacccgaacaagccggccttcgctgccaattatttcaccggcgtgccggcgccggccggtgcgatcaccgtgctgctgccgatctatctcgccttcctcggcgtgccgatgccgccgtcgacgttgacggcattctacacgctgctgatcgccttcctgatggtgtcgcggctgccggtgttctccggcaagaccgtgaagatgcgcgtgccgccggagatggtgttgccggtgttcgtgtcggtggtgttcttcgtcgcgctgctgatcgggtatccctggcacatcctgtcggcgggctcggtggcctatctaatcagcctgccctggggctggaagtcctaccgcgaccaggagcgccagcttgcggcgcagacgcgaggtgccggcgcgccggcagcctcgaaggatgcacggtcaccagcggggccgtcgacccttcgaaggcggctgaagaagcggccacctcagagcgtgtgaatttttgtggctt

SEQ ID NO: 70 - DNA, 16275 bp, Bradyrhizobium enterica
aggggggagggagcccaacccatgcgctcgcctcacttagctaatcatccgccggcactggggcaccccctctcccccaaccgtcacttgcgggaggcggattgccaaaatatcgaaaacaaccccatgcacagtagctcgaggttgactgggcgccagacccggtgagaacgtctggcacgttcaagccgcaggaaagtttctcactttcaaacgcttagacccaatcacctggagccttgaccggacgcacaaccggcagtagtctgtttccgaatacggaattctgtattccgaattggacagccggcatgatcccgttggacccgcttccgaacctcatcgaccaagtctacgggcggttgctcgaggcgatcatcgaccgcacgctgctgcccgggcagcgcattacccagaacgagctggccgatcggctcggcgtctcgcgtcagccgatctcgcacgcgctgcatctgctgcatcgccagggcctggtcgcggaaagcggcaagcgcggcttcgaggtgacgcagctcgatccgcagcgcattcgcgagctctatgaagtgcgcggtgcgatcgacgcgctcgcggcgcggcttgccgcgacgcgcgtgaaggaggatgccgcggcccgcgcgcagctcgagagcgcgctcgaagccgggcgcgcgatcgatgaccacgcaccgctggcgcgcctgatcgcgctcgatgtcgacttccacagcgcgatctatcggctcgccggcaattccgcgatcgaggagatgatcgcgccgcaatggccgcatatgcgccgctcgatggcgaccgtgctcgccgaactcgattaccgcgacagtgcctggaccgagcacgagaccatcgccgcgcagattttttccggcaatgccgccgccgcggaggctgccgcgctggcgcatgcgcagacggctggacggatgaccgaagagagattgagagcgaccgacgtggcggcgtgaacccgaacctgacggcgccgcaagaacgaagaccaataatcaagggaggaaagcaccatgaaactgacccaagagcaggtcgaatttttccatcgcgaaggctggctgttcctgcccgagctgttcagccaggaagaggtcgatttcctcgcccgcgaggcggtcgcgatctatgacgccaaccgccccgaggtgtggcgcgagaagagcggcgcgccgcgcaccgccttcgccgcgcatctctacaacgaggcgttcggcatcctcggcgcgcatccgcgcatgatcgacccgatcgagcagctgttcggcgagaaggtctacatgcaccagttcaagatcaacgccaaggcggccttcaccggcgacgtctggcagtggcaccaggattacggcacctggaagcgcgacgacggcatgccggagccgcgcgcgatgaacatcgcgatcttcctcgacgaggtgatgccgatcaacggcccgctgatgctggtgccgcagagccagaccgcgggcgacctcaaggcctcgcacgatctcgaaaccacgtcctatccgctgtggacgctggacgaggagacggtgacccgcctcgtcaagcagggcggcatcgtcgcgccgaccggcaagcccggcggcatgctgatgttccacggcaatctggtgcatgggtcgagcggcaacatcacgccctatccgcgcaagatcgtctatttgacgctgaacgcggtctcgaactacatccgcaccccgacgcggccggactacatcgcgcatcgcgacttcacgccgatccagacggtcgccgacgacgcgctgctgcggctcgcccgtgcgccgcggcaggcggcggagtaaacgcgcaactgtcattccggggcaacgcgcagcggcgagcccggaatccatttgaccgcgcacttgttgtgagatggattccgggctcgcgactttgtcgcgccccggaatgacgaattctgaatttgtcgcgtcctgcgcgaccacaccatcggtaacaagcatcatgaacctgcatcacctcctcaaaacccgcgccgccgccggcaagccggtgcgcgtcgtcctgatcggcgccggaaaattcggctcgatgttcctgtcgcaggtgccgcatacgccggggctcgaggtgcccgtgattgtcgatctcgaccgcgagcgtgcccgcgaggcgtgccgcaccgtcggctgggacgacgcgcggattagcgcgaccaccttcaccgacgatggcgcgcgcgcgatcgccggcggcgcattcgatgtcgtggtcgaagcgaccggcaatcccgccgtcggcatccgccatgcccgcgcggccatcgcggccggcaagcatgtcgtgatggtcaatgtcgaggccgacgtgctggccggcccgctgctcgccgaagaggcgcgcaaggccggcgtggtctattcgctcgcctatggcgaccagccggcgctgaccgcggaaatggtcgactgggcgcgcgccaccggcttccacgtcgtcgccgccggcaagggcaccaaatatctgccggcctatcacgacgtgacgccggagggcgtgtggcagcattacgggctcaccgcgggcgaggcgcaatccgccggcatgaatccgcagatgttcaactccttcctcgacggcaccaaatccgcgatcgagatggcggcgatcgccaacgcctgcacgctcgacgtgccgtcggagggattgttgtttccgccgtgcggcgtcgacgatctgccgcatgtgatgcggccgcgcgacaagggcggcgtgctggagaaatccggcatcgtcgaggtggtgtcgtcgctggagcgcgacggccgcccggtgttccgcgatctgcgttggggcgtctacgtcgtgctggaagcgccgaacgactatgccgccgattgcttcaggcagtacggcctcaagactgacgcatccgggcgctatgcggcgatgtacaagccctatcacctgatcgggctcgagctgaacatttcggtgctgtcggcggcgctgcgcaatgagccgaccggccagccgcgcggcttccgcggcgacgtcgcagcggtggccaaacgcaatctgcgcgccggcgagatgctcgacggcgaaggcggctacacggtgtggggcaaattgatgcccgcctccgccagcctcgccgccggcgcactgccgatcgggctcgcgcatcgcgtcaagctgaagaacgacgtcgcccatggcgccgtggtgcgctggaacgacgtcgaggtcgatgaggcgaacgacacgatcaagacccgcaaggcgatggagcgcgcgttttcgcggtagcgctctctttcactcagctcttcacctctccccgctctttgcggggagaggtcggatcgcatcgcagatgcgatccgggtgaggggcgaggcacgctgctcaacaagcggcgaagtgctcaccggatggaagcccctcaccccaaccctctccccgcaagagcggggcgagggagaagagagagcgcgcaccgaccaactacggcaacaaccggctcgccttcgccagcttgaaccacttccggaacatcacctcggtatccatcatctcggtgaagccggcctggttgatcttgaccgtcgacacgatcgacggcggaccggattcggtctgcccatggcgcatgctgtaatcggcatactggaacgacaggccgacgaactcctcgaggccaggcgcgatcagatcgtgcgtcctgcgcagctcgtcccagagcggaatccatttcggatactccttcgccagcgacaacggcacatgcgcgcccggcgtcatgtcgagcgcatccgcgatcgccggccagatgttctcccaggtgaagacgtcgccattggtgacgttgaacgcttcgttgcgcccggccgcggcatcgcccgaccaggcgatcgcgcgcgccagcagatcgacgtcgaccgcctgcgccacgcgtggcgcaccgccgggataatcgagcggcctgccctgcgcgcgcagcaccgccgcatagacgccgagcggcgggatcaggtccatcgcgccgcccatggcttcgccgatgatcagcacgggacgcaggatgctccagtgccagctcttgcccctctgcaactcacgcaggaaattctcctgcacccaatagaaattcggctgctcgtacatttccgagcggccctcgcgcgccggcaccgtcagcggccggacatgcacgccataggccttggtgccctgcagcagcgcgacgtgcttgagagctggcgctgcgggttcgagcgcgcccatcaaattgcgcagcatgcggtcgttggtctcgatctgcccggcgtcgcgccagccatcgaccaggctcggcgcctcatagagtgcggcatagatcagatgggttgcaccgccgagctcggccgcggcgcggcggcaatcctcggcgctggtgagatcgatcggcacgtgccgcgcgccgtagagatcgcgcggcttgcggcgcgacagcgcgatgcgctcgcaatcatcggatgcaccgaagtgccgcaaggcggcgctgccgaccaggccggtggcgccggcgaccacgactttcttgttggccatgtccttgaactcccgtccctcactgcctgcgtagcagatcgccgaagggcccgcagcccgtcgcacgggtatcggatgagaccttcagcatcgattcgccggccccgggccggatcgccgggctctcgtttgatggtttcaggatgcggatgcacgcgcgtcgctgcaccgaacccgttccgcattaaaaaagccccggagaaattctccggggctcttttttcggttcgattcggacgagaacggctcagttgtcgtcgctgccgccgaactcttccatcagcttgtcgtagctcttggtcacgatatcgatgttgcccttgttctcgaccgcgggcggcggcgatttcagggcttcgttgaggtcggccagcgcgtccttcttgtccttggccgacatcttcttgtcggcctggacctgggcgatctgcgccttcacgacggcctcggggccgacatatttcttggtctgcggatcgaagccgccgagcaccagcgagatgttgtcgacgacgctgttgtactcgtcgtagctggcaaaaccgttcttcttggcgatggcctcgagctgggcaacgaccttcggatcgggcttggcgtcctgggacagcttggcggtgatcgggtccatttccttcgccgcggcgatcgcgccgtcgacctgcttgtcggtgagcgcgatctgcttgatcggcggggcctgatcctgtgcgggagcggcggcctgcgcaggaggtgcagcttgcgcgggcttcgccgccggtgccatctgctgctgctgctgctgcttggcctgcgcgaatgcgccgctgctcgacgctgcggtcatcgcgagcgcaagacacgcgacgccgagcgcagcagttacgggacggacgatctcacgcatggaagtctccttgttggggcagtttgccgagcttcttgagtggaatgggtacggaaatcgaaatgaacggcccatgaactttggtcgtagacgatgacgggcaatcgtggccgaatgatcacaaagcattcagtgcttagtgatcggctattcagcggaggcgagataggcatcggcgaatcgcggtggatgtaggaaatccgatccatcgtcagatatgctgccaatccgtcatcatcggattgcgattcatgtattctttttttggcctgttcaccgatcctgtccctggcctgccgcagcggatctgccgggcttggccggaattgagtccgatcaaaatcgacaacccaatttcagcgatcggcgttcggttcggaacacaccgctacgagccctcactcgaggatacgccagcggcggtggtccatacggtcgaggaactgtcgcagcaaagtccagcgcgtttcatgctgctgcgaacggaatgctggggatgggatggcacgaactggggacaaatcattcgagatggcaagacagttttcaagaccgacggcgacggcgctctcagacgcctgatcaagcattggggcgtcgatctcggaccgtcggaaatcttcgcaccattgcagcgtgactttccgtggggtgttcctgacgtcagaccatagtcgccgagcacaaacaaaaacgccgcctcccaagggagacggcgttttgctttgatcatgacatcgaaagaggaattccattgtccttggcaggcctggcagcgacctactctcccagggcttaagccatagtaccattggcgctgaagcgtttaacggccgagttcgggatgggatcgggttgaggcgcttcgctagaaccaccaggccggcgaaggacaacggaaacgaagcaagcgttcttgagcgcgatgcgctcgggtctcatttggtcggcgctactagagcgctatggacactgaaaatgagagcaatcaagccgatcgaacgattagtaccggtaagctacatgcattactgcacttccacacccggcctatcaacgtggtcgtcttccacggttctcaagggaatgctcgttttgaggtgggtttcccgcttagatgctttcagcggttatcccgtccgtacatagctatgctgcactgccgctggcgcgacaacagctccaccagaggtacgttcaccccggtcctctcgtactaggggcaaatcctctcaacattccaacacccacggcagatagggaccgaactgtctcacgacgttctgaacccagctcacgtaccactttaatcggcgaacagccgaacccttgggaccttctccagccccaggatgtgatgagccgacatcgaggtgccaaacgacgccgtcgatatggactcttgggcgtcatcagcctgttatccccggcgtaccttttatccgttgagcgatggcccacccacgcgggaccaccggatcactatgaccgactttcgtctctgctcgattcgtagatctcgcagtcaggcaggcttatgccattatactcgacgaacgatttccgaccgttctgagcctaccttcgcacgcctccgttactctttgggaggcgaccgccccagtcaaactgcccaccatgcgctgtcccgatccccgctaaagggatgcggttagatatccataaccattagggtggtatttcacatttcgactccaccatggctggcgccacggcttcaaagtctaccacctattctacacaaacagtcacgaataccagcgcaaagctacagtaaaggtgcacggggtctttccgtctgaccgcaggaaccccgcatcttcacggggaattcaatttcactgagtctatgttggagacagcggggaagtcattacgccattcgtgcaggtcggaacttacccgacaaggaatttcgctaccttaggaccgttatagttacggccgccgtttaccggggcttcgattcaaggcttgcacctctcctcttaaccttccggcaccgggcaggcgtcagaccctatacgtcatcttgcgatttcgcagagccctgtgtttttgttaaacagttgccaccccctggtctgtgcccccactgcatgcttgcgcatgcaatgggcctccttatcccgaagttacggaggtaaattgccgagttccttcaacatagttctctcaagcgccttggtatactctaccagtccacctgtgtcggtttcgggtacgatctgatgtggaggctatttcctggaacccattcgaggcccgaccaatccattaaggtcggacaacatactggattcgtcaccatccactggctgcagaatattcactgcattcccatcgactacgcctttcggcctcgccttaggggtcggctaaccctgcgaagattaactttacgcaggaacccttggactttcggcgacactgtctttcacagtgtttgtcgttactcatgccagcattcgcacttctgatacctccaggcgccctcacgggtcgcccttcgcaggcttacagaacgctccgctaccgcgtgacccttgcggatcacaccctaagcttcggctcgtggcttgagccccgttacatcttcggcgcagaaacccttatttagaccagtgagctgttacgctttctttaaaggatggctgcttctaagccaacctcctggttgttttgggatttccacatcctttcccacttagccacgaattaggggccttagctgtaggtccgggttgtttccctctccacgacggacgttagcacccgccgtgtgactcccggatattgctctcaggtattcggagtttggttgggtttggtaagacggtaagtccccctagcccatccagtgctctaccccctgaggcattcatccgaggcgatacctaaatatctttcgcggagaaccagctatttcccagtttgattggcctttcacccctaaccacaagtcatcggagcctttttcaacaggcacccgttcggtcctccagtgagtgttacctcaccttcaacctgctcatggctagatcactaggtttcgggtctaatacaacgaacttgacgccctattcagactcgctttcgctgcgccttcgcctatcggcttaagcttgctcgttaaattaagtcgctggcccataatacaaaaggtacgatgtcacccagaacgtatcttgggctccatctgtttgtaggtgtccggtttcaggtctatttcactcccctcgtcggggtgcttttcacctttccctcacggtactggttcactatcggtcgctgaggagtacttaggcttggagggtggtccccccgtgttcagacaggattacacgtgtcccgccttactcgtggatacatcatcgcattactcgtacggggctatcaccctctgaggcccagctttcctgactggttccgattgtctttgatgtatcactggcctggtccgcgttcgctcgccactactaacggagtctcgattgatgtcctttcctccaggtacttagatgtttcagttccctgggttcgcttaaaacctcctattttattcggaagtctcataccttctcttgataaccggaaatccaaaacctcgcggtctgatttcttccatttctggtcgaaccccaaaacacaaggtcttggagttccggctatcgaaggtgggtttccccattcggaaatccgtggatcaaagcttcttcgcagctccccacggcttatcgcagcgtagcacgtccttcatcgcctctcagcgccaaggcatccaccgaacacccttaaggcacttgattgctctcattatcaatgtccacacactcggcagaatgttgtctgcacaattgccttgcggcgcacgccctcgatgagcgctatgtgcagccggacattgactagaaagaccagcttgcttcgtaagatcggcccgatagcgaggcggtcaagcttcgctacaaagatcgttttacaactcgctcatctcactcatcttgcgatgagctgcgatgcgcgagcgccgaaaacgatctggagattaggaatggtacccgcgaattgcttcgctggatccaaactcggatcgatctcctctttacgatgtcagaaaacacgcacgtcaccgtccatccggaccaatgagtgcgaagtgatgtttcgcggacgaatttgaacagagcttcttaagcagggcgcattctcgagcttcaattccatctggtggagccagacgggatcgaaccgacgacctcatgcttgcaaagcacgcgctctcccagctgagctatggccccgtaccagaagacgaatgctcacattgagcccgccgtcgccctttgggctatgccgggcacacttcgcttcgtctgctacgtggccgcgccacgcgtagccgacggcgaagcgtggtgggcctgggaagacttgaacttccgacctcacgcttatcaagcgcgcgctctaaccaactgagctacaagcccctaacacgagagacatgccggcgcgcatccgacgtgaagtcgatgcatcgcacagcgctcagcccctggcgcgtgttcgtccgcgaagaaagagaaacgaagacggcgaaatcccgccgatggagctcaacaatcctgaaattgttggcccctgaatgtttctaaaacgatccgatagtgagcgtgagctcgctgaaggatcatccttagaaaggaggtgatccagccgcaggttcccctacggctaccttgttacgacttcaccccagtcgctgaccctaccgtggccggctgccccctttcggttagcgcaccgtcttcaggtaaaaccaactcccatggtgtgacgggcggtgtgtacaaggcccgggaacgtattcaccgtggcgtgctgatccacgattactagcgattccaacttcatgggctcgagttgcagagcccaatccgaactgagacggctttttgagatttgcgaagggtcgccccttagcatcccattgtcaccgccattgtagcacgtgtgtagcccagcccgtaagggccatgaggacttgacgtcatccccaccttcctcgcggcttatcaccggcagtctccttagagtgctcaactaaatggtagcaactaaggacgggggttgcgctcgttgcgggacttaacccaacatctcacgacacgagctgacgacagccatgcagcacctgtctccggtccagccgaactgaagaactccgtctctggagtccgcgaccgggatgtcaagggctggtaaggttctgcgcgttgcgtcgaattaaaccacatgctccaccgcttgtgcgggcccccgtcaattcctttgagttttaatcttgcgaccgtactccccaggcggaatgcttaaagcgttagctgcgccactagtgagtaaacccactaacggctggcattcatcgtttacggcgtggactaccagggtatctaatcctgtttgctccccacgctttcgtgcctcagcgtcagtatcgggccagtgagccgccttcgccactggtgttcttgcgaatatctacgaatttcacctctacactcgcagttccactcacctctcccgaactcaagatcttcagtatcaaaggcagttctggagttgagctccaggatttcacccctgacttaaagacccgcctacgcaccctttacgcccagtgattccgagcaacgctagcccccttcgtattaccgcggctgctggcacgaagttagccggggcttattcttgcggtaccgtcattatcttcccgcacaaaagagctttacaaccctagggccttcatcactcacgcggcatggctggatcaggcttgcgcccattgtccaatattccccactgctgcctcccgtaggagtttgggccgtgtctcagtcccaatgtggctgatcatcctctcagaccagctactgatcgtcgccttggtgagccattacctcaccaactagctaatcagacgcgggccgatctttcggcgataaatctttccccgtaagggcttatccggtattagcacaagtttccctgtgttgttccgaaccaaaaggtacgttcccacgcgttactcacccgtctgccgctgacatattgctatgcccgctcgacttgcatgtgttaagcctgccgccagcgttcgctctgagccaggatcaaactctcaagttggacttgaaacctttgaaccggctgatcacaacgtttgacgaggtcccaccattcttcgtcgaccgaagtcaacgagccgcccgcgattcacatcgttggcagcgatggtgtaacctttgaaacgtgtaccgccgaagtctttcgtccactcccagaagtcaaaagccgaagctttcgagtattccgagagacgcaaggactccgccgtccacgtttctctttcttcatcttcacttgtcaaacagcccgggatccgacgaccccacacccttagagggtggttctacccttcaccggcagacagtgaacctcaaccgatttatgtcggttgttgtgtcactcatctaagtgaggagcatcagaggcgcgttcgctcgccttggtcagtgacccggcggcgccgcgctcagtggttggtttatagtccgcccccctcgggattgtcaacggccattgtcaacaaaacgtcgtacgccgaaatcgcttgagcagtgcgaagaaattctcattctttccgtgacttaggtcggtggtaaaaattcgccacccgacccgcgtggtaaaaaacttgaaaaaaagtttggcgccgaagcgcccgtcaggcccctcggaacgggttccaggccgctcgaggcggggcggcagcaccaacctgctgcaggaaacttttccatcccaaatgccgcacttgagccacaatcctgcgacgttctggctataagacaagcactgaaccgctcgtaacctgtgggggcacgggtggtttttctgggggaccaggcgaattcttcgagaacccgtcgcctcttccctacacggccgagcaatatcgagagatctgcacaccattgacgttcgagagtgcggccagcgaatggccatcgtcttctcgacttcgatgcgtgtggctcgccatactgccgagattccgcttcaggggatcaaggtggcgacgaggacgagcagaggacgatcgcagttgctggaatttggggggatatcgggttgagccaacgggcgtcacgcggaagcggcattgggcgcgagaccgggatgatcgatctcggtcacgaaccgccgctttcagtcgacggcaccgaggccgcggtgatcgatcgccgccgtgtctccgttcaatggttcagcggcaccattctcaccggtctctgtggcgcagctctgatcggcggcgccgtttttgcgtcgctcgatggcgagatgaccttcgccaaggtgccggagcgcgtcgaaggcgcgctgcgcggcgccttcaccggcaacgatcgcgtcgtcagcctgcataagggcgaccgcctgccgccgccgagcgaatcgtcagcctcccgcagcctggtgcgcgtgtcgaccgtgacccgcgtcggcaatcgcgacgtgatgcgggtgcggcccttcatccggatttccggcaatctctcgatgaccacgagcgatctgtcgtccaagataccggcgttcaacgcgcagcgtctgttgaccgatgtcggctccgacacgccggctgcggccgaggatccgaatgcggcggcgtccgccgaacccgacgccgaggtctccttcgtcaccaaggatctcggagccgtgctgccgaaagccaagctggccgcggtcgtcgcactcgacgacatcctgatgcgggtccgcgacgccgccaactggcgcggctccggcaattccgtgcgctacgcctcactcgccaatgccgcggccgatgccaccggcgccggccccgatatcaggatggcctacgccaccgagggcaacacctccgatccctatgcgggcttcgagacccgcgtcgtgccggaaaacgtcacgctgctgccgaagaccaaggagcaggtcaccggcggcaatccggtcggcgaacgggttcacctcgtcaagaagggcgacagcatcacctcgatcctgcgcgatcagggcgcgacgccagacgaggcgaaggcgattgccgcaacgctcggcccgcgcggccgcgacggcggcctgaaggaaggccagaaggtgcggatcctgatggcgccggcagctcccggaccgaatgtcaggctgcagccctatcgcgtcatcgtcgccaacgatgccgtggtcgaagccgtcgccgcgctgtccgatctcggcaaatacgtcgccgtcgacgtgcagagcatgaacaccacgaccgacaccgccgacaattccagcgacgacgacgaggatgatggcagcggcgtgcggctctatcagagcatttacgagaccgcgctgcgcaacaaggtgccgccgaccgtcatcgaggacatggtcaagatctactcctatgacgtcgatttccagcgcaaggtccagcccggcgactcgttcgacgtgttctttgccggcgaggacgaaggcgtcaccagcaccgaaaagaccgaagtgctctacgccgcgctgaccgtcggcggcgaaaccaagaaatactatcgcttccagagctcggatgacggcctcgtcgactactatgacgagaccggcaagagcgcgaagaagttcctggtgcgcaagccggtcaacaacgcgatcatgcgttcgggcttcggcggccgccgccacccgatcctcggctacgtgaagatgcataccggcgtcgactgggccaccgcctacggcacgccgatcttcgcatccggcaacggcgtgctcgagaaggtcggatacgagggcggctacggcaaatatatccgtatgaagcactccaatggctacgagacggcctacggccacatgtcggccttcgccaagggcatggagatcggcaagaaggtgcgacagggccaggtgatcggcttcgtcggctcgaccggccagtcgaccggcccgcacgtccactacgaaatcctggtcaacggccgattcgtcgacccgatgcgtgtgaaactgccgcgcggccgatcgctcgaaggtccgatgctggcgagcttcgaacaggcccgcgacaagatcgaagcccagatggcgagccgcggcagctcgcgcatcgtctcggatgccacgagctcgacgtcgcagacccgctccatcaccaaccgctgatcagtccgcccatcaggagtgatccacagggcgaggccctccccgcggcatgcggagagggcctccattgttgcgctagtcgcgctcagttcagcttgcgcttcgagaccggagcatcgaactgcacgatctcggcggtcttgggcacctgaccgttgaaggtcagcacattgcccttctccgaaatcagcacgcgatcgccgtccttgacctcgccggcgaggatcatctcggccagcggatcctgcacgctgcgctggatcacccgcttcaaggggcgggcgccgtaagccggatcccaacccttctccgcgagccaatcccgcgccttcggatcgagcgtgagctcgatcttgcgatcctcgagcagcctggtgagccgcgcgaactggatctcgacgatgcgccccatctcgctcttctgcaggcgatggaacaggatgatctcgtcgatccggttcaggaattccggcctgaaatgcgcccgcacgacgcccatcacctggtcgcggaccgccgcggtgtcctcgccttccggctgattcaccaggaattccgaaccgaggttcgaggtcatgatgatcagcgtgttgcggaagtcgacggtgcggccctgaccatcggtcaggcggccgtcgtcgagcacctgcaaaagcacgttgaagacgtcaggatgcgccttctcgatctcgtcgaacagcacgacctggtagggccggcgccgcacggcttcggtcagtgcaccaccctcgtcgtagccgacatagccgggaggcgcgccgatcagccgcgagaccgagtgcttctccatgaactcggacatgtcgagccggaccatcgcggtctcgtcgttgaacaggtcagcggcgagcgcttttgtgagttcggtcttgccgacgccggtcgggcccaagaacatgaacgagccggtcggccggttcggatcctgcaggcccgcacgggcacggcgcacggcggttgccaccgcacgcaccgcttcggcctgaccgacgacgcgcttggcgagactgtcctccattttcaggagcttgtccttctcgccctcgagcatcttgtcgaccggcacgccggtccagcgcgagacgacctgcgcgatgtggttggcggtgaccgcctcctccatcatctcgccgccgccatgcttgctttcgctcgcctcgatatccgcaagcttccgctccagctcggggatccggccataggccagttcgcccgccttctggaattcgccgcgacgctgcgcattggccagctcgacgcggagcgcatcgagttcgctcttcagcttctgggcgttggagagcttgttcttctccgcgctccagcgcgccgtcagcgccgccgaccgctcctcgagcccggcgagctccttctccagcgtctgcagacggctcttcgagccggcgtcgttctccttcttcagcgcctcctgctcgatcttcagccggatgatgtcgcgatccagcgaatcgagt

SEQ ID NO: 71 - DNA, 14402 bp, Bradyrhizobium enterica
cagcatccccgttgaggtcttgccgtgcgcatgatcccgctcacggaagcggatgtactcgtcgatgacagtcgagaataatttggattttggcggcaagccctgctcggctcggtgttccatttggaacagcagccgacggcctgtttgaacggcagtctcctcaactgtcgtcttcaaagaccgagttacatatttccccggcgaaagtcgcaggcgggcgtagtaggtgccggctcggcgaaaaatcgtgagcttgccatcttcaagatagcgagcgccgtccattcgtggtgtccctgaagttcagcaagcaccaccaggattgaaatgctttcgagagttagacaaaaacgaccgagttttgaacagtcgagacgcctaactacttgaaatcattggctaagcgtaccgcccgtggcagtgcttgtacttcttgcccgaaccgcaggggcaatcctcgttgcggccgaccttgccccagcttgccgggtcattcggattgcgctcggcggcggacatggccggcgccagcgaggcctgggcgtaggtggcttcgctgaggctggcgcgggcgaactcgtcctcaccggtgttgggatcgagcttgtgggcttccatcatcggcagcggctgcggcggctcgtccggcggcacgatctcgacccgcatcaattgcgcggtgaccgcctcgcgcagatgcgcgctcatctcctggaagagattgaaggcttcggtcttgtactcctgcaacggatcgcgctggccatagccgcgcaggccgatcacctggcgcagatggtcgagcatgatcaaatgctcgcgccagagatggtcgagcgtctgcagcaggatggtcttctcgacgtagcgcatcacgtcggggccccattgcgcgaccttggccgccatccgctcgtcgacatggttctcgatgcggttgagcagctcctcgtcggcgatgccctcttccttggcccattcgtcgaccggcaggtcaacatcgagcacgcgcttcagctcttccttgaggcccgcagtgtcccactgctcggcataggcatgttcggggatgtgcttggcgaccacgtcctcgacgaaggcatggcgcatgtcggtcacggtctcgacgacgctgtcgtccttcatcaggtcgacgcgctggtcgaagatcaccttgcgctggtcgttctggacgttgtcgaacttgagcaggttcttgcggatgtcgaagttgcgcgcctcgaccttctgctgggccttttcgagcgccttgttgatccagggatggatgatggcctcgccttcctgcaggccgagccgctgcagcatgctgtcgagccggtcggagccgaagatgcgcatcaggtcgtcttccagcgacaggaagaatttcgagcggccgggatcgccctgacggccggagcggccgcgcagctggttgtcgatgcggcgggattcgtgccgctcggagccgatgatgtagaggccgcccggcttcttcacggtcttggcgggcttgttgcccttggcgggctcgacctcgaaatcctcttccgccttcagcacgatctcgcggaagcgctcgatgtcggccttgatctgctcgatcttcttggccttctcggcctcgtcggtgatgcctgcggtctcctgctggatccgcatctcgagcgagccgccgagcttgatgtcggtgccgcggccggccatgttggtcgcgatcgtgatcgcgcccggcacgccggcttcggcgacgatataggcttcctgctcgtggaagcgcgcgttcagcaccgcgaacagctttgccggcttgccggcgcgggccgcggcgtagagcttctccatgccggattcggaggtgaagtcgatctgcttgtagccgtgcttcttgaggtactcggccagcacttccgacttctcgatcgacgccgtgccgaccagtaccggctgcaaccgcttgttggcccgctcgatctcggcaaggatcgcaccgtacttctcgttctgcgtgcgatagacctcgtcgtcctcgtcgagacgcgccaccggcaaattggtcgggatctccacgacctcgagcttgtagatgtcgaacagttcgtcggcttcggtcagcgccgtgccggtcatgccggacagcttggcatacatccggaaatagttctggaaggtgatcgaggccagcgtctggttctcgggctggaccgtgacgtgctccttggcttccagcgcctggtgcaggccttccgaatagcggcgaccctgcatcatgcggccggtgaactcgtcgatgatgacgacctcgtcgtcgcggacgatgtagtccttgtcgcgggtgaacagcgtgtgcgcgcgcagcgcctggttgacgtgatgcacgaccgagacgttctcgacgtcgtacagcgaatcgcccttgagctggccggcgtcgcgcagcaggttctcgagcttctccatgccgccttcggtcagcgtcaccgtgcgctgcttctcgtcgacctcgtagtcgtccttcttgacgagcttcggcatgaaggtgtcgatggtgttgtagaaatccgaacggtcgtcgagcgggccggagatgatcagcggcgtgcgcgcctcgtcgatcaggatcgagtccacttcgtcgacgatcgcgtagaaatgctcgcgctggaccatgtcctccaggcggtacttcatgttgtcgcgcagatagtcgaagccgtattcgttgttggtgccgtaggtgatgtcgcaggcataggccgccttgcgctcggcatcgtcgaggccgtgcacgatcacgccggtggtcagccccaggaaagcgtagatctggcccatccagccggagtcgcggcgggcgaggtagtcgttgacggtgacgacatggacgcccttgccggcgagcgcgttgaggtagaccgcaagggtcgcgaccagcgtcttgccttcaccggtcttcatctcggcgatgtcgccctcgtgcagcaccatgccgccgatcagctggacgtcgaaatggcgctggccgagcgtccgcttggccgcctcgcgcaccgtggcgaaggccgggaccaggatgtcgtccagggtcttgccttgggctagctgctgcttgaattcggcagtgcgggccttgagctcgtcgtccgtcagtttgacgaggtcgggctccagcgcgttgatggcgttgacgcgggactgataccccttgacccggcggtcgttggcggagccgaaaaacttgcgggcgagcgcgccgatcatgcgaaattcctgttcttcggtctcgagttcggtcttggttcagtcttgaagcttaagtcttggaatacagcctgagatggtccgccagatcgcctatcaactcaccgtgacgcgctgcaactcgagccccgacccggggctcctccgccaattgagtgggaaacgggccatcctgggttcaacggcgaaaaacgcagcaaaataagcgctctcaccgctgacgcggtcggccagagatatggcccggtcggggggttgtcaacgtcgccaagatgtcaaggaattcatcattttgacaagactttcgcgttgccaatgtaacacgattgggcgagtgtccgccccgctcgagcttccccctttagatcaaggattttgcatgaccacctcgcctccggaaatcaaaaccggcctgcgcctcggcctcgccgccctggccgccacgggctgtcttgtcgcagtgctggctgccggcctgccggtccgcgccgcggaatcggacccggtgctggcgaaggtcaacggttccgagatccacgccagcgacgtggcgctcgccgaggaggaactcggcccgagcctgcagcagatggacccctcgacccgcaaggacaacgtgctgtccttcctgatcgacatgaagatcgtctccaaggccgccgaggacaagaagatcgagaacaacgacgatttcaagaagcggctcgccttcacccgcaaccgcctgttgatggacagcctgcttgccagcgagggcaaggccgcgaccaccgacgatgccatgaagaaggtctatgacgaggcctccaagcagatcaccggcgagcaggaggtgcgcgcgcgccacatcctggtcgagaccgaggatgaggccaaggcgatcaaggccgagctcgacaagggggctgacttcgccgagctcgccaagaagaagtccaaggatcccggcgcctccgacggcggcgacctcggcttcttcaccaaggaacagatggtgccggaattctccgcggtcgccttcgcgctcgagccgggcaagatctccgatccggtcaagtcgcagttcggctggcacatcatcaaggtcgaggaaaagcgcaaccgcaaggcgcccgacttcgagcaggtgaaggcccagatcgagacctatgtgacccgcaaggcccaggccgactacgtcgccaagctgcgcgaggccgccaaggtcgagcgcatggacaagccggccgacgccgccaaggacccggccgcaccggccgatgccgccaaggacgcgccgaagcccgccgacaacaagatggcgcctgcgaagaagtaagcgccgcgacgctgaactgatcgaagttgcgatggccgggcatgtccccggccatctgcgttttggggaggctttgcagcacggatgaagcgcagcgcaatccgggctacggattgtcgtttcttgaacgattgatgacagcgcgtcagccctctcccgcttcggccggcgagatgttatgcagcgcttccctccccgtagccggaagcctgccgatgtccaccgccgtctcccccctcgccccgcctgacgttcccgagatgcccgtgatcgcgggtgtgcggcttgctaccgccgccgccggcatccgttacaaggggcgcaccgacgtgctgctcgcgctgctggacaagggcaccacggtggccggtgtgttcaccaagtcgaaatgcccgtcggcgccggtcgaatggtgccgcgccaagctgaagggcggagccgcgcgcgcgctggtggtcaattccggcaatgccaacgccttcaccggcaagaccggcaaggcctccactgcgctgaccgcgcagatcgccgggaaagcggtcggctgctcgacctcggaggtgttcctggcttccaccggcgtgatcggcgagccgctcgacgctaccaagttcgatggcgtgctggcgcagctcgcggagaccgcaaccccggatcgctggatggacgccgcccgtgcgatcatgaccaccgacaccttcccgaaggtcgccaccgcgaccgtgaagctcggcaaggccaaggtgacgatcaacggcatggccaagggcgccggcatgatcatgcccgacatggcgaccatgctgtccttcatcttcaccgacgcgccgctgtcggccggtgtgctgcaagcgctgctcaaggccggcgtcgaggacaccttcaatgcgctgaccatcgacggcgacacctcgacctcggacacgctgctggcgttcgcgaccggcgccgcggcggcccatggcgcgccgaagatctcgcgcgccagcgacccgcgcctgaaggccttcaccaaggcgttccagcagatcctcgccgacctctccgagcaggtggcgcgcgacggcgaaggcgcgcgcaagctggtcgaggtcgtggtcgagggcgcgacgacaaaaccgtcggcgcgcagaatcgcgatgtcgatcgccaattcgccgctggtgaagaccgcgatcgccggcgaggacgccaattggggccgcgtggtgatggcggtcggcaaggccggcgaacccgccaaccgcgacaagctctcgatctccttcaacggcatccgcgtcgccaagagcggcgcgcgcgatccgtcctacaatgagaaagaggtctcggaggcgatgaaggcgccgaaggtccagatcaaggtcgcgctcggcctcggcaaggcgaaagaccgcgtgctgacctgcgacctcaccaaggaatacgtcacgatcaacggcgactaccggtcgtagggctttcgtcgttgcgacgaacgaggctctcgattccgtcatcctgaggagcgccaacgggtccgcgcgaagcgcggcccgatgacaggctccgcgcgtctcgaaggatgcacggccccgatggcgccgactggagagaaccggaccgccgatccttcgagacgccgcgcgaaagcgcggctcctcagggtgacggggatagggtggtgagtcgctgacctaaagcgcgatgatatttggttgaatcgtcatcgcgctttagctctttgtttgagcatgatcttttcggaaaaccgcttcgcacttttccggatcatgctttagctgctgatccgcgcgttggcgaccgccttcttgaacagcgcgttcatcgcgtccgcgatgccctgggtcgggctgacctcgaagtagaagcccggcgacgcgcaggcctgcatgttctgcgcgatctcgctgttcggcgacggaccgaacgggcccttgttgaacggatcgatccagctcatgtaccaattgttggtcggcagctgcagataggtggtgtagagcaccgcgatcttgatgccgcggttcttgattgccgtgcagagcgccgggttgatcggcgactggcagcggttgctgccggtgatcggcttcaggcagcttgaattgggctcgtcagccacgccatcggacacgaagaacagatacttcagcggcgccgccgaggtgccggggcccggcgcgctgatcgcgttgctgatggccggaaacaccgtggtgaactgggtgtccttgtcggcggtgtaggcgtcgttgttgccgtagacgcccatcagatcgatgttgccggccgcggtcttggcgctcgacaggctggccgacagcgagaacagcgggcgcaggccgatcgtctgcgaagaggcgccgaaatcgtagatcgccatccggtactggctggaataggtcgcggtattcgccgccgtgtccatcaactgctgggtcgcgctgcgcagcacgtcgattcgcgtcgtgacgccgagcgtcttggcgagattgtagtagttgttgggatcgttgtagtcgtggcaggcgaaggcgcactggtccggggtgttgttgaccatcttggtgacatcggtcggcgtcgccgcaacccccatcgacggcgagttgtcgagcaggagatagaaatcgatatagagcggcatggtcgcggtcgaggtcgaggtacccgacacggacaccttgccctgcccgatgacgccgaggaacatggtcgggacatcggccgtgaacttgaccgtcgaggtgatggtgccgccgctcttggtcatggtcggcgtcacgctcgtcagcgtaaagccgttctggttgaagacgttgccgttgaagatcttcctcgcatcggcttcgcccgccgtgatctcgccgtccgaggtcatggcgccggccgcgatgaagccgggcgatcccctggcgaccgacccgacgctcgccgcgtcggcggcggatatcagcttgctgcggatctggttggcgcgcgaatagtcgaccgcgcatccgacggcgatcatcagcggcagcagagcgaggccgaagatcatcgcaatgttgccggagcgatcgcggcggaaacggctgagggtccggatcaaggtgctcatgggttatatcggcacaagaaatgatgggtagataaacggctccaccctgccggcgacgaattaagagcggcttatcgcggacgcagaaagagcgtgcgggcacaaatcgtttggccgaggggcgcattgctggttaatgaaagcttgcagatcagaaggaaattcccgctttatggctgacatcaagctgaccctcgtcgtcgcctgcgcgctggtcgacgccgacaaacgcgtgctgctggcgcagcgccccgcaggcaaggcgctggcgggcctgtgggaattccccggcggcaagatcgaaccgggcgagcggccggaacagaccctgatccgcgagctgcacgaggagatcggcatcacggtgagcgagccgtgcctcgcgccgctgaccttcgccagccacgcctacgagaccttccatttgctgatgccgctctacatctgccgccgctgggagggcatggcggtggcgcgcgagggccagaacctcgcctgggtccgcgcgggcaagctgcgcgactacccgatgccgcccgccgacatcccgctgctgccgcacctgatggatttgctgctgtgacctcctctgccgctccggggaggtgcgttgccaaaaacatcaaaaacaaccccatgcaaaggcagccggcggtagccggcgctcgaccaggcgacttgacacgtcgggcaactcacccgcataattccattattccgaaatcgtggagacgtccctcgcccccttgctcgcataaagggacctgacggtaagggacgcactcacgacacgctccctccccatgatcttgaacacgcgcgcagaattgcgaaagcgatgatcacacgaatatctcgctcggggctacccctctccccaaccctctcccgcaaggggagagggagcctgagcagcgtgcgcccctaacggctcaacgcttcacacccttcaccgccgcctccaggctcgccttcgccgagcccggcttcagcggcttcggctggctgtcatgcggcgcccagccggacagccagacgatgtcgaaggtggcgcggatgcggccgtcgggatcggcgaagcgctcgccgtagatctgcgccatgcgcagcatggtggcgcggcgggtcggggcgtggcggcgctcgtgcagcacattggtcgcgcccatgcgcctgagatcggccatcagcgcgaacgcgctggcatagcgcaccacgacgcggtcgacatcggtgaccggcagcgcgaagccagcgcgctgcaacaacgccccgatgtcgcgcaaatcggcgaacggcgcgacgcgcggcgacacgccgccctcgcactccgcctccgccgcggcgaagctttgcctgagttcggtcagcgtatcgccgccgagcatcgcagcgagcaagagcccgtccggcttcagcgcgcggcggatctgcgcgagcacgccgggcagatcgttgacgaactggaaggccagcgcggagaccatgagatcgagcgactccggcggcagaccgagcgcttccgcctcgctgaagccgatcggatcgaccgatccgacacgcccgcgcagggcgtccccgagcccgtcacccggcgtccagagatcggccgccgccgaaaagctgcgcgataccgcctgcaaacggtccgccatgtctgcggtgacacgctcgagcaggaacgtcgccgcccccgcgcgccgggcgcgcgacagccgcgcggcgagcaatgcgcgatcgaacaggttgggagcggtggccgggttcggtgccatgccggctggttacgccggaccgccgtcgcaggcaatgcgccttgagcccgcgttgcgcaaacgctagcctcgcctgccatggacgccgaggcatcaccgacacgctccattaccggtcaggtccagcgcgcgctcggcgcggtcggcggcgcttggttgcggactgcgcggctggcgctcgacatcgcgctgccgacgctgtgcgtgtcctgccgcgagccggtccatggcgaaggggtctgtgcggcgtgctgggccaaattgtcgttcatcgcgccgccgttctgcccgcggctcggcattccctttgtctacgatccaggtcccgaattgctctcgatggaggcgatcgcccatccgccggcctacagcagggcccgcgccgcggtgcgctatgacgatgttgcgcgtacgctggtccatgcattgaaatatcaggatcgcaccgatctggcgcccacaatgggtcgctggatggcccgggcggggaaggaattgctctccgaggccgacatgctggttccggttccgctgcactggcggcggggctggagccggcgctacaaccagtccggcgcgctcgccaaggtgatcgcgcgccacagcggcgtgaaaatggtctccgaggcgttgcgacgcacccgcgccaccgagcagcagatcgggctgtcgcgcaaggaccgcgccagcaatgtgcagggcgcattcggggtcgccgatgaacgcaaggctgacatccagggccgccgcgtggtcctggtcgacgacgtcctgacctcgggtgcgacagtggatgcctgcgcacgggcgctgctgcgggccaaggccgcgcaagtcgacgtgctggtgttcgcccgggttgtcgatacccaccgtgctcccatataatctgtcattcaggttcaaccgagcacaccatgaccgctgccattgaaatctacacccgcccgggctgcggttattgcaccgcggccaaatcgcttttgacgcgcaagaacgccgcgttcaccgaactcagcgtcgcgagcaacccggcctaccgcgacgagatgtacgatcgcgccggcagcggggcgaccttcccgcagatcttcatcggccagacccatgtcggcggctgcgatgagctctacgcgctcgaccgcgagggcaagctcgacggcctgctcagcaacggaggcggcgactgatggtcacggacaacaaattcaccgccgcgatggtgcagatgcgcaccggattgctgcccgagccgagcctcgagcagggcacgcggctgatccgcgaggcggcggcgcagggcgccaaatacgtgctgacccccgaggtcagcaacatgatgcagctgaaccgcgcggcgctgttcgagcatttggccagcgaagaggacgacaagtcgctgcaggcataccgcgcgctcgccgcggagctgaagatccatctgcatatcggctcgctggcgctgcgctactcgccggaaaaggcggtcaaccgctcgttcctgatcgggcccgagggcaatgtgctcgcgagctacgacaagatccacatgttcgacatcgatctgccgggcggcgagagctaccgcgaatcggccaattaccagcccggcgagaccgccgtgatctccgacctgccctggggccggatcggattgacgatctgctacgacgtgcgcttcccggcgctctatcgcgcgctggccgaggccggggcctccttcctcaccgtcccctccgccttcacccgcaagaccggcgaagcgcattggcacacgctgctgcgcgcccgcgccatcgagaccggctgcttcgtgttcgccgcggcgcaagccggcctgcatgagaacaagcgcgagaccttcgggcattcgctgatcatcgacccctggggcgagatcctcgccgagggcggcgtcgagccaggcgtgttcctcgccgagatcgatcccgccaaggtcgagaccgcgcgcaagaccattccctcgttgcagcacggcaggcgtttcggcatcgccgaccccaaggccggcccggagcatctgcacctcgtccggggttcggcatgatccgctacacgctgcgctgcgcgcgcggccatcagttcgagagctggttccagagctcctcggcctatgaatcgcaggagcggcgtcacctgatcaattgtccgtcctgcggctcggccgagatcgagcgtgcgatcatggcgccgcaaatcgtcagcaagaaaggccgcgaaccggcccagcctgcgccggcctcgcctgtcgaagcgaccgccactgaatcgacgtcgctgatgatggcgcaggagcgcgagctgcgcagcaagctgaaggaactgcgcgaccacatcgtgaagaatgccgacaatgtcggcgaccgcttccccaacgaagcccgcaagatgcattacggcgatatcgagcaccggccgatctacggcgaggcctcgcccgaggaagcgcgcgcgctgatcgacgaaggcgtcgaggtctcgccgctgccgacgctgccggaagaccggaattgacgcccttccgtgattccggggcgcgcgaagcgagaacccggaatccatcgggccacaagtccggcgttggaatggattccgggcccgcgcaaaggggcgcgccccggaacgacggaagagagtgacatgacccccgagacattttcttcctggcaggtctgggcgtttctgtccgccgtgttcgcggccttgaccgcgatcttcgccaaggtcggcgtcgagggcatcaactccgatctcgcgaccctgatccgcaccgtggtcgtcctgatcacgctgtcggcgatcctgtttgcgaccgggcagttcacccaggccggaccgatctcgaccaaaagctggctgttcctgctgctgtccgggctcggcaccggcgcgtcgtggatctgctatttccgcgcgctcaaacttgggccggccacactggtcgcgccgatcgataagctcagcgtggtgctggtggcgctgttcggcgccgcgttcctcggcgaacgcccctcgccctatggctggatcgggatcgcgctgatctcggccggcgcggtgctgctcgctgttaaaggctgatctacgcggcgatcaagagcgcgacgccgatcacgatcaggacgatgccgaacacctcgcgcagcgagaacggctgcttgagcgagaaataggctacgccctgcgcgaacagcacctcgatcagcgccagcgtgcgcacattggcggcggcggtgagtgcgaacgccaggaaccagaactgcgacgagaacgcacccatgaagcccgcgaatagcgagggccgccacaggccgaggatcttccgcagcacatcgggcgcgcgcagcaagagatagaccgacaggatcagggtctggacgaacaggctccacatcagcgtgtaggaggccgccgtgacaaacgagacgccgggcaccgcgatgatcgcgccgcggaagctcaccgccgagatcgcgaacaccgcagccgcgccgaggccgagcactgtcgggcgcagatcggcaaagctcttttgcccgccgggcctcagcgcggtgacgacgacgccgacggttgcgatcacgatcgcgatcaccttggccgacgtcagatggtcgccgaggaagacgaagccgaagatcgcggtctggatcgcctcggtcttcatgtaggcggtcgtcaccacgaaggaacggtcgttcatcgccagcagcatgaagccggtgccgacgatctggctgagcgcgccggacaacagccacggccagaacgacgccagcggccacggcacggggtcgccggtcacgaggatcgcgagcacaaagaacaccaccgagaacggcaggccgaacaggaagcggatattggtcgcgccccaggtcccgagcggcccggtcagctgccgctgcatcgcattgcgcgccacctgcccgaacgcagcgacgatcgtgaagggaatccagagcgaggagagcgtgaacatgcgggataaggggtgcgccgggcgggagtacgcgcgcagcgtgccgggccgcactgatgcggtcaactggcgctgtgcatgacaggcctgcgcccgtgccacaaactcactgtcgtccctgcgaacgcactagggcatgcacacatctagttgggtggggattcccgaatcggtatttcgtgtgattcatattgcggcacttcggctttggcggaggtgtcgacatgctggcgcaaattgactggtcattaggtcggttcggggatctccgcctcgataaaggggggcggcgctcgtcgaatgcatggtcgcgggcaaggatgtctgcctgcgacggctggcaggaggcatgcgtgcccgggaggtgcgcttcaaccgctttctcggcaatgccaaggtgacgacgacgcggataatcgaaagctggagcgatggtacggtaatggcggccgaaggccgccatgtgctggcgatccaggataccagcgagatcaattttgccaccaaggcacaaaaccggcgtggcttgggcgagatcggtcatggcaacacccgcggggtgttgctgcacccgatgctggccgcagacgcggaaagcggctgctgccttggcctgttgcacggcgagatctggacccgccagggccgccgcaccgtctcgcacgacaatcgcgatctgaaggacaaagaatcgcaacgctggatcgcgaccgctctggcagccaagccgctgttggcgaaggctgcgatggtgaccatgctgggcgaccgcgagagcgacatcttcgcgctctacgcctgcgccgcagaacaccagttccacgtcattgcccggagcatgcatgatcgcaagctggcggatggctgtggcctgtatgcggccagcgaggccatgaccagcatcgaacaacggaccatcgtattgcctgcgcg

SEQ ID NO: 72 - DNA, 13785 bp, Bradyrhizobium enterica
gttcacggaatcggtgaggtccttccaggtgccggccacaccgggcacgatcgcctggccgccgagcttgccgtcggtgccgacctcacgcgcaacgcgcgtcacttccgaagcaaacgagcgcagctgatcgaccatcgtgttgatggcctccttcagctgcaggatctcgccgcgaacgtcgaccgtgatcttcttcgacaagtcgccgttggcgaccgcgatcgtcacctcggcgatgttgcggacctggccggtcaaattgttggccatcgagttgacgctctcggtcaggtccttccagacgccggtcacttccggcacttgggcctggccaccgagcttgccttcggtgccgacctcgcgggccacgcgtgtgacctccgaggtgaacaccgagagctgcttgatcatcgtgttgacgatgttcgccgattgcaggaattcgccgcgcagcggcctgccctcgacatcgagctgaacggtttgcagcagatcgccctgcgccacggcggcgaccgcgcgggtgacctcgcgggtcggccacaagaggtcgtcgatcagcgtgttgaccgagctttccatatcggcccacgcgccgctggcgaggccgaaattgacgcgctggcgagtttgcccctcgcggccgacgacctgcccgacgcgcgccaattgctgagccatgcgctcgttggcggtcgcgatctcgttgaaggcgtccgcgatcttgccgtcgataccgaggtaatcgccacgcatccgaaccgagaaatcgccgccgcgcatcgcctgcagggactgcagcagatcgtgcgaggaatcgaggcttccattcgatgattgagcgcggcgtgtttcagcacggggacgaggcggagaaccgagatcggtcatgtaatttcccctacgcactggcttacgaatcctaaagactcggaaaagccagtgtgaccataagaatgattgctcttgatcgattcaagcgggaaaacgccaaaaccgcgatttgtgacgcaaaccgagtgacttaatcgctaatggaaccaaaagttccgacccggcattgtaacttttcgcagagtgggactagcgttcggccggccagcttcgccgcaccaattgcacccgctcgatgcggctgcattgttcgcagcggtattgaaggatgtccttgccctcgctgcccggatagctgctctcaagccgcatcgtcctgatgcagctgatgcaggagatcagcgtcagcagcgggctgcgatcgtcattcatcgatgcccgcggtggcgcggtcggatcggcgatcatggcgctgggcaatgctatggtgttggctctcaccacaagaaaatgccgatcctgcggctcaggttccgactcggaaacccgatttacgctcgaagcgcgcgtccgcgctggttcgaccgggcggccggatcacaccctggcgtggcccggtttgggcttaggcttgtccggcctggccttgtccgccttgaccgatgcaatcgggcgatccgcatagcttcggctgagccgctcgcgaacggtcgggaggcgctcgccgccaccggcggctttccatcggccgatcagctcggcgacctctgcgcgcatcgccatcagccggtatgacgcttcgctgcaatccaggtcgcgattgacctggtcccggatcgacgcttcgatcaaggtcatctcagcccgcaaagtgctgatcctgcgacgaatttcattgatcttgttgtccatgggttgttagaacaaaaatagaacatattgtcaagtcacgatccggcaagtgaggtggaccatgagcacagcggcggtgagatttggcggggttgcggaccgcttcggcggtctgatgtcgcgcgcccaggcgctgcggttgaggagcctggccgaggaggcttatcagccggaccagtacgcgcgcgacttgacgtcggaggaagccgaacggcgcatcgacgccctccgggcggagatcgcgctggcggactcgttctgagccacccccctgaggctctgatatagcggcgcagctgggtctgttctgttattgctgctttgccgctgcttgatctgggggggaagtctttcgtgctcgagttggagaagcgctcgccgcttgcgttcccgatcacgctcaaggacgggcgaatactcgcaacggttggcgacgcggcggactatctgtcagcgctgaacgcggatcagcgcgagcgcggctattggaagacggcgatcctgatgttcaacaacgcgatgcgcgaacccagctacctgaggatcgcgacgatcaacatgcgctctgcgcttgtgtatgaccgcctcgtcgacgacgccggctcctgattgtggcgcggcagctacagccgaatcggcggtggttgcgtacggcccttgtcgttatggccgcaaacaaggtaacggcggtacacgcgacggccgggcgcaccatgcacttcggccgcactctcgggccgcctcggagggccaaaggcggcccatttcttttcaaatcaattttgcgcggacgaacagcacccgcagcgcgctggtcgcctgcacggtcagcatggcgttgccggcggctcgctccagcgcagccagcgcgtcgtcgtgcagcgagcggaactccatccattcgacggcgctgagattgctgatgaagcggtaggcctggccgacggtcgcgagcgtcaccgtctcgccattcagccgcaccttgaatgtcgccttcagcggcgtgtcggatttggaagtgtcacccatggcgcggttgtgcgccgcggcgcgttaatgtcaatctaatttctccgcgtccgcgcagctgcgcctgccccactgaatcgcaatgtctgttagcgtttcatccggcgtttcctgggggtgattcgtgcctgatcttgccaacacggcctatctcgatgcgcttaattccgagcagcgccgcgccgtcgagtacggggtcggcgacgatggcatcgtcggcgcgccgctgctggtgatcgcgggcgcgggctcgggcaagaccaacacgctcgcccatcgcgtcgcgcatctgatcgtcgccggcgccgatccgcgccgcatcctgttgatgaccttctcgcggcgtgccgcggccgagatggccggccgcgtcgagcgcatcgcccgccgtgtgctcggcgatcgcgcctccgtcatgaccgatgcgctgaattgggccggcacgttccacggcatcggcgcgcggctgctccgcgaattcgccgagcgtatcgcgctcgacccggcattcacgatccatgatcgcgaggactccgccgacctgatcaacctggtccgtcacgatctcggtttctcccgtaccgaaagccggttccccaccaagggcacctgccttgcgatctattcgcgctgcgtgaatgcggaactgccggtcgaggccgtgctcggccagttcttcccctggtgctccggctgggccagtgaattgaagcagctgttcgcggcctatgtcgaagccaagcagcggcagaacgtgctcgattacgacgacctcctgctctactgggcgcagatggtgacggacagcgcgctggccgaggagatcggcggccgcttcgatcatgtcatggtcgacgaatatcaggacaccaaccgcctgcagtcctcgatcctgctcgcgctcaagccggccgggcacgggctcaccgtggtcggcgacgacgcgcagtcgatctattcgttccgtgccgccaccgtgcgcaacatcctcgacttcccgagccagttcagcccggccgccgagatcgtcacgctcgaccgcaactatcgctcgacccagccgatcctgtcggccgccaacggcgtgatctcgctcgccaaggaacgcttcaccaagaacctgtggagcgaccgcacctcgacccgcaaaccgctgctggtcacggtccgcgacgaggccgatcaggcccgctacatcgtcgagcaggtgctggccaatcgcgaggaaggcacgctgttgaagcaccaggcggtgctgttccgcacctcctcgcacagcggtccgctggaggtcgagctgactcgccgcaatattccgttcgtgaaattcggcggcctcaaattcctcgacgccgcgcacgtcaaggacatgctggcgctgctgcgcttcgccgccaatccgcgcgaccgggtcgcgggctttcgcatcctgcatctattgcccggcgtcgggccggcctcggcacagcgcgtactcgaccgcatggccgaggccgccgatccgattgctgcgctcgcagcgctgcccgccccaccccgcgccggcgccgactggcggctgttcgtcgaggcgatcgagaacctccgctactcggaatggcccgtcgacatcgagcgcgcgcggctctggtacgagccgcatctcgatcgcatccatgaagacagcgaggtccgccgcgccgacctcatccaactcgaacagatcgccgccggctatccgtcacgcgaacgcttcctcaccgagctcacgctcgatccgcccgacgcgaccagcgaccaggcgggcgtgccgctgctcgacgaggattacctgatcctgtcgaccatccattccgccaaggggcaggagtggaaatcggtctatgtgctcaacgtcgtcgacggctgcatgccgtccgacctcggtgccggcacctcggccgaactcgaggaggagcgccgcctgctctatgtcgcgatgacccgggccaaggacgacctgcatttgctggtgccgcagcgcttcttcgtccacggccaggccgccaggggcgaccgccacatgtacgcctcgcggacccgcttcatcccggagcgactgctgccgatgttcgagcggaccacctggccacgcgccgccgccgcgcaagcctcaaccgccaatcgcgcgccgccgatcgacatcggcgcccggatgcgtggcatgtggcgctgacacgggttcaagggattttcgcatgacccggaacgaagccgccggcgcaacgcgccgtccgtaatcggcagacggccattccaggcggctccggcgcgccgctaggacagttgctgatcgccgcgctcacgcggtcgccacgaagctcactccgatccgggtcttcttgctccagatcacctggcactcatagacgacggatgcctcacgggccatcatcaggcggaatctgtgcgggacgaaggccggattctcgacctcgatggcggcgccttccggcgaaatgttcacgatcgtgcaatgcatgaccgaaccgcccgacgagacatagccgggttcattgacctcggttcgcggatgcttgcgcttttcgtccacccggcctgccccccaagctttgtgtacccaaacgtgggggatcggcattgccggagtcaacggctggtgccgcccacttcgggttttcgcactacgatttgtgcgcagcagtaagccggattgcttatcgcgtccgtgcagatgagccccgcgtcggtgcgggcttgccgttcgcgacggcgcaaggatagcttcatcctatgggcgatgcgctggcgcaacgcacgctcccaacaacaatgaacaggcgccatggggagacgcgccatgttcgagattctcgatcgccggacgactctgaccggcaaccagatcaagatccttgccgcggccatcatcggcgatgcgctggaattcttcgactacttcctgatcggctttgtgctcgccttcctgatcggcccgtggaagctcaccttcggccagtcggccaccgtgctgatgagttccggcatcggcgccatcatcggcgcctatctctggggctggctcgccgaccgcgtcgggcgccgcatcgtcttcatcggcacggtgctgaacttctcgatcgcgaccggcctgctctatttcacccccgacaatggctgggtttacctggcgatcctgcgcttcttcgtcggcaccggcgtcggcggcctgtattgcgtcgacctgccgctggtgcaggagttcatgccctcgcacaagcgcggttgggtcggcggcctcgtcacctgcgtgatcccgctcggcgtcggccttggcgcggtgctgggcgcgatcatgggcaccgatcagtggcggctgctgtttgcgatcggcgtgctgccggcggtcctggtgctgctggtcaggctctgggttcccgagtcgccgcgctggctgtgccggcagggacgctacgacgacgcccgcaagtcgctcgcctgggcgctcgaggtgccgccatcggaactgcctttgccgagcgcggccgacgccggcccgatcgtcaagacgagctggttcgacctgttcaaatatccgcgcagcctgatcgtctcctggctcggcaatgccggcgcgcagaccggcgtctacggcatcacgctatgggcgcccgcgctgttcgtgctgctgctcaaggtcacgccgcaggaggctgccaagatgatgatcctgctcagcgtcaccggcttcctcggccgcctctcgttctcgtatttctcggagctattgggacggcgcgtggccggcggcctgctcggcttcggcgccggagcgctgaccatcattgccggctatcactacgacgcgacgctgttcggcatgtcggcgttctggctgctgctcggcgcagccttcttcttcgccgacggcggctttgcgatcgtcggcccctatgccgcggaggtctggccgtcgcatctgcgcaccacgggcatgggatccgcctacggcttcggcggcatcggcaagatcatcgggccggtcggcctcgccttgatcgtcggctcgagcaactatctcaagccggacgtgccgctgacccagatcccgaccgccttcgtctatctcggctgctggttcctgatggcgggcgcggtctatctgttcttcgggcttgagacccgcggcaaatcgatcgagcagatcgaccgggagctcaacgcggcggctgacgtcgcggcctccgcaacgatccggcgcgcctgagggaggcggacatgaatacgacttctgcggatcttgccggcgaccgtgacgtgatcgcccgcgccgaggcggtccgggacgtggttgcggccgcctccgacgaaattgagacaacccgccggctgccgcccgatttgctcgaccggctgcatgaggcgcggctgttccgcctgctgttgccgcgttcgaccaacgggatcgagaccgatcccgtcaccttcttccatgtcatcgagaccatcgccaaggctgatgcctcaacggcgtggtgcctgagccaggccggcggctgcgcgatgtcggccgcctatctcgacctgccggtcgcgcaggagatgtttgccgacccgcgcgccgtgctggcctggggccccggcccgaaggtcaaggcgatcgaatgcgcgggtggctaccgcgtcagcggggtctggtcattcgcgtctggcgggcggcacgccacctggctcggcgcccactgcccgatctacgccgcggacggctcgccgcgccgcgacgccaacggcgagcagctcgagcgcaccatgctggtgcggaccgaggacgtcgaatggaccgacatctggaacacggtcgggctgcgcggcaccgccagcgaccagttcgcgctcaacgacttcttcgtccgctcggaccattcgatcacccgcgaattcgaccgcgagtgccgcgagaacgggccgctgtaccggatgagcaaccacacctgctaccaggtcggtttcgccggggtcgcctgcggcatcgcccgcagcgcactggacaatttcgtcgacgtcgcccgcaacaaggtgccgcgcggcatgaagacgaccttgcgcgacaatgccgtggtgcaatccggcctcgcccaggccgaggtcagtctgcgcgccgcccgcgccttcctgctgcagtcgatggcggacatctggaaagacctggttgccggccacagcatcacggtcgcgcagcgcatgacgatccggatggcggcaacgcacgccatccacaaggcgcgggaagccgtcgacttcgcctacagcacggccggcgccaccgcgatcttcgacggccatccgctggaacgccgcttccgcgacatccacaccgtgacccagcagctgcagggacgcttgagccatttcgagaccgtcggcgcctggatgctcggcgtcgatgccgacctcagcttcgtctgatctgaattctcagggagaagaaccatgccattgggcggactgcagcatttcaccatcgagccgcaggatctggagaagaccaaggcgttctattgcgacgtgctcgggctcgagaatggcgatcggccgccgctcgatttccccggctactggctctattccggcggccaggccgccgtccatttaatgggcacccgcaagccacgcgacggcatcgtcgtgcgtgggacggagaagaaatatgaggacaccggtcgtctcgaccatatcgcctttgccgcgaccgacgtcgatgccgtacgcaagcgcctccaggcgaacaacatcagcttccgcgagcagatcgtgccgcgcaccggcgacacccagatattcctctacgatcccgacggcgtcggcgtggagctgaacttccccaagagctgaagcggatttccctgctcaacaaatcgccgacgcaaagcgccggccaatatttcccattgcgaaagcggttcccgacaaggccctgactcggccatcactcgggcgtgatccggtcggtttttcttcaacattgaatgacgaattaaccgggccgcgccgctgcggcagaatagccgggtgctgcgcctttaacctaccccagggcatggtggcccggctattcgtccccacttcgcgcttagtcgagcccgcgctcgtggctgaggcgaaccatttcgttgatgaagatttgcttctgcttgtcgtcgaggctcgcaaacagcggctcggcggcgtccgccacgccgcgctgatcgaccgcgcgatcgttgaggaactgggcctcgttgcgcatctgctcgatgatgtcgtcaggcggatctcgctgcgcgcgtgcaatgcgcaggttgagccggtccgcgccattgtggccgagatagtgcatcgcgctgttgaagccggcccagttcttctcctgctccggcgtcaggttgagctccttcttgatccgctcgatgttggcgtcgctgttggcgacgatctgttcggccgtgagctgcggtgcgccggcctgggtcagcaccgtcggcgcttgtttggcgcccttgtccttggcggcggccttggccgatttggcggccttagcgccctgcttgtcaccggacgccggcgcctgtgcgttcttgctgttgccggcattggggttgccgttgttgccggtcaacaccccggtcacgccggtcacgaccccgaccacgccgccgatggctccgccgagaaccccgccgaccggtccggcagccttgttgccttcgcgcgcgccctgctcgaccccctgcacgatctgcgcatcgaccatatgaggcactgcaagcagcgtgacggtggtggccgcaaccgcggcgcacaatctccatcgtgctcgcagcttcgctaccgggatgagcatgatcgggtctccgtgatcgatggtggattgcagggttgatgcggcgggcaggctcgacgaatccgaattttatcgtctcccccttcggcaagtctatcggctgcaccgggcatcaacatgacggaacagggttcggtcaggcagacttgagagctgcggctcaaccgcgcacccgtcggcgcgtgcgttcagcaggtctcgcgtgcgccgcagcaagatctcaacaggtgctgtaatccgcggtgacgccggcactgcctgcgatttgaccacaacgttagtactacgcgacaagggcatctcgtttctcgacagccgccggcaattctgttctgatcagtgtgaacgaaatcccgcgacgtcgcgcgaacgcgacgcacaaaaacgacaacgggattcgaaaagtcttttgtccggtggctcgccagggagggaacgccatgtcacggaagacgctttcacgccgagaattcgttgcagcgacagcgctgtcatcggcggcgctcatcacagccccctacgtgcgtggcgcctacgcagccggaaagctctcgatgggcttctgggatcactgggtgccgggcgcgaacagtgcgtccaccgatctggtcaatgaatgggccgccaaggaaaaggtcgaggtccagatcgactacatcaccagccagggcaacaagaacatcgtcaccatcgctgccgaggcgcaggcgaaatcgggtcacgatatcttccagatgccgacgtggtggccgcaggccaatgccgagctgctcgagccggtcaacgacatcatggacccgctcgtcaagctgaatggcgaggtcaatggcacggtgaagtatctcggccaggccgacggcaaatggcttggcgttcccgccagcgtcggcagccagatcaagggcccctgctcgcgcatcgacctgatgaagaagcacgccggcatcgatgtgcaggaaatgtatccggccgggagcccgccgaaggcggataactggaccctcgatacgttcctcaaagcggccgaagcctgccacaaggccggcttcccgttcggtatcggcctcggcgagaccagcgacagtgtcgacaccgccggtgcgatcttccagtcgttcggtgcgcagctggtcgacgccaagggcaatttgaccgtcaagaccgacgcggtgcgccagtcgctcgaattctacaagaagctgctcgccttcctgccgccagacgtcgccgcatgggacgatgcctccaacaacaaatggctggtcgcgggcaaaggcgcgatgatcatgaacccgccgagcgcgtgggcggttgccaagcgcgacgcgccgcaagtcgcggagcaatgctggacgcacgggttcccggccggcccgaagggacgttttgcgccctatctgccgttcttctggtcgatctggtcgttctcaaagaacaaggaggcggccaagagcctgctttccttcctgtcgcaacctgcgtcgatcgagaagatggtggtcgcgagcggcggctacgacctgccggcctacgagaagctcacgacattgaaggtctgggaagagcaaggcccgcccaagggcacgctctatcactacccgaacccctacaagcaccagacgctgtcgattgcggcctcgcctgcaccgcccaaggtcgcgcagcagatctacttccaggccaccctgaccaagatgtgcctgcggtactaccagggtgaagccatggagaagacgctagcctgggccgagggcgagtgcgaaggcttcatgcgaagctgacggcaatcgagccccgcgcggccgcagatagtgccggtcgcgcgaggtctcgttttcgtaccccgaccgccgaaccggcgagctgtgcaaccaacccgcgcgagggacctccgttatggtcgatgtcgcattccagtccaaccgcacagctgcagcccagtcggggcgtagacgggtcggcctgcgcaacgcgctgcggcgcaagtcgatgtccgcgttcctgatgacgctgccgttgatcctgctgatcgccgtgctggtgatctatccggcgatctattcgctgcatctggcgacgctgaacaaggcgatgacgaagttcgtcggcttcggcaatttcgagttcctgttcaagcgcgacactttctggctggtggtcaagcaatcctgcattttcgcgatctccgcggtgatcttcaaagcgctgatcggcttcatcgtcgcgcattttgtgcacaacgtgcccgccaacaagcagcgcaaatggcgcggcatgctgctggtgccgtgggtgatcccgccggcgatgagtacgctggcctggctgtggctgttcgacccgtcctacagcgcgttcaactatacgctctccatcttcggcatcgggccgatcccgtggaccggcgacgcaatgtgggcgcggttctcggtgatcctggtcaatgtctggtacggcgcgccgttcttcatgatcatgtatctggcggcgctgaaatcggtacccgagcagctctatgaggcggcggcaatcgacggcgccaattggtggcagcgcatctggtacgtgaccctgccgatgatgcgcaacatcatcgcgatcacgacgctcttctcgctgatcgtgaccttcgccaatttcgacatcgtccgcatcctgaccgcgggcggcccgctcgaccacacccacatcttcgcaacctgggcgttccgcgtcggcatcgagggcagcgacattccgctcggcgccagcgtctcgctgttcatggtgccgatcctcgctgtcgcggcgatcttcatcctgcgcgacatcaccaaacgcggcaacgaatcctgatgagcaccgtgacgatcgacaaggcgggaccgacgcgcaaggtgaaatacggcagcatgagccgtgaccggacctgggcgctgcgctggtcctatttcttcctgacgctgtttgcgatcttctcgctgacaccgccattctacatgctgatcacgtcgctgaagggtagcgcggagatttcagcggcgaccaatccgtggtgggtgcatcaacccacactcgaaaactacgtccagctgctgacctcgaaccagttcctgcgcttcttctggaattcggcctgggtctcgatcatcgtcgtcaccatcacgatgctgatcagcgtgccggccgcctttgcgctggcgcggatgaaattctggggctcggcgacgctcgcgaccggcgtgttcctcacctatctcatcccggacagcctgctgttcatcccgctgttcaagatgttcgccgtgttcggcgactggactggcatccagctcgtcaatcgctggtacgtgctgctgttcatctatccgacgctgacggtgccgttctgcacctggatcatgatcggctatttcgcctcgatcccgaaggagctcgacgaagccgcgatcatcgatggcgcgagctggttccagacgctgacccggatcttcatcccggtcgccctgccaggcctgatcgcggccacgatctttgccttcacggtttcctgggcccagttcctctatccgctggtgttcacgacctcgacggatcagctcgtactgccggtcggcatcatcaccaccttgatcaaaggcgacgtcttcaactggggacagatcatgaccggcgccctgctcggcgccgcgccgccgctgatcatctacgctttcctgatggactactacattgccggcctgaccgccggtgcgacgaagggttgaacgcgacaagggtaggaattcatggccgacgtcagtttgcgcaaggtggtgaagcgttacgacgaggtcgaggcggtgcgcggcatcgacctcgatatcgccgaccatgagttcgtggtgctggtgggcccaagcggctgcggcaagtcgacgaccttgcggatgatcgccggcctcgaggacatttccgacggcgacatcatgatcggcggcgatgtcgtcaacgacgtgccgccgaaggaccgcgacatcgcgatggtgttccagaattacgcactctatccgcatatgaccgttgccgagaacatgtccaacctcgacgccaagctgcgcgtgcagatgcggatcgagatcaagaaggtgcatcagaaggtccgcaccacgaccgtctacgtcacccac

SEQ ID NO: 73 - DNA, 12247 bp, Bradyrhizobium enterica
cgtattgggtgatggtgtcgccgtcgggatccgaggccgtgaacagggtcgtggccagcgtcgacgtctcgccatgggtcgccgtcacgttcgccgccgacacatcgatctcggtgttggctgcctgcgcgacaccattcaccgtccagtggccattgccgccggtgtcccagaacgcgtacgtggtgatggcgtcgtggtcggcatccgtggctgtgaacaggctcgtggcgagcgccgatgcctctccatggattgctgtcacgttcggcgccgtcacaaccggagcctggtcaggccccggcgtcgccgtgaatccggtccaggcgccccacagcattccgtcgttcgctcttatgtacagcgtatcgggcgccgaccctgtcggcccgaagacatagctcacctgcgacaggttcgccgccaacacatcgatctcggtgtttgccagctcggtgatgccgttcaccacccagtggccgttaccgcccgtgtcccagaacgcgaactgggtgatcgattgcccaacatccggatcggtcactgtgaacagggtcgatgccgcaaccgacgtttggccgtgcgccgcagtgacgttgctgttgttggcgatcacggtcggcggcgtatcgacaaacgccttggccgtgaattgagtccagccgccccaggccgtgccgtcattggcccgtacgaacagcgtatcggtcgaaccgctcggaccgaacacgtagctcacctgcgacaggttcgccgcgggaacatcgatctcctggttggtagcctgggtgacgccgttgatagcccagtgtccgttaccttgcgtgtcccagaacgcatattgggtgatgacatcgccatcggcgtccgagacgctgaagagggcggaggacagcacggagctctcaccaaggattgccgtgacattggctgccgtcgtaaccggcgggttatctgcatgcgtcgtgaccagagtgccggtaccgcccgtgtccacgctgacgctgaaccgcacagcgggtgtctgatcgagctgcagactgtaggaagaaccaccctccgtgacccgcaggacattgcccgggagcaaggtcgccgagccgccggaagagaaagtgacgccggccagatcgatgctgtcgcccagcaccagcccgctgatcgtagtggtcggcatcgacgtgccgtcaatcttgagctgcccgccggaaccgctgaaggtgatgccgccgctcgcgacgcttcccgcctgcaattcaacctggccgccggcaatcgtgacaggccccgtggagccgcccgacgataccagctcgatacctccggcgaacaccccgatgttgttcgtcaccgcgccggcaacattgagcacaccgccgctcgaaacaccgacgaacgccgctgaaccaccggccagaacgttcaagataccgccggcggagacgccggtgcccgagccgatcgcgccggaaatgagaccgcccgacagcacgttctcgacgccgccggcgcggaccccgaccatgctgagcgtcgtgccggccacgttgaagatgccgccgctcgacacgccgacatagctggccgaaccgcctgccgatacgttgaccgtaccgcccgaaatgccggtgccggaaccgctcgcgccggaaatcgatccgcccgacaacacgttctcgatgccgccgctgtagacggctgtgttgctgagcacctggcctgcaacattgaaggtgccgccgctcgacacaccgatgtgaacagccgacccgccggccgaaacgttcaggatgcctccggaggcaactccggttcccgagctcgtgacaccggagatcagtccgccggacaggacgttctcgacgccggtgtccgtgacgtacgtgttgctggtgatcgtgcctgcaacattcatggtgacgccactcgacaccgtaatgttgtgcgccgtaccaccggcggagacgttcagaacgccaccgttccaggccgtcacgtaagcaagcgaaccgcctgacgacacgttgagtgtgccgccggaaatggcggtccccgagcccgacgcgcctccgacaacgccacccgcgaggacgttctcgatggcgccggaagatacggtcacgttgctgagcacggtgcccgccacgttgaacgtgccgccgctcgaaacggtcaggaaggccccggtaccaccggccagaacattcacggtgccggcagcggaaatgagagtccccgagccgaacgtgccggagatcaatccaccggacagcacgttctcgacaccgccgctcgagaccgtcacgttgctggtcatggtgccggcaacgttgagcgtgccgctcgacaccaccacgttgtgcgccgtgcccccggcggacacattcatcgtgccgctcgaaacggtcagatgatccagtgctccgcccgcaaacacattgacggtgccgccggacacacctgtcccagagccgggcacgccagtaacaacaccaccggagaggacattctcaacaccgccgctaacgacgctcacattgctgagcaccgtgcccgcaacgttgaagatgccgccgctagacacgccgacgaatgccgccgagccgccggccaacacgttgagcgtaccgcccgaaactcccgttccagacccgatcgccccggagatagatccgcctgacgacacgttctcgacgccgccgctgtaaacggcggcattactcagcacattgccgaagacgttgaatgtgccgccgctcgacacaccaacatgcgtagccgaaccgccggccagcaagttcaacacgcctccggcggagacgccggttccggaactcgtggctccggaaatcagcccgcctgacagcacgttctcgacaccgccgctggcgacgccgccctcgctgacgaccgtgcccgcgacgttcagggtgccgccactatacgccttgatgaaagcggccgaaccgcccgccgacacattgacagtgccgcccgaaattcccgttccggagccgaacgtgcccgagatgaatccgccggacaggacgttctcgacaccgccgccgaagaccgccgtgttgctggtcatcatgcccgcgacattcaaggtgccgccgctcgacaccaggacggcgtgcgccgtaccgccggcggagacgttgagcacaccgccgttgctgacaacggcgttttgctcggctccgaagacattctcggtgccaccactgagtacggtgccgaccgtcgttccgccggacaggacgttgagcgtctgaccgctgctgatgaccagccccacgtcggtctggccgctgctcacggtgatgttgccgctgccaccgctgctggtgaagaggaagatgtcggtgccggtggcatcgcccgcgcggccgaacggattggtaaaggtctggctcgggtccagctgaagcgtcagcgtgccgttatcggtggtcgctatctgaagaacgttgttcgcgccgaggcccacgctggtgacgtgcgaagcgctctcgctggtaaggttgatcgtgtcgccgacgacgaagccggagatggtggctccgggcatcgtggtgccatcaatctccagcttgccgccattgcccgagaacccggtcccaccggaaacgccaggcccggagaagtcaaactcgccggcggagccgccaacctggagctcgaccgtgccgccccagacgccgatgctgcccgccgatccggcaacattggcgatgccaccggaaaatacatcgaaacgcgtcgccgagccgcctgcctggagattgagcgtaccgtaatcgcccgtgaacgtgccgcccgaccctgagatcaagccgcccgacaacacgttctcgacgccaccgctcgagatcacactattgctgagaatgacgccggccacattcgccgtgccgccgctgttcacgcccacaaaggctcccgacccgccggcagagatgttcagggtgcctcccgcataaacccccgtgcccgaatgcggggcgccactgatgaagccgcccgaaaggacgttctcgacgcctcccgaaataccgacggtgctcagcgtttcgccggcgacgttcaggacaccgccgccatagaccgcgataaaagccgcggaaccaccggccaggacgttctccacgccacctgaaaaaacgccggtgcccgaaccgataccaccgctggtagagccgcccgacgatatgttcagcacgccgccgccgccgacgcggatatgatccaccacgccgccggccagcacgttgacagtgccgttgtcgctgttgaaaacgcctgtgctgccgctgccggtgccgctcatcgcgccgccggcgctgatcgtcgcgctgccgccgctcgaaatcgtggtcgcggctgcgtagccgccggaatcgaccaggagctgaccaccgctgctcagcgtcgtcgagaccgccgagcctccgttgaggacttcgagcgtgttgccgcccgtttcgatcaaacctgagctggtaacacccgagcttacgaaagtggtgctcatggcagcgcgcccccccaatgaaaaaggctagtcagttcttgaaaaaatcggctagagcttgaatccgggaatagtcctgatcaccgatttgacgtgatccaccgtgatcagccttgtgcactcgaactgacgcggcgtccccttgtggcggggacaccagaagaaatccttgtggtcgaagcgaactgccggatcgttccagcagctgttgcaggcgtgatagttgacgacgcgatagggcgtagcaaattcgtttgtcggatgcgtgaagcccgagatcatgaccaccggcgtgccgaccgcccaggccagccacgcaagtccgctcgatagaccgacaaaaaattccgcgtgcttgatgagattcgcgcgctcctgaatcggccggtcaccggtccagtcctccgcgccgttcggaatgtgattccataccagttcgtgaccgtgcgtcggcttctgatcgatgcagatcacgcgatagccggcctctttgagaaaactggtcagctcacgccagccgttggggttattccagtacttgcattgcgtggtactctgtaccgcgatgcagacgtaaggctcggggatcggcctttggtcatcggccagcgagatgcgcggcgcgacttcagtcggatcgacgccgaggatatatccggcggtccggtgcagtccgacaaagcggaagtcgcatggttgatagacgaagttcttgtcgtcgaaaaacaatccgacgctgtaggtggcgtagtagcggtcggtttgaatctcctcgtgcgtgacgaagttgatgtcggggtacgcatcccgaaacagcggaatcaacttttccgccattgcacaggtcagcctgcaattgtgagcttccctgaacttcgccacatagggaaaccagccgatcgtatctcccagcgtcccgatcggaagctggatcaaaacgtgacgatccgtcgcgttgtactcgtgcgagaagacgacatcatcgccctgcaagacttcgatgcggaagcgaatgtagtagcgctttgagctgttgacgcgaccgcccgcgaactgcgtctcgaagagaaggttgccggtctcggcgtcccagagccgcacgcgccatgggatttctccctggggacaaaacacccgggcgccgtcgttgaagtcgaagcgcagccccttcggacccaattgggtcggctgttcggctgcagggggataggcaggcttcggcgcgtcggcacccgacgaaacggcttccgacttgcccgatatagcgctcgtcgaacgatcgacgattattttgggttggtcggtgacatcgtcaatcgagcgcttcagcccaatcgccggcgcaacggcaatggcattcacgaaatatcccctgccctgaaataataaacagcctcttaaaaagtgcatggaaggtaagcgagattgacaaccgcgtcaacggacgaaaaccttagcgggtaccccttcgcagccgttccttaacggcatacacaaagaaacacaccacgatgagccgcactcccagcaagatcccgtttgtgatcgcagcatcggcgcatggcccgctgatcgtcaaccggctggactatcacacggcgggcggccacacttttggagtcgggattcagattctcgagcatggcgcgttcgacgtcactgaaatcgagctgacgaagggtcttcttgcactgcgaagaacctaccggggcgatggcgtggtcgcgatcgactgcggggcgaacatcggtgttcacaccatcgaatggtccaagcacatggacggctggggctcggtcgttgccatcgaggcgcaggaacgggtctactacgcgcttgccggcaatatcgccgtcaacaactgcttcaatgcgcgggcgatgcacgcggtgatttcgtcggaaaccgggaaaacttgggtgccgactctcagtcatcaagagcccgccagtttcggcagcctggagataacgcaacgctccgccacggagcagatcggtcagaagatcgattattcagcggccagcggcaccgaaacggcgatggtcaccctggactccctgaatttgagccgctgtgacctgatcaagatcgacgtcgaagggatggagttgaaggtgctggagggggccagcgtcacgatccggcagcatcaccccatcattcatgcggaattcatcaagaccgacaaggccgcactcgttcacaagctgaacgatcaaggataccggacatacgacgccggccaaaactgccttgcgatccatgaatccgatccaagcctgagccacgtggaagcccgaaccacgtcgtgactgcctgacttgctgcactccatcaccgctctcgcagagcatcctgccggtagcgcacgatcggcgacagcaaatagctcatgatgctgcgggcgcccgtcctgatttcgacggtgacggtcattcccggcgaaagattgatctccttgtcatcgacgaccatcttggtccggtcgatcgagacatgcgcgatatagaccggcccctgtccctttggctcgctgctgctcccctccgtcgctgcgccattgggctcgcgggcggaatcccgcgccttgtcgcgggagacggaatcgggcgagacgctgacgatcttgccgtgcagcaggccgtaacgcgtgaagttgaaggtatcgaccttgatttcggcgtcctggcccgggtgcacaaagccgatatcgcgatttgagaccatcgcttcgatttcaatcagattgtcgctcggcacgaccaccgcaagcgtctgggccggcgtgacgacaccgccgacagtgtgcacggccaattgctgcaccacgccgtcgatcggcgccgcgagcttctgaaggttggtccggtgctcggctttggacacctcgtccttgaggctgccggccttctgcgtcgccttggccagatcgtcgtacaggcggtggcggtactccgagacaagcttggcgcgcgtctcatcgagtgcggccacggctgcgtcggcttcctggagcttgctccgctgcaccaggatgtcctgctgcatcccgaccagttcctgaagctcctgcaaatattgcagctttgagccgtactcccggtccgccagatacttgcgaacgctgacgcgctcctgcagcaccggcagcagagcttcgatcttggcgatgctggcgtcgatcgtcttggtctccgccaccttctgcacccgctgccgatccagctcggacaatttggcgcgctgctcggaatcctgacttcgcaggtattccatgtgcatttggaccagggcgggcggcgcgtcgtccggcgcgccgtcaagcccgctcgtgtttccatcaagcgcggaacgcgtgcgtgcgatgtccagcaatgcggcgagaagatcgtttttctggtgctgaagctccgcctggttgctggtcggatccagctcgatcagaatctcgccggccttgacggtttggccgtcgcggacgtgaatcgcccgcaccaccccgatctcgagcggctggaccagcttgacgcggtcgcccggcacgatcttgccgggggcggaggccacgatgtcgatcttgccgaggccggcccaggccacggcgcaacagaacagggcagccagcaagacggcagtcagcctggcagtgggcgatggcggcgtctcgacgatttcgagggcggccggcaggaaagccagctcgtcccgggttttgcgcccggccgcaggcgcttcacgagccgacttcatggatccccgcctgcaaccggtaaagcgacgcgtatcttccgcccgagctcagcagctcctcgtgggacccctgttcaaccagcctgccgcgatcgatggtgatgattcgatcagtacgccgcacggcggacagccgatgcgcaatgacaaagaccgttcgccccttcacgatccggttcatattgtcctgaatgactcgttcgctttcgtagtccagcgaactggtcgcttcgtcgaagatcaggatgcgcggatcggtgatcagggcgcgcgcgatcgcgatgcgctgccgttgccctcccgacagactggagccgcgctcgcccacgacggtgtcgtagccttcggggagctcaagaatgaattcgtgggctcccgcaagctgggccgcggcgatcacctgctgcatcggagcggccgggtcggcgagcgcgatgttttcccggacgctgcgattgaacagcacgttttcctgcagcacgacgccgacctggcggcgcagccacgccggatcgaccatcgcaaggtcgacgccgtcgacgaggaccctgcccttctccggaacgtaaaggcgctgaacgagcttcgtgaaggtgctcttgcctgaaccggacgggccgacgatgccgacgacctggccggctggaatgttgatgttgatctcgtgcagcacctcgggtccatccactcgataccggaaggacacgtgctcgagcgtgacctgccccttgatggggggcggcacggcgcgaccggggttgaacgtctgctccgccggcgtgttcaggatatcgccgagccgcgcgatcgagagcctggcctgatggaagtcctgccagagctgcgccagcctcagaaccggcgcgctgacgcgtgacgcgaacatgttgaaggcgatcagctcgccgaccgtgaggctgccgtcgatcaccagtttggcgccggcataaaggatcaccgcggtgacgagcttgctcacgaactggaccgactggctcgcaacattggcgaggctgagcacacggaaactcgccgccacgtattcggcaagctgctcctcccagcggcgctgcatctgcggctcgagcgccatcgccttgatggtttcgaccccggtcacgctctcgaccagaaacgcctggttctcggccccgcgctcgaatttggtgtccagccgctgacggaacagcggcgtcgcgccggcggagatgccgacatagagcgggaaggatccgagcacgatccaggtcaggatcggcgagtagacgaacatcaccgcgatgaagacgacggtgaagaacaggtcgatcacgaccgtcagggccgagccggtcaggaagttgcggatgttctcgagctcgcggacccgcgcaaccgaatcgccgacccggcgagcctgaaaataggcaatgggcagtccgatcaggtgccgaaacaagcgggcccccagttcgacatcgatcctgttcgtcacatgggagaacaggtaggtcctcaatattgcgagggccgtctcgaaaaccgcgatgccgatcaagcctacgacgagcacatcgagtgtgctgagtgtgtgattgaccaggaccttgtcgatcaccacctgaaagaacagcggcgacaccagcgcaaacagctgcaggaaaaaagaggcgatcagcacctccacgaaatggtaccgatatttgtggatcgctcccagaaaccatgacaggtcgaagcggcgtgcaagattgaccagccccgcccggcggctcaccaggatcaactggccggtccacactgcctccagatcagcccgcgttatcaactccgggcgctccgacagcggcgattgaacgaggatcttgtcggcgcccaccttggcaaggatcaaatgaccaccgtcgcgcaacaacgcgatggcgggaagcggcgccttctccagccttagccagttggtggtcacctcccgggccttgacgccggtcgagcgcgcgtggcgcagcatctccggcgttccgaacgggccattgccgacttgatgacgaatctggtcgacatcggccgcgatgccgtgaaaacgcagcagcatcgcgagtgcaacgatcccgctgtctgctgccgtaccactccgcgtttcaatcatctcacgatttaatctgctcagtagctgaaaatgactgccgtcgaacgcgagccgacactgtcgtgagcgcgccccctgccctttcggcctcgccgtcagcgcaagctgactattcgtaacgaaccggtagagcagcagatgaatatgacggccagagtactatggctctccggcgagatgcaattggcgttgtccgcgaccaagcagaattcgcgaacaacatcatgccgatcccagaatcgatcgttggaaccgttcgcagccgaagcaggctccgtagtcttacgggtcgccgtgcttgatatcgcctccaacggggtcacccggatgagctcgtcggccgttcggtgcaatagagagcatgcctttctggtcttgcaggatacagaaatgactggtcacatgaatattaattattattggtacgctaccatagattgaaggctcgaccaatatgacttggaattattccgtaacgttgaatgattcttcgagcgcaggcggatcggccgaggcctctctcgtttacgatctcgagcaggccctcaatgtctggcagcgatacatcctgggcaatggcaccctggtggtgcagctcaacatcctgcccaccaccgttggccgcgccgatggcgggcctacctcgagctacaacgtcggcacaaacggcgggctcgcggtgtatgagccgtcaagccagtacgagctgaccaccggacagcatgtcgccggcaccacaagcgacatcaccatcaacatcgatcccggctacttccaatatatcgacatggattatggcctgacctacgccagtcaggtgcccgcaaacgtgatcaatccgatcgacgtttttcttcatgagctcatgcacggcttcggcatgacgggctggtacaaccagagcggccagctgcccggcgcctacgaatcgacgttcgacaccctgatccaaaagagcggcatgggcgcctacttcgtcggcgcgaatgccgaggccgcctacggtggcccggtgcccctgaccacgaacagcaccacccagaactactaccatttcggcaaccagcaatccgacctctacgccaccccgtcgacggtcaaggacccgctcacgctggacttgatgaacgggatcgttttcttctccgattaccagtacgcgatctccaacctggacatcggaattctgaaggatctcggatacagcatccggacgacaccggtcgtgacggccggcgatcaggccgcgggccgaaatcaggttttcgcggcctcatcgctgttctcggtgaacatggccgccggcgattccgttaccgaatattccttttgggacagcaacggcaacggtcactggacggtgggaggaacagtccagggcaccaagaccgagatcgacatcagcgcgtcgcagctggcgcaaacgagctatcaggctggacccggcgccgacactttgtgggtaagagccttcgacggctatttgtggagcgactggaaatcctttgtgatctcgccggccgatcacgcgccggtggtcacggcggcgaacgtcaccgttccatacacgcaactcgcggcgaccggttcgtccctgttctccgccagcgactcagacggcgacacgatcaccaaatatgggctgtgggacaccgagggtcacgggtactggatgatcggcggcgttgcgcaagccaccgacgccgagatcgacgtctcggcggccagcctctcacaggtgagctatgtattcggaacggccccggacacgctctgggtccgggcctatgatggatatctctggggagcatgggtcccgttcacggccacgc

SEQ ID NO: 74 - DNA, 11929 bp, Bradyrhizobium enterica
gctgaggtcgaccaggcccacctccgccaaggccgcaagatgttcggcgagcagccgatcgagcagatcggcgcatccgacccggaagtccgccagcgtatggtagttcaccgagaccccgccacacagccagcgatagacatcgtggctctcgcacagccgctccagggcgcgagcgcttcctaccccgtcgctggtcgcatagagccacagtgccagcaaaagccgtggcgacgtcgccggatgacccggcctctcgccccgcgccttgatccgatcttcaagctcgcgcagctcgagcccgtcgacatagcaccagatcacccgcgccggatgatcttccccgatcaggctatcgatatccaccgcccgcagttcaatctgatcgcgctgcggctcgcgcagacgcggcaaacccgctggcgccgcatcagtttgcggcttcggctgctccggcagttctccaaacagctggtcttcagccatctcccgctctcccgcaattcagcgattgcagggaatcacatcccccatccctcccgctacatctttcgcccaagccacaaaaattcacacgctctgaggagccgcgaagcggcgtctcgaagggtcggcggcctggctagcggccgtgcatccttcgagacgcgctgcgcgctcctccagcgacaaaggcgaagcctttgcgcggggatgacggatcaggcagctgtgtttggcctactcgatatcgatcgagatgcccgacagcttccacgcgccgtcggaggggatgaagccgagctgatacttcacttgcttcggcgtggtgtcgaaatggcccttcagccgcagcacgcccttgtcgtcgatcttggcgtcctcatcgagcacgatcggcttggcgaccacggcgtcgaacacggcgtgcttgtcgaccagatccttgaagatggtctgcagcttgtcgggcggaaactggtcgcggaacggcttcgatatcttggcgtggaacacggtgaaattgttcgcggccaccgcatcgttgagcgacaccaggatgcttttgatcagcacctcctggacgaacgggctcggcatatccagcgccgcggcggggcgtattgcgcagaacaggagcaggccggcggcggtgacgatcgaccggaaacgtggccagcaagggatcatcaatggccccatatcaatgcgcggcgatgcgatccgtcatttgcctgctcatccaccgagcaggtccatcgccggatggtccgtttctcttaacggaaaaccatggcgtcgtcttgagccaagcgcgcgctagcgcggcttttccccgggggcgttcgcatggatcgccagcgcatgcaccgagccggcaagttcctgcgccagcgccgcatttatcatgcgatggcgttcgatccggctcttcccttcgaaggccggagacacaatatataccctgaaatgcgtctccccgcctgggctgtggccggcgtggccctcatgcagatgtgactcatcgacgacgtcgaggctttcgggcaagaaagcttcacgcaacttgtttatgatagcgtctttggtgctcatggcggcggagttaggttcgcgacggcttttcgtcaatggtgctaacgggaaacgaggtctgcgcaatgtcaagacttgaagatttgtgcattgcgtagtcaaagagatcatgccgatcgattcatcaaaattcttcgactccattcgcatcaagccgaccaaggtgagtgcgaagcgccaggcgcaggccggcgagcaggctgtgacctgcgagtgggcgggttgccagaacaagggcgcgcaccgcgccccgaagggccgcgagaattcgcgcgagtattggcacttctgtctcgatcacgtccgcgagtacaaccagtcctataatttcttccagggcatgaatcctgacgacgtcgcgcgctatcagaaggatgcgctgaccggtcaccgtccgacctggaagatgggcgccaacaacggcaagaaggagagcggtctcgatgccgcctccgatccgttccacgtgttctccgagctcaacggccgcggccgttggcgccccgggccgggcggtgcggagccgaagcccgagacccgcaaggtgatgaacgccgagcgcaaggcgctgctggtgatggggctcggtgccggggcgacgctggaagacgtcaagtcgaagtacaaggcgctggtcaagcagcaccaccccgacgccaatggcggcgaccgctccaccgaggatcgcctgatcgagatcatcaaggcgtataattacctgaagaccgtggtgcgcgaggcgtaagcgctctccatcgtcgtccctgcgaaagcagggacccataaccaccagcggtcatagttcgcgcgagacgtttgccagattgccccattgaagggccgcggcgtatgggtccctgctcccgtgcgcaattgcgcacgacggcagagtttttggctccgccgcgtctgcctcttgcggtcccgattctctcaacccttcggcaccgccccgacataggacgagctcggccggatcagccggccggtgcggcgctgctcaagggcgtgcgcggtccagccggcggcgcgggccaccgcgaagattggcgtgaaggcctgccgcgggatccccagcccatcgagcaggatcgcggtgaagaactcgacattggtctcgagcggccgctccggattcttcttgcgcagcgcttcgcggatataggcctcgacctcgccggcaaacggcaggtcggcgccgctggcctcgaggcgctcgatcgcgactttcagcacgtcggcgcgcgggtcgcgcacccgatagacgcgatggccgaatcccatcagccgctcgccatgcgccagcgcgccgtcgacccagggcttgatgcgttcgcgcgtgccgatcgcatccagcatctcgagcaccggctccggcgcgccgccatgcagcgggccggtcagcgcgcaatagccgccggtgatggccgcgaacagatcggcctgggtcgatgcgatcacccgggtcgtgaaggtcgaggcattcatgccgtgatcgcagaccgtgacgagataggcgtcgagcgccgcgacctcgcgcggcgcagccttgcggcccagcagcatatgcagcgtgtcggcggcgtggctgacattgggatccggcgcgatcggatcatgtcccttggcttgctggaccagggcgccggcgatcaccgggaaggcgccgacaatggtcgcctcgtgctccagcccgttctcgccgcgcagcccggcgatggcggcccggaagccgtcgacaacagacatgccgcgggttgccggcagcaggtccggcagccgcgcgaaggcgcgttcgcgggcggcacctaagctggcgcggacattggcttcgctcagcgacttgccggtggcgccgttccaaagccgcgcggtgacgccctcgaagctcgacttgccggcgaggctcgcgacgtgctcgccggcgatgatgagttcgccgcgctcgccgtcgacatggctcaacacggtctcggcggcgggaacgccgtccagaccgatctggctcttggtgagaatcatattcatggcccgatctccttgcttcaccgcttcaaggtcgggccactcgacgagttgatcaatcttgattatataaatcaatatgaaaaaatccgacgagctttacctctccgcccgcgaggccgccgccgagctcgcgatctcgccggcgaccctctacgcctatgtcagccgcggcctgatccgctccgagccgtcgccggattcgcgcagccaccgctaccgcgccgaggacatcagggggttgaaggagcgccgcgtgccgtcgccggagccgcgcggcttccgcaatttcgatgccgacttgccggtgatggattcggcgatcgcgacgatcaccgagcaggggccgatctaccgcggcgtcaactgcgtcgatctctccctgcgcgacacgctggagcacaccgcgacgctgctgtgggatgtcaccggcgtcgatccgttcgcgccggataattgcccgcatgtctccgatgaaatgcgcgcgatcgccgaggccgcgcgccgcgcccagccgatcgaccgcacggtcgcggtactggcgctggcggcgagcgccgatcccggcgccttcacgcgcgcgcccgatggccgcgcgatggtcggcgggcgcatcttgcggttgctggtcgcgaccatgctgaacgcagtgccgtcggccgagccgctgcacgagcaggtggcgcaggcgtgggcgcccgacaataagcacgcgccggacttgattcgccgcgcgctggtgctgctcgccgatcacgaattgaatgcatcgaccttcaccgcgcgctgcgcggcatcgaccgggctcaatctgtacgatgccgtgatcgcagggctcgtcgcgctgaagggcccgatgcatggcggcgccggcgtgctggcctcgcgcctcgtcaagacgatgatcgacaatgacgttgcgcctgtggtgcgcgagcgggtcgcactcggcgaacgcttcgccggcttcggccacggcgtctacaagaagggcgatccgcgcgcgatctcgctgctggaggcgctgacgcgggccggcgcgccgcgcaaattcacccgggaagtgccagatcgaatcgcggaggcaaccggcgagttcgtcaacatcgattacgcgctggcggtgctggtgcatgcattgcggatgcccgcaggcagcgagcttgcgctgttcgcgatggcgcgcagcgtcggttgggtcgcgcatgccagcgagcagcttcaactcggcaagctgatcaggccccgtgcgcgttatgtcggcccggctcctgggcgggccggttcgaccaacagcatttaggtcttattctgccggcttggacggttcgatcaggccgccgccatggcggcggcggatggtccagacggccagcatcaggatgacggcgccgcccgccaccgcgaacatccacagatgcttgccgacatgttgatgatgcggcaggccggcatagtcgtgcagcgcagtgaccgcgaggaccccgggcagcacatgcgccggcgcccagagcaggatggcggggatgttgatcgcgtagaagcgcgccggcggcatgtcgagcgcgccggcggtgatcggcacgaaggcacgaatcggcggcacgaagcgggcgaagaacaccgcgagcacgccccagcggttgaagaaggcctcgctctgcgcgaccacgcgcggataattggagagcggccaggcggagaggatctcgcgttggctgcgatagccgatcaggtaggcggtgccgtcgccgagcattgcgccgcaggccgccgcggcgagcaccggccacagcttcaattcgccgcccgggaccagcgcgctcagcgccaggatgatagtcgagcccggcaccagcgagccgaccaccggaacggcttccagcagggcggccagaaacagcgtcagataggcgagccaggcatgcgccgaaacgaacgcgatcaaggggtcaaggaatgaagtcacagaagcccatgggtggcagtgaaataggtccgagagctaacaactccccgcggggctgaaaagtgcctggcccgacaggccgccgtggcgctgcggcaaaagtacggcgggatttgcagagcagccttccaaaaaccgggtttcgcgcctatcttgatgatacaacaacggaactttgatttgcccgtgggcttctgccggccgatgctctctgctaggcttgtgcgtagcaccccatccgcagccaaatgacctacaatctggtttcgggaatgcccgggacctcggaggatgaatgacgaccgccgtccagaccaaagagcaacaacccgtcggcttgcccgacatgaaggtttcggttcggcaggtcttcgggatcgatagcgatctggaagttcccgcctattccgaagtcgatccgcacgtgccggaagtcgacagcgactatcgcttcgaccgcgccaccacgcttgcgatcctcgccggctttgccaagaaccgccgcgtgatggtcaccggctatcacggcaccggcaagtccacccacatcgagcaggtcgcggcccgactcaactggccgtgtgtgcgcgtcaacctcgacagccatatcagccgtatcgatctcgtcggcaaggacgccatcgtggtcaaggacggcaagcaggtcaccgaattccgcgacggcatcctgccctgggcgctgcagcacaacatcgcgctggtgttcgacgaatacgacgccggccgccccgacgtgatgttcgtgatccagcgcgtgctggaagtctccggccgcctgacgctgctcgaccagaacaaggtgatcaagccgcatccggcgttccgcctgttctcgaccgccaacacggtcggcctcggcgacacctcgggcctctatcacggcacccagcagatcaaccagggccagatggaccgctggtcgatcgtcacgacgctgaactacctcgcccatgacgaggaagtggagatcgtgctggccaaggcgaagcactatcgcacgcaggaaggccgcgacatcgtcaacaagatggtgcgcctcgccgatctcacccgtaacgcgttcgccaatggcgacctgtcgacggtgatgagcccgcgcacggtgatcacctgggccgagaacgccgatatcttcaacgacatcggcttcgcgttccgcgtcaccttcctcaacaagtgtgacgagctggagcggccgctggtcgccgagttctaccagcgctgcttcaacgtcgagttgccggaatcctcggtcaacgtggcgctcagctagtccatgccgaaaatctccgtcgagcgcacagtcacacagacgaagaaagcggtgctcggcggactgctccgctacaacaacgagaagatggggaagcagaagtacaagcgcttcgccatctcgctgcgacagggcgacgagatcgtcggcggcgtcgtcggcgaggtctggaccgcggtgttgttcatccagctgttctggatggagcagaagtttcgcaacaagggctttggcgcgaagctgatcaaggcgatcgaagacgaggcgcggcgcttcggagccacgcaatcctatctggatacgatgagcttccaggcgccgggtttctaccgcgccaatggatataaagagttcggttcgattgaggggtatcccggcggcgtcacgcgccactggtttacgaaatcgctatgacaacctccaatatcaaattccgtcccggttcgaaggaagcgccgaccgagccgttcaagcgctcggtgtcggcctgcctgaaggcgatcgccaagaagccggagctcgagatctcgttcgcggccgagcggccgggccttgcgccaggcaaggcgcggctgccggagccggcgcgcaagatgaccaagcgcgatgcggcgatcgtgcgcggccacgccgattcgatcgcgctcaagatcgcctgtcacgatcccaaggtgcaccgcaagctgatgccgggcaatccgcaggcgcgcggcgtgttcgaggcggtcgagcaggcacgcgtcgaggcgatcggctcgcgccggatggccggcgttgcgaagaacctcaccgcgatgctggacgatcatttccatcgcggcaagtatgacgagatcaccgaccgcgccgatgcgccgctgtcggatgcgctggcgatgctggtgcgcgagcgcctcaccggcatggcgccgcccgcggccgccaagaagatggtcgatctctggcgtccgacgctggaggacaagatcggctcgcggctcgaccagctcagccgtttcaccgaagaccaggcgaggttcggcgacctcgtccatgacctgctgtcggcgctcgatctcggcgacgaccgcaacatggattccgacgacgacgatgaccaggacgagaaccaggacggcgagaacgatcagtccggcgccgaaggctcgcccgattccgacgccgcgcaggagatgagcgccgaccaggcccagacgtcggcggaagagatgagcgaaagcgcgatggagagcgcgcaggcctcgacgtcggatacgttcgacgacggcgagctcggcgacgacgagacgccgggcgaggcgacgcggccgaattcgcgcggccagaacgaaccgcgcggcccggaatatcacgccttcgcgccgaaattcgacgaggtgatcgccgccgaggatctttgcgaccatgacgaactggagcgcttgcgttcctatctcgacaagcagctcgcgcatctgcagggcatcgtggcgcggcttgccaaccgcctgcagcgccgcctgatggcgcagcagaaccgcgcctgggatttcgatctcgaggaaggcatcctcgatccggcgcggctgtcgcgcgtcgtcaccgatccctatcatccgctgtccttcatgcatgagaaggaggcgaccttccgcgacaccgtggtgacgctgctgctggataactccggctcgatgcgcggccgtccgatcacggttgccgccacctgtgccgacatcctggcgcgcacgctggagcgttgcggcgtcaaggtcgagatcctcggcttcaccacccgcgcctggaagggcgggcagtcgcgcgaggcctggctcgccgccgggaagccggctaaccccggccgcctcaacgatctcaggcacatcatctacaagtcggccgacgcgccgtggcgtcgtgcccggaagaatctcggcctgatgatgcgcgaaggccttctgaaggagaacatcgacggcgaggcgctcgactgggcgcacaagcgcctgctggcgcgtcccgagcaacgccgcatcctgatgatgatctccgacggcgcgccggtcgacgactccacgctgtcggtcaatcccggcaactatctcgagcggcatctgcgccacatcatcgaggagatcgagacccgctcgccggtcgagctgatcgcgatcggcatcgggcacgacgtgacgcgttattatcgccgcgccgtcaccatcgtggatgccgaagagctcggcggtgccatcaccgagaagctcgccgagctgttcagcgagacccatggttcggcacccgcaccgggtacccgccgtcgcctccactcgtgagacatgcgctcacccgttagccgccgccatgtcctgcaagggatggcggcggggctgtcggccacagcagtgccgcgcctcgtgcaggcacagggcgcgagccagccggccctgacgccgggaccgcccggcaggccgggccgtcaccgcgtcgatgaaccggcctcgatcgaggtcaacgcacggccgctgccgtcgttcgacatccgcgatcgtgcgcgcacgcggttcggttcgctggaatatcgcagcggtctcattctgacctcgtcgttcgccggcttcggcggcctctctgcgctcaggcttgacgccaagggcgaacgcttcatcgcggtcagcgaccaaggcacctggttcaccggccgcatcgtctatcgcggccgcgagatggccgggctcgacgatgtcgaggcggcgccgctgctcgacgcccacggcaaaccgatcaccgccacccgcggctggtacgattcggaatcgctcgcgctcgacggctcgatcgcctatgtcggtctcgagcgggtcaaccaggtgctgcgctacgatttctccaagggcttcacgcggtcgcgcggcgaagtggtgccgctgccaccggctgcgcgcaggctgcccaacaataaggggttggaggcgctggtcttcgtgcccagggccttggccaagcctcaaccgcttgcgggcacgctgatcgcgttttcggagcgcgggctcgatgcaagcggcaatctcatggccttcctggtcggcggcaagacgccgggccagttcagcatccggcgcaccgagaatttcgacatcagcgatgcggtgctgctgccgtcgggcgatctgttgatcctggagcggaaattctcctggctcggcggcgtcgggatccgcatccgccggctcgtcctgtccgacatcgcgcccggcgccgtcgtcgatggcccggcgatcttcaacgccgatctcggcaatgagatcgacaacatggaagggatcgacgcccatgtcagcgcggagggtgagaccgtgctgaccatggtttccgacgacaatttctccctgatccagcgcaatctgctgctgcaattcacgctggtggagtgaggcatcgcttcaccttcccctcaagggcagggcgaaccgacgccatatccgcattgctggtctgcgtcccggccggtccgccgctgctgcctgttggtgatcgcagccccgccctctatcttgggcgtgccctttccccgatcccggatatcccgcatgagcaccctgttttccccgatcgaactgcgtggactcaatctcgccaatcgcgtcatggtctcgccgatgtgccagtattcggccgacgacggctccgccaatgattggcacttcacccacatcaacatgctggcgctgtcgggtgccgggatgttctgcatcgaggccacccatgtcgaggatatcgggcggatcacgccaggttgcctcggcctctatagcgacgccaacgaggcggcgctgaagccgatcctcgcctcggtgcgcaagcattccaaggcggcggtcgcgatgcagcttgcccatgccggccgcaaggcttccagccagcgtccgtgggagggcgggcagttgatcccggttgccgacggcggctggcagacggtcgggccgtcggcggtcccgcacaaggacggcgaggctgcaccggtggcgctcgatgatgccggcctgaagcgcattcgcgatgcctttgtcgcggccgccaggcgtgccgaccggctcggcatcgatgcgctcgagctgcatggcgcgcacggttatctgctgcaccagttcctgtcgccaatcgccaacaaacggaccgaccggtatggcggttcgctcgaaaaccgcatgcgcttcccgctggaagtgttcgacgcggtgcgcgcagcattcccggatcataagccgatcggcatgcgggtgtcggcgaccgactgggtcgacggtgcctgggacctcgcgcagaccatcgaatttgccaaggagctgaagaagcgtggcgtcgactggatggatgtgtcttccggcggcgtgtcgccgctgcagaagattccgcttggtccgggctaccaggtgccggcggcgcaggcggtgaaggaagcgaccggcgtcaccacgatggcggtcggcctgatcaccgaagcgaagcaggccgaggagatcgtcgcatcagggaaggccgacatggtcgcgctcgcccgcggcatgctctacgacccacgctggggctggcacgccgccgccgaacttggcggcgaggtaagcgcgccgccgcaatactggcgctcgcagccctccacccagaagacgctgttcggcaagaccacattcggcgcgcggtagcgccatccgggaatcgcgcagcctgcagaattgtcccggatcgcgcgtcgcgccatccgggctagctctgcgcatcgccagggaatgacgatgtgatccattgagccattgtcctgccgcagcccgggcagctactctccgatcgcgtgcggaagacacgcaacgaacaaggagaggaaacccatggaactcggatacttcgcgatgccgtcgcatccgccggagtgcggactgaaagagggccacgattgggacctgcaggtgctgcgctggctcgacgagctcggctaccaggaagcctggatcggcgagcaccacaccgcgccctgggagccgcacccgtcgcccgatctgctggtggcgcaggcactgctgcagaccaagaacatc

SEQ ID NO: 75 - DNA, 10797 bp, Bradyrhizobium enterica
gtatccaattcaggcctccatcggtcgcagagattgcttctctttgacgcttacaagggaattccactgacacacgtcgcgatggcacgcgacacagtacgcgttcgctacgctcggcgctgcgaacgaacttcggatgccatcgcagtcctcgaccgcgaacattccgatgcagcgggattgcccccgaccgcctggacttgattcgttaatgagagagtatggcgaaaaaaatgagctggcatggcgacaattagaagaggccaaccggcggcgccgacgaccacatgcctgccctcatatgcctggcgctaccgctgaaattccgcgattggcgaagaggctccatatcgctcggccggcaccacatcgcagcttcgtcaaattagccggggctgaaaatcatgtggagaagcaacgtacccacgacagcggtccagccgatcgaagcggcaatagcccacacctgtatcggcatcggatgggtcctcgcaatccaatgaagcaaaacgaagaggccgctggcgctgacagcgacctcttagacccgatctaaaataaacgtcttggaaataaaaatcgccgccgaaggtccgacgtcattagacaatgaattcgcaacgcattgaagcccaaacacgtcaggtgcacagcggaactattgagacgttgcgagatcgacacactctctgtgacgaaccagaccgtccgacgcacatcgcaggtcaccacaggcgcgggtggcgctctaaccggtggaaaacgacaacttcccgtcccggaatgaccgccggctcgggtcgccgagcgaatctcgatgtccccttgggccattccacaaaggttgccttcgccagcaattcgcaatttgtcctatttggcgccctcttcgcgccgtcttggcggcccagacacccccttcaggggaatctttacgcacgattaatgcttgggatccaaagttccgggtggggccccgacgagggaaaacgcatgggacaattacgccgacacgttgttctgagggacaccctcgaagcgcgactcgcagagcgggctagagagctgcggaacgaggccgcgggactggccccgtgcgccgccaaggaggcgttgataaggctcgctcgacacgccgaggcaggtgcgcacctaagcggaaagctgtcctcgccgggactgatgcccaattaagcggcggaaaccggcctggaattgccccatcaggcgccgggcgggagctctggcgcccgccgagagcccggggccgatcacagcaccaactcagcgcggtcgtgctaaaggcaatcaagtcgcgtgaagccaccgtaggtaatcagtaagggtccgcacaggggtcgaattccagatataattccgccatccgcctccgccgaggcgacggtcagagacgccatacggcgaggccgccacaaggacgtgtgtgaccaggccggaccacccatcatggcactacttgcgatcaatgcagcacgatccttgttcgtccatcaacgcgcatttgcagccttccggcgttgaacgggaatgagcatgcccgatgcggtcaccgatgtcagcctagaggccctcgagaacgttgcctggcttgagaccgcgtggaaggagcttgaagctcgggccactcactcgttctttttgtcctggctctggatcggcacttggctgcggcatattccggatggcacgcaaccgcacgttctcgtcgcacgatcgtcgggcaagatcgttgggttggcgatcatctgccggcggagagtctggagccttgggccgcatgcgcgggcacgttggctgctcaatgaatccggagatacccgttttgaccgattgttcatcgagtgcaacagtattctcgcggagcaaccggacaccattattccggcaggtctcgacgcgctgacctcccgcttgcgccgcgcggatcagttggtgctttccggaattgatgcagatctcgagttggccgcttgcggcgccgccggccgggccgggctcgtcagcgaggtgaagcaggccgatacggccttatgggttgattacgccaaggcccgtcagcagaagaaggattaccgggccacgctcggccgcagcactcgccaggcggtgagccgtgcaatgaggctgtatgccgaacgaggtccccttgaattccggatcatggagacaacaacggacgccctggctgcgttcgatctactgagcgactttcatcgatcgcgatggggacgcaagggggctttcgccaatccgggctttcgtccgttccatgaggagttaatcgcgcgcggagttcccacaggagcggtccgcatctcgcggacgttggttggcggccagaccatcggggtcgtctacaatttcgtgcatgacggccgcgtcctgaactaccaaagcggctttctctatgagagcgatggccgcctcaagcccgggctggtgagccatgtgctggctatcgaggagagtatctcacgcggggagcgcggctacgacttcctggctggtggcgccgggcacaaggcacatctggcgaatagcgagtatgcgatgaagtgggtcgcaataagcagggacggtccggaacgccatatcgaggcgaagctccgcgaagccaaacggacgctgcgaacgatcgcgacgaacctcccaagaaagaagctgcggctattcggatcagcaaatgcaaattgagctatcggccgctgccgcctgccgaaccaccggacacgcaaactgctcacatggtatcaatggcctgaatgtgcacgcctttcacggcccttccagacggatcatccatactcgcaaactgctgagaccagagaaatgcggtcggcgaggaacacgcgatcgagggaccgacggggacagtcaggcaggctgtcggattcttgaaaatgccgtcgaatatggtccgatagaagtatccttccttcgaggtcggcgtttgcagcggaaaccgcctccccgcctctgcgagcatctgatccgagactttgctctcggcgtgattccgcaagcactcaatccagctgtaccccactccgtctgaaaactgttccttttgacgccacaagatctcctgcggcaacaggtcggcaaaagcttcccgcaatatgcccttttcgatcttcgcaccggggcacattttttcggcagggtcgatcgacattgcgtaatccaggaattccttgtccaggaagggcacacgggcttcgactccccaagcagccgtcgccttgttcgcgcgacagcaatcgtacctgctcagcgcaaagagctttcgaacagtctcctcgtggaattcctctgccgatggcgccatatggaagtagagatacccgccgaatacctcgtcagcgccttcgccagacaacaccatcttgatgcccatcgccttgatcttgcgcgccatcaaatacatcggcgtgccggcacgaatggtggtgacatcgaaggtttccaggtgccggatgacatcgggcaacgcgtccagtccgtcctgtacggtgaaaacaatttcatgatggacggtgtcgatgtgagccgccacctttcgcgcatacatcatgtcgggtgaattttccaaacccacggagaacgagtgcaatcttggccaccaggcctcctcggtctccccagactcgatccgcttgaagcggtgccgtgctgcgagggctgcgatgagggacgagtcgagcccaccagaaataagtaccccgtaaggcacatcgcacatcatctgctgcttgactgcggcttcgagcgaagtccgaagctcgtgcaacaccaccttcctggttggcaatgcatgcgcccattccggatcataccacctgacgaattcgcgggttttgccgttatagtagtgtcccggcgcaaactcctgaatcgtctcgcacacgcgatcgagagctttcatttcgctggcgacgtatgttgcgccgtcctcgctccatccaatataaagcggcactattccgaggtggtctcgggcgacgaagaagtcgccggtacgttcgtcgaagagagcgaacgcaaaaatgccactcagcatattgcacaaggctggtccgtactcgtcatagagatacaggataatctcgcagtccgacttcgttttccaggcgtgcggccggttcagggcgtcgcgcaatgcgacatgattgtagatctctccgttcacagccaacgcccgacccgcggtaacgtcgagaaggggctgggcgccgtgctcaacatcgacgatggaaaggcgttcgtgcgcgagcattgcgcgttcgctggaatagacgccactccagtccggcccgcggtgtctaaccgtctttgccatctccagcgcgcggctgcgtgccgattcaaacgattccgtaaattcgaatatgccgacgaagccgcacaaggtgataacccttccgtatgccggctgatctacgtcacgacaatcagcgctcgccttgaaccgcaatgcctaaacagtgacattgaattcgccagctgaacagcgcacaatccgaagtaaccagaatgcgttgagaggctccgggataggccccgtgttgcgccctcggatcgacggcgggaccggtgcgcgacgggcgcagctgacgaacgtcccggcgtcgagattgttggcggcggcctcgtgccgtgtccgcacgtcaggcgggcgcccaaccgatccagtgatccgctggacggcggatcgggccttgactcgatcatccgcaggccaaagcgcgctacgccagccgttcagcggcgatcccaacagctgttgccttagggctgcgccaccctctgcgctgatgcccgaccgggatcgtgatacgatcgatcccggcctttccaacatcgccttttgggcccgcgtggcgccagttgcggtgctccgagggcgcgccgaagaaagacggcttcctaccgttcccgcagcgcttcctgcttgtatctcgccagcggcgaaagcaggtagctgatgatcctgcgcgtaccggtcttgatctcgaccgtcaccgccatgcccggaccgagcttgacgaccttgtcctccacttgcatgtgagtccggtcgagtgaaacgcgcgcggcatattcgagctcctgacctttcggctcgctgctgctcagcgtggcgcctgacgcgcggtcgttcgacccctgcgtcctgtcgcgcgcaatggcatccgtcgacacgctgagcacgtcaccgtgaagcagtccgtagcgcgtgaagttgaaggtatcgaccttgatctccgccgcctgccccggatggacgaatccgatatcgcggttggagagcatggcctcgatctcgagctggctctcgctcgggaccactactgcgagcgcctgagccggcgtcaccacgccgcccaccgtgtgaacggcaagctgctgcacgacgccatcgacaggcgcggtcaaacgctgcagcttcgtgcgccgatccgccttgaccacctcctgcgccgcgctcgcaaccttctgctcggcctttgcaagtgcatcgtaggtcgcgcggcggtactccgcgacagtcttgtcccttgtttccttcagcagcgccatcgccgcgtcggcttcgcgcaaccggctcttttgcagcacgagatcctgctgcatggcaaccaggtcctgatattcggagaggtagacaaccttggaggccagtgccttttcgacgaggcccttgcggatatcgacccgttcctgcagcacggggattgttgcttccagcttggcaacgcttgccgacgtggttgcccgctccgcctccttctgaccttgctgtcgttcgatttcggaaagcttggcatcttgctcggcgcgctggctgatcaagaactggcgatgcatctcgatctcggcggggctggcgttgggcggagcacggaaggcggcgagcggatcggctgcgagcgcggcctgcaatcgcgcgacctcgagctcggccgcaagcagatcgcctttttggcgctcctgatcggcttccgtcatcgtcgggtcgagttcgatcagaacgtcgccggccttcacggtctggccgtcgcggacctggatggcgcggacaacgcccgtctcgaacggctggatcagcttggtgcgcccgcccggcacgatcttgccggtcgcggtggcgacgatgtcgacactgccaagcgtcgcccataccagcgcgatgcagaacgccgcgatgatggtcgcccctatcgcgcggccgaccggcgacggcggcgtttcagtgatctcaagcgccgccggcaagaacgcgatttcgtgctggcgacggcgaggctcgcgcctcggaaacgagacaacattgcggctagcggaggtcatgaataccggcctggagatagtgaaggttcgcgtaacgcccgttgctgcggatcagttcatcgtggctgccgtcttcgacgatgcggccatgctccagcgtgatgatccggctcgcattgcggaccgtcgacagccgatgagcgatgacgaacacggtccttccggcggaaatccgcctcatgttctgctggatcgcgcgttcactttcgtaatccagtgcgctggtcgcctcgtcgaggatcaggatgcgcggatcggtgatcagtgcgcgcgcgattgcaatacgctggcgctgtccgccagacaggctgctgccgcgctcgcccacgacggtgtcgtaaccctcgggcaattccaggatgaagtcgtgtgcaccggccagcattgccgcctcgataacgcgctccatcggcatggccggatcagccaatgcgatattgtcgcgaatcgtgcaattgaaaagcacattttcctgcagcacgacgccgatctggcgccgcagccagctcaggtcgaccattgcgagatcgacgccatcgaccaggacgcgtccgctctccggaacatagagacgctggatcagcttggtgatggtgctcttgcctgagccagacgagcccacgatgccgatgacctggcccggctccacgctgaacgacacgtcatgcagcacctcgggcccgtcgatgcggtagcggaaggtcgcgtgctcgaacttcacgtggccgcggatcggcggcagagcggcgcgggccggggtgaagctcggctctggaatggtgttcaggatgtcgccgaggcgatcgatcgagacacgcgcctggtgaaagtcctgccagacctgtgcgaggcgcagcaccggcgtgctcacgcgcgccgcaagcatgttgaacgcgacgagctcgccgacggtcaggtcgccgctgatgaccaaccgggcgccgaagtaaagggtcgcagcgatgaccagcttgttgatcatctggaccgcctggctcgccgtgttgttcaggctgagcacgcggaagcttgcggccacatagccggcgagttgctcctcccagcggcgctgcatctggggctcgaccgccatcgccttgagcgtctcaacgccggtcacgctctcgaccaggaaggcttggttctcggagccgcgattgaatttctcatcgaggcgcgcgcggaacagcggcgtggctcccgcggagataccgatgtagaacgggaaggacgcgagcacgatccaggtcaacgtcgtcgagtaatagaacatcacgacaaggaagacgaccgtgaagagaaggtcgatgaccagcgtgagcgccgagcttgtcaggaactggcggatgttctccagctcgcggacccgggccaccgaatcgccgacgcggcgggtctgaaaataggcaatcggcagtgccatcaggtgacggaacagtctggccccgagctcgacgtcgatacggtttgtcgtatgcgcgaacacatagacgcgcagcgtctcgagaacggcctcgagcaccgtcagcacgacaaggccgatgaccagaacgtcgagcgtgctcatgcttcggtgcacgagcaccttgtcgatgaccacctggaagaacagcggtgagacaacggcgaatatctgaaggaagaacgacgccgccagcacctcgccgagcaggcggcgatacttctgcatggcgcccacgaaccaggagatatcgaaacgccgcgcgagatcggtcaggctggtacgccgggccatcagaatgatgccgccgtcccagatcgcctcgagttgcgcctgggtgatggattcggggcgcggagacagcgggcgctgaatgagaagcttgtcgtcgataaccttgccgaggatcaggaagctgccgtcgcgcagcagcgcaattcccggcagcggcgtgaccgcaagcctgttccagttcgtcctctgcacctttgccttgagcccaaactctttggcacagcgcaggatttcggtaacgccgaggcgcgtcgcccccacccggtggtggatttggccgggatcggcagcgattccatggcaacgcagcaagatcgcgagcgcaatcagcccggattcatcgccgtcttcgaaaccgacgtctgcagccggagatccgatatccgcggcctcgtcggcagtatcgccgcgagcaacaaagcgcgcccacatcagggcgccgggcgccttcgtcgagattgtatcgcggatccgcaccaggccgtcgcgggccccgaccagcacgtcgcccgcgcggcgcaacaggctgctacccagctcaacgccgcgcgcgcggatgtcgccaattgcatgaagtgcgagatgagcgaagctcggtgagccaggcgagatcaaaccgccatcccagatcgcttcaaattccgcgcgcgtcattcgtcgcggatgcgacgaggtcgggtgcagcacaagcgcaacctgatcctcgatttttcctagaagcaaaaatccgccgtcacggagcgaggcgattccaggcagctggatgcccgtcagccgcgaccaatccatcgtcgtcgcgcggactttgaccccaaattcgcgcgcacaacgcagcattgcgcggatgcctatcccatcctctccgcagtgatcgcggagttgatcaggctcggtgttcacgccatgaaagcgcaggaacagagccagcgctcgaagccccagatctggagctgcgtgggcatttccgttctggatcgccatttcgttactctacccctcgcggctaccgccagcgtttgtggtcctttgcatgcacatggaattccaatgacgcctatccgaagatacgcgacatacgcgtgctcgcagccaaaacggcgcaagcaatcatcagagcgttaaggcctcgaaccgcgaggagatttcagcgcgacgggatattttgaattgcccccccgacaggctgagcaggttggttaacgagcaaaaatggcgaaaaaactttcgaattgtggattcatacacacgcaagttgtgcccgaaaactgacctgaactcaggcgttttacgctctcaatgaagtatcgaatcggaatcccttcggcgattgtccgccaaacgacgacggccggcaaccgtccgttgtggattggtttttcgatctccccttcgcggctaccgaccgaccaattttgccgtgcggcgtccccaaaattggcggtgccgcacccgggcgtccagtgcccgggtgcggcagtacgttagtgatgcggcttcgtcaggaacgcgttctgcgtccaggcggcaccgttcgacacggcttccgcgatctgaccgccgtcgacccgaccggagccaccagccaaatattggttcagcagcgcgaagctgtggtttgcttgggaccctttggccgtttcgtaattcgccgaagaggttgtctgcggcacggtagctgccagcgtgctgcggcctgaccctaggtggtggtgcagcccatggccgtggtgtgccgtgctcccggtgccggtagacggcagcggatccgtgactttgatggtctgtgtcgccgaggaagccactgcgccggtaaccgggtccttcgcggtcgcagtcagtgtgaggttcgcgaccggatgttgactgcccctgtagtgcgacgtcagcgtcagtccgctggcaacctgcgctgcgctcagagtgatgttgctgcccctgaacgtggtgccatcgccggtcgtgatcgtctcatatctcggcagccctttgatgttcagactgacgctgtcgttgggatcggtcgtcgacaccgtcgtccccaggctgacgtggccgcccctgccagccacccagagcgcgtggtccgcgatggagagcaccggcgcggtcaccaccggcgtcgtcggagttgtcggcgtcgtcggtgtggttggctgcgttggcatgatcggcgtgttcgagatctgcagaccggagaatgtcttcaccgcgcccgagagatcagcggcaagccccccggaatccttgatgctcgcaccgctcgcaagattgaccccggtgatcgcaagtgccgaagtattcgtatcagtcgacgcgactttcgtctggaaggtgagcgtatttgtcccggagccgccaacataggtggctcctgcgccatcgttgagcgacagcgtcggcgtacctgcgacggtcacggcttcgctaaaagcgagcgtaaaggtgacaacatcgccgacatgctcggttccggtccccggcgaagcggaggcctgtgtcaccgtcggcgcgacggtgggggtggtcggcgtggtcggctgcgtcggcgtcgtcgacggtgacgaggcagtggccgccgcccccgtcagtagcgtcatgtttcggtaatcgacggcaacggtctcgggggccgacgaccgataaattccgtattcccaattggtgccgac

SEQ ID NO: 76 - DNA, 9751 bp, Bradyrhizobium enterica
ttttgtcaaacggcctgccttttcttcagtgcatcgtgtgctgctgatgcgctccagcgttgtcagagtctctgatgcgtttcgtggtgggaccagtgcttcgggacacctaactgctttggacgcatcgtcgggcttcgtcgtgagctgctgggctaaatgtactgttgcgttgctccgatagcgatctggattttcacaggtgaaattggcttcgggggcattcgaccggacacgtcgtgccggtggtgatgtcgatgagctgacgcagcggccacggcgcttgaaatgccaatagacaaagcgggcgatagattaaggcctcagatgaaattaagttttcgtaatgcggcaattgccggcgtcgtcgagagctaaataccaagactctccctacagcaaatctcgggtgccaaacctgtcgagttcgcagcaagcgaatggagttcagtgaggacatcacgccaaacgagattggacgagtcgcaagctactgatgacacgttgtcggtggcatgatgagggcgacgccgcaacctactgcgaccctcgagccgcacagcttcggccaaatggggctgtgtttgctagcgctgacgaacaggacgtaaaagggagaccgctcagccaccccttaccgaagagtgtccgcatttggcgtgtgtgacggggctatatgcaagcttccacgatcatgctttggcctgctcggctgaagtgtgattgaaggcaactgcaagattggacttaggtactttggaattgtcctcgtgattgttcacccaatcagtggacacgagcgcagcgagtatcgtccgcaaggacgattgcatttgattctatggtttcaggctgaaccatcatgctgcggcattggcagctaattgatccggccgtcgacgatacgaaatgatccagttaagggagaaatggagctgggggtcctacatagcgctggactcgaaagatcaaacaccaggaatcaccgcccgccgaggggtttcctttcgtgagggtcaaaacggttttgcggttttattatacccctcaagctgatagttggtcagaacttcttaggcaacgtgtaaatcgctgatctaatggcagaaattggcatcacgatttcttgagctgcattgcggagatggtctgtagacgcctcccaaaaggcgctaggagcgtcgcccatgcggcaatcctgaaaagcgtcaaaaaaccgattcgaaaaagctagatcgcaactggttgcgtttttgctgatttacagaactgccgtctgattgccaaacactcaaagcgagataggtttctcgtcgcaaggacgcccgagcgatggagaagcctatggaatagccgagcgaaacaacaaagtctgagctgaggcacggccgcccgtccctcagctcagccttctaaaccaactaactaagtcggtcgttagcgacggaaacacaattccgccgtgcgctatcggccggcatcaaacacctgagcaaacggaaacatatgcgacgagaggagcacgataatgaccgacaacgtgatcaatattgacgatgcccgagagttgcgggagctgggtctgccaatcctgcccattgtggacaaggagttttcccaccgagcgatgaagctctttgcgaaggcggagcaggcaaggatcaaattctacaggacttttgttgactactgcaaaacagccgagccgaccgaacgaggttacaaccgtataagaaaagcactcgataaggtgttatcggtccgcaatcaggccgcaacatacacgtcagctgacgatagcgaagctcaggcgcttcaaagcctcctgacagagccgatgacctcattcttggctttctgggcagagacgctggaaaggttcgaggaggagggccaggcggtcacggtccacgtcacacgagagatgtttgatgggtggtccgtgggcgaaaccgcaactccataagcggcaacaacccgagcggaccaagacattcgcagcaaacgcaggaacgctctgcccggaacttctatctaaaatagtagtatcgaacatgctcgcacaacgagactatgacttcgtggagaggccaggaatgaacgtgataggtgaactcaaaggtgatctcttgatcctcacgatcgacatttcggccaaagctcgcaagctggctaggccgtcttcgactgggaaaaccaagcttatcgctaccacgaacggattcatcaactatggcgccatgaaggtgtcgctcaacgccacggttcctttgaagtgactgaaacgaaactggacgtctgatgcctgccgttgtcgctaatgggacggcgctttcgctaagctcttggagaatccattgactagatgaaacgtcatttctggcagcggcggagcttcgcccgacgactgcgggaactgaaggctattacaccgcactaagctaacccaaacaggaaactagatatgaccggaaatcacgattctggcgacggcggagctttgcctgggctgcacgataactccgatatcgaagcgaggctcagctacttcattcaaggctactacgaattcaccaaggacgccgcagacatatacattcgaaaatgccaactggttctcgaagctgaagaggaactccccgttgaagcggtccagcggttcttcgaccgaattcggttgccacgcaattcggcgacttatcggaaagtgagaaaaatcgcagaggctggcgaccgtttgctgaaggttgcagaccgactgcccgattcgtggacgaccctttaccagcttgcaaaattgcaacctcaggaattcgacgaactggtccaaaacgacgctttgcatgtcggcataacggccgctgatttgcggacagctaccgctagcggttccgacaagccgaaattcatcatcaaggttgacgggtccagtctgagccacggcgagcaaacgcagctctatcgggagatcaaggagtctgctgacaagtacggtgcgaccgtcagcgcacccgagtttgacgaaaccgagcatgaggatgaaagtcaatgagtggagataacagcgagcgtagccttctatcggagcgccttcgtccgcaatgcttttgcgacctgacgctgccgccagccaccagtgaaaggcttcaacgtatgatcgaggagaaacgtccgatgaatatgatcttccatggtcctccaggaacagggaagacgtcggccgctcggatctttctgcggaagtgggatgcgtttgatgtgatgcagatcaatggttcgtcgcaaactgggattgatttcatgcgagagcgggtcgagggctttgctcgatctcccttttccatgaccgacgacttgcggatatgtttcatcgacgaagctgactatctttcggcgagcgctcaagcttctttgcgagtgttgatcgagcaaaacgagcacagatgtcgtttcatctttgcggcaaatagacttgagaaaatcgcagacccgctgaaatctaggcttcacggcgtcagcttcttgacccccgctgctagtcggccctcagtgctgctccggctagggacaggttgtccgaacgtcttgccgaactaggcgtcaaatttgaccccgtccgtttagacgaaatcgtgacgctgtattttccggatctcaggcgaatagcgaatggcctagagtttgaattcgagacccaaccaagagatacgttccaaatggaacgctgagcgatgtggtccaacccgccttcttgagatgggcgtcttgggtacacaaagcaatcggccgaggatggccccctcggccgatcacaggacggggtatcaccttctcggattcttggttcgaggaagagcgctgatccatttcttttttcggcccagtagtctcaacctccacaataaatattggcgggcattgtcgctgacgatttcgagggtgctgtgtcggcctattagactgaattggtcatcggtcgcccgtgcgacgaagtaatcgttgcgggtgcagcgatgatagagagcgtaacgaatatcagcgagttgctgaaatgaaagcggcgcattgtgtttcagccaaagctcgatgtcctcatcaggcggaaattttggcggctctgatttttgacacctcgttacggtaggaaaccaagtgcgaccattgtcgtcggctaaaatgccgggctcaaagtttgaaatcgtattttcttgcatattctaactccgttaaaagcaggcacgccaaaggggcgtgcctcagggttatttatgcagattttaaactcacctttttcagctgattctgcttcattccggctcgacagtgcgaacgacggctgtagatcgactcctgcttagtccaattcgaaagcaggagcacacgatgtcgtcccctatcttgaagtcccttactttcgtgccgcagcccaagcccagctcagacccactgatcatgaagcgggaacgcatggtgtcccgtttggaagaccagaagaagttgctcgccgatcccctataccagcgacgcatcaagcgctgggagaagaaagagggcggcgagaaggtgctggtcgagaagcccctgcgcaccagtaagtggtggcagcaggatcagagcggtgcctgcgtgatgaccgtgaaggtcggatcgaagcgcatcgagttcgagaagggtaaggcagcaattgccgttggctcattggacaagctgcccgccgtgatcgatgcgctgatcaaggcggtgcgagctggcgagcttgattctcagctaagcgaaacgagcaagtcggctcgtccggtgccgccccgtagggctgcctaacgtccagtcgattccacggatagactttcgagagtcttccaccgaaattgccaatctggcagttgcatagccagtcaggttctatatctgttcttggtcgggtgcctgactggttacgcctagaggataacgaaacttacattcaatgagcactgctgttcaaaagggattcgtctttcatgaggcacgcttcaatgctgctgatttcctagcgaaaaaaaatagtgctcgtcccgtctacaagactgacctaggtgcccttttcgagggagactgcctcgatgtgctgccgcttctgagagacgaatgcgttgataccgtatttgcggacccgccgttcaacctcaacaagcaatatgggagccgctccaacgacaatcgatcctccgaagagtatctgaattggtgctacgcttggattgaagaatgtgtacgggtcctcaagccaggcgggtccttattcatctacaatattcctcgctggaacatattgatcggcgcctacctgatgaatcgggggctcgacttccgacacgacattgctgtggacttcaaaagctctctcccaattcctgggcgtctttatccaagtcactacagccttctgtatttttccaagggcaagcccaagaccttcagaaaaattagaactcccatcgagttatgccggcactgcggtaaggagatcagagactacggggggcatcgacacgccatgcacccgaacggggtaaacctaaaagacgtgtggaccgacatcccccctgttcgccactggaaattcaaatcaaagaaccggagagccaatgcgctgtctactcggctggtagatcgagtagtggagctatccacccgtgcgggagacgtcgtccttgaccccttcggtggcagtggaactaccttcgcagtttgcgaaaagaagcaccgccgttggcttggcatcgagttggatttttgtgatgtaattgtcgaccggctggaagatgcggaaatcaaacatcaccgcaacgacgatcacgttgaggattaatcaaccggcttaagtttgatatgccccctgatgtctgaatattgatcgtacaggactgaatcgatcctttcttgcttcccagtagcattcatctcgtagagagagccgtcctcggcgaggtactttgcattcgcatcgaaccgatccggcgcaaagccgatctcccacaatgggattgtgacagcctcgctaaaattgcgcctgtccaattcctggaaactgccgttgcgattcgagacaggccatatgcgggcagcgcaatttgctttgtcattcgaagtaatgaagatgccgagatcgagcgccttctctttgaaaagatagtccaacttcattgctgctcgaaacgaacttgcaatattccccgtttcaaactccacgccgcaccgaaaagtggtcttggcatcactacgactgaagaaatgttccaaacccttgagcgccgggatcaacccaggcgacgctcgaagacaataactctgatggattgacgttgcgattggacccgctgatgctcccgagagcttttcataggcctgcaacagctcaataaggcggctcgcttccaagcggtagagtgcgaactcgtcttcgacctcaaggtatccgtcgatttcttgatcaaggatcgtcttgtcagtggcccaaccgagctcccgtaactttgactggaagcgccccgtaataaactttgccgagttggttacggagggctttgccttgcccgcaggatttttccagtaccaggcgctatcgttcacaacgaaatcttcgtttgaactcttcacatagcgcagagctatctgcacgtcgctggacagacgcttctctgtttgtgagttaccaatcgaggaagtctttcggaagaagatttgcacaaaatgcctctcgcccaatccaaggcgaggaatatcatcctttttatcaatttgaaacctatggaaaacggctacttatcagcttgattcttccgtccacgtctgatgtcgtttggtacaatcagagatagaggtcgccattgaccgccaagacaatcgtctttttcaataataaaggcggcgttgggaagacgaccctagcctgcaacgtcgtttcttacctgaacatgcacctcggcaagagggtgctgctagtggatggtgatccgcaatgcaatgcaactcagtcggtcctcgaggaggatctgctgggtgaaatctactgggatcgtttcagcgctcgaaagacgctttatcactaccttaaaccactagagcgaggcgagccttcgatcgaagggacattcgagcccgtgaggtcatcagaaaacgcttacaagaccgacctaatcgcagggcatcccaatatgtcccttgttgaagatcggctcagtcaagcttggagcgatctgcaaggcgccgatccgatccggggctatagaatcagcaactggatgtcgcagttgcttcattcaatcggcgaccgatatgacctcattgttttcgatgttggtccgtcgctcggcgccctaaatcgtacaattctgttgagctgtgattacatcgtcacgccattcgggtccgacattttcagcctcttgggcatccggaatatctccgcatggatcaagagttggtcggatgactatgagagagctgtcgctaatctcaagcgaaagaacgagacgatactgagcgaattttctggaatcgtggacacgagtgtaaaatttcgtttggccggatattcagttcagcagtatgtcaaacgaaaattcaaagaaaaggcccgtccggtaaaggcttatgacgaaataattcaagatatccctgagacggtgcaagaaagcctcggcgcctttatacctgactttttgaagttcgaagatctagaactgggacacatcccgtttctctacagtctggttccccttgctcagtcacagcgggtgccaattcacgcacttacacaacacaaggcagttgttgggaatcaagtgcgccaagtagctgactatgcacagctgatgaaagtcgtgtgtcatcgcttgctgaacaatgtgaatagccaagccgctgcggatgttcagcgcccatgatcgactggccctcaaccttgataaacgaaatcgccaaagggcgatgtgttctcttcctgggtgctggcgtatctgctaccgccagcaatccggctggtaatcgaccgccggactggaagacctttctttcagcggcttgctctttggtgaaagatccgacaaagcgtgcggcggtagacgctttgatatcggaaggaaagcttctagtagcgcttcaagcgattaaggatctgtccgatcaagcggactatcacgcattcctagatagccatttcaatagccctcactttgagcccagcgaactacatcgcatcatcaatgctctcgatgctcgaatagtgatcacgaccaattttgataagatctatgaacggtattgcttttcggctccaggtggaatggatgcatttaaaatcatagattatagagcagcaattctagctgatgagcttcgatccgatacgaggctcatcgtgaaggcgcatggcaccatcgacaaaatcgatgaaatgatcttcactaaggctcaatatcacgaggcgaaaagagactatccaaggttctatgatgttctgagagcaatctttttaacgaacacgattgttttcatcggctgcggcctagaggatcctgacatcctcctgttgcttgaggatgtccgaatatcggggcgtcaaagtaagcctcattatgcgctcataaaacagggcaagcatgaattcatgattcgtgattggcgggcaacgtacaacatagctgtgattgagtatggtcctgaccatgacgacctaaaaggcgagctacaaaatttgctcgatcaggtggagagtgctcgagccgatttaaccggtgcaataccagcaggagtataagcaaaagtacccccagctccatttctcccttaactggatcatttcgtatcgtcgacggccggatcaattagctgccaatgccgcagcatgatggttcagcctgaaaccatagaatcaaatgcaatcgtccttgcggacgatactcgctgcgctcgtgtccactgattgggtgaacaatcacgaggacaattccaaagtacctaagtccaatcttgcagttgccttcaatcacacttcagccgagcaggccaaagcatgatcgtggaagcttgcatatagccccgtcacacacgccaaatgcggacactcttcggtaaggggtggctgagcggtctcccttttacgtcctgttcgtcagcgctagcaaacacagccccatttggccgaagctgtgcggctcgagggtcgcagtaggttgcggcgtcgccctcatcatgccaccgacaacgtgtcatcagtagcttgcgactcgtccaatctcgtttggcgtgatgtcctcactgaactccattcgcttgctgcgaactcgacaggtttggcacccgagatttgctgtagggagagtcttggtatttagctctcgacgacgccggcaattgccgcattacgaaaacttaatttcatctgaggccttaatctatcgcccgctttgtctattggcatttcaagcgccgtggccgctgcgtcagctcatcgacatcaccaccggcacgacgtgtccggtcgaatgcccccgaagccaatttcacctgtgaaaatccagatcgctatcggagcaacgcaacagtacatttagcccagcagctcacgacgaagcccgacgatgcgtccaaagcagttaggtgtcccgaagcactggtcccaccacgaaacgcatcagagactctgacaacgctggagcgcatcagcagcacacgatgcactgaagaaaaggcaggccgtttgacaaaa

SEQ ID NO: 77 - DNA, 9656 bp, Bradyrhizobium enterica
ccggaaaagtgcgaagcggttttccgaaaagatcatgctcagacaacaagctaaagcgcgatgatgattcactaatctcatcgtgctttaggcggcgaccttcaaccttctcaacgtcaaggtctcgcgggatcggcggaagcagctaccaccgcagccgtggcccgccgagacgacgggccaccgtgcggccaagggcattcgcgcagtggagcaaggccagcttgagatcattttcgaccgtacgaaggccgatctgcaaacggtccgccacctcttgtgccgttgcgccctcgatcgagatgtcctggagcacccggcgaggcctctcgggaagctcggccaacgcagatttgaaggccgcgatctcggagcgtgcctcgaccacccgtgcggcgtcgggctgattgtcgcagacatccaacagcgcatcgacctcggacgcgccgagacgatgggtctgggccctgtgccgatccttcgcgacattgatggcgatacgaaagagaaagtcgggcgggctgcggaccggcgccgcatccgtgacccgatccagccgcaggaatgtctcgtgcagcgcctcgtgggcgaagtcggaggaccccaggcggcgcgtcagccttgcgatgagaccatcatagttctccaccagctggtcgcgcagcctcgcctggttggtattgcccacgttcagcgcccccaaactattcttcagtgcgtctcgagactcgctcgttcctccgcggtgagcgcctgcctctgcgtctccgaaagcgcaccattgccgacaagctgcagaacactgttctggttgtaactgtgctggtcttgcggccgccgcttctgctcgtcccgcgcgggatccggcgcagcgccgtcgccgccgccgtaacccatgacctcgacgatgatgatcgagggctggtcattgccctttggcggcggcgcggcggcctgctggctcgcggcggcggtgttcgacgccgctgtcggcctcgcccgcatcgatggtgccgagcggtgcgatcagatcgatgttgccgggcgggacttcgggaatcggattgagcgtcgcgatgccggcgccggccgacggggtggtcggcgacagcgtgatgttgccgtaattgtcgtagacgcgccggggcggggtaaagatcgtcgtcgtcttcgagccacggccggcgttgatgtcgccggttgctgaccaaacaatgatgtcgccgccgaaggtggtcatgatgcgactctggcccagcagcacgctgccgagcgaatagacgtcgatgttgccggagccttgcgtgatcagacccgcgctggcaccgggcgcaacgccctccacgccaatgatggtcttgccgcccggattgaggatctggatatcgccgccgaagtcggtgtggatgccggcattggcaaggtaggtgccgcccgttccattcggcgcaatgccgctgaacatcgtgatgtcgccgccataggcgatcggcttgccctgcgcatccgtactcgggaacaacgcggcgatggcctcgcggccgcgcagatagctgccgagccgcggactggccagcgcgccggtctcctcgcgtccgccggcggtgagctccgcgaaatagatctggcggacgaagatgctctgctgctcgctcgacaatcccaggaagaacgtcaacgcgtcggcgctcgagccggtgaagccgtacatcttgttcagccaggcaatgagctgccgatcataggtctggaccaccttgccgctgccggcgagcggcgtgccgtcccccggaagctggttggccggatcgaaatagagttttgcgaaacctgcatagttcggcccggtcgggccgacgcccgcgagcacccagatgccggcgccctccgacctggtcgacgtgttcgcgccgaacagcgggccgacgctttgcagcatcccgtaatagccctgatacaggttgcggcctgcctgcacatccagcagtcccgagccggcaacggtgaccgattgatagatgatgtcgcggccggccttgatgatggagacataaccggaattgtcgccggcgttggcgaaggccaggtccgggttgttgaagattgcatccggcgtcgggccggtgccgacgatatcgcgacccgcgacgatctggaacggcttggcggctgtgtaccaggtcgtgggcgacggcaggaatcccagattggtttgcggctgcatcccctggacctgtccgatagtcaggtcgacgatgtcgacaccggcgtaaaccagcgcaggctgattgtcgccggcgtgcagattggtcagcggcgtatcggggccgaaggcaatcggaatgccattggtcaggcggtttggcgccgtcgggctggcattggaggcattcgtcgtattgaacacgggatggaacggcgtcgcgagcgtgctcatgtccgcacccgacatcgccaccacctggctcgagccatagatcgagccggcggccagaagcgcgagctggccgaacggcgaaggtgcgagctcgatcggcgcaaacgacagagcagtacctccgggctccgagaagcgaatgtcgccattggcggcggcagcgatcagcgtgccgggatagaaggcgacgctgccgacgccgctggcgggatttccgtccagggctgcgacgtcgccgcccgcggcgtagaggccgatcgcggtcgacggcgtccacaaagtgaagcgtgattgcccgccgctcgcgacgagcgaggtcgtgccgtccgcattccgcaccgtgtaaggggtttggttctgatcgaccggatcagccatgccggcatcgccggcgcccccgaacacgagatcgccgcgcgtcgtgatgctgatggtgccatcgcccggcgtgaagatcggtccgggggttttcatcgagcgcttgaagacgttcgggtcgaccgcgcgcggatcgtacgaggtgaaggtggcaccgccgaggttcggcgcgagcccaccgatggcgccggcgttcacggcgatgtcgccgcgcagattggtgatcgagccgtaataatcaggcacctgcaccccgtaagtcggcaccacggagttgagcttgccgccgatccttaccgtgagatcgccgccgccggtttgaaccagcgtgccgtcgcacagcacccgcccggtcgaagccaccacgagatcgagaccggtcgagccgttgccggtcacgccggcgttgccgccagcgaccaacgtcaaattgccaccaccgagcgtgccgatgccctggaagccgatcagctgcaggctgttattccacgcagatgtcttggcatatgagccgaaattgacccaccacgcggtcggatcgatcgactgaccgccgccttgccggccgaaccaattgctggtgagattcgagtccacatagcgactgttgttgttgaatatttgaacgttgccggtgacatctccctgcgcaacgagcagcacatcgccgccatgctccggataccaggcatggacaccaccgcggctcgcggtgccgatcacgtcgtacgggttactgccgtccgcggccaggaacggcgcggattgggtgccggcggtgtagacgccatagggcgtggcctcgctgaagcttccgcccgccaacagatccaggctgcccgtaccggtacgcagcacgctgaagaaggttccgttgagcgacgaattgtaggccggatcgctgagcgagagattgccgcgcccgttgagcgcctgcggcgcctgcagcgcgcgctggtcggcggcggcgagatctgcgccggcaaccagtcgaaccgacgcggacagcgaaccgggcgccagcatgaaggccccggctgccgtagcggaagcgcctggaattgcggggctgttcacaattgcgaccgtaggcatattgccgggctcgaatgcgaacgccccatagctgttgctgatgctcagtattgtgccagccggaacggtgtcaccgggattgtaggcgtggttattggaatcgaccagattgtaccaccagttgaacgtccaccaattgtagaagtcgtcgtttggaatcgtccaatcatgcacgacatagacgtctgtgttctgatcaagccagtaagaatagccgccggatgaggattgcttgaagtacggactgttggtgacgtcgaagatcgtgaaggaggccggcatcccgggtgacgacctgaaaccgtccgagatgcttccgttcaccgtcacgttgccgccggcgcggatcacgagagccattggctcgcccgcaccataggtcgccgagttcgggtcgcggtcggcattggcgccgtaacgatacttcgcgaggtcgatatcgcccgaggtcgacagattgccgctcgaggtgatctgcacgcccggccgcagatggtaggcactgccgtaggccgacagccctgcaacgcgcgccgacaatcccgtattgccgagtgccgcgctgatgaaggtcgtgctggctacgtcgtagccgtcaagcgtggcctgggtgatggtgctgccgtcaggcagattgtaggtccagaaggcgttgagcgcgatgctataggcgcccttgatgttgagcggacccgcggcgttgatcgcgatatcgccggaggtctcgccggtgcgctgggcattcagcaccacgtcgccataggcgacgccgttcggcgcggtgagattcatcgtcgcgccgggcgacagcgtgagcgcgccgccggcggcggtcagctcgatgtgaccgcgattcttggcctcgatcggctggccgtagctatcggtctgtagcaccgtgccgtgggcatcgagcactgcgttcgatgcgagtgtcaggccgttgccggcagagagccggatggtcccgggagcaaagccggacgcatcgatggtgccggcaacggtcaggcttccgccgtcgacggagaccgtgacgttgcgggccttgacgccgtcgccgatggcgagatcgccggtcttgatatcgaagctgcgggcgtcgaagaagccgccggcattcagcagcgcgttgagcgccgcaaaatccagcgtaccggcaaccacgctgaagtcgccgctgccgtaaccagctgccgcgccgccatggagcacgccgttgagcgccacgagcccgttgcccgcgctgatgctgatcgatccggcattggcgttgatggcggagacgtcgatgacggagccggcagcctgcgtcagactcccttgcgtgctgttgaagatcgccgtgccgccgaagccatagaccgtcgctttctggatcgtcgacggctgaccgctcagatcgatccggctgccgccgcccagcgcgatatcgcctgtcgcattgaccacgagcttgccgctcggcagcaggatggtgctggcgatggcgacgctgttgccggtgagatcgatctcggcgcccgcaaccgacgaggtcgcactgctcggcgctgtgcctgcaggcgcggcgacgttgagcgcgccgcccgcggcataggccatgatcgacttctgcacgccggtcagcagcggcgtcgacagcgtcaggctgccccccgtgccgctctggccgaagacatcggcggagctggaactcggcgacttataaacgaacagcttgccgttgccggccgaaacgatccgggaacggccggtgatgttgacgttgttgaagccgtagatcacacggctcaccgacgagttgtcgagcgatgcgaatttgccgaagtcgatctcgtcagcgacgagatcgagcgtgccgctgccggtccccgctccgcccgcaacgatcgccggcggcgtcgcgccgggaactccgttccaggtgatcttgttggcggcgatcacgctgtgatcaccggtcgcgccgtagccgtaaatcgccggcgtattcagcacgaaatcgacgccactgccggtggcatcgagaccggcgctgccgaacagattgatggcattggcagcactgagcgtgatcgacttgagtgctggcgctgcatggagaggatcgccgtgcagcagcgtgttgaacaatgtctggtcgaacagcaaaccggatggtgcacccgctgcggcgacggtcgcagcgtcgccgatattgatgctgccgaccgccagcgcgatgttgcttgatccgaaatgggcagtcggatcgatgctggaggcgccgttggtcgcgagcgccagtgttccctcggaatagagctgtgatccggcgccgatcgtgatcgagccggtaccggcaccggatccgaggaagttcagcttgccgttggacagcgccagcaccgtgaggctgttcgccgagtagctcatgccggtggacacggaatcaaacggcgccgcgccctgcccgatcgtgctcagcgtgacatcattgcccacgacgatgttgttgcccacaaagaacagctcgccggcattcagagagactccgtcgcggatatagagattggataagtacgcggacaggaagagcaacgtgccgttattgatcaacatggagccattgaccgtcaggcgcggggccgcgatcgcattcaggtcggatgcgcgaaccgagacgccattaaatcccgccgtcggcacatcggcatagatttcgccgacccgcatcagcgtcacctgacccgcattcccgtcttgtgcgccctggaacagggccgtgccattgaaggtgagcgcggattcgcctgtcggcgatgtcggggtctcgaacagcagcaccagccccttgccgtcggccggcagcagcggccgcacgccgccgaaccgggtcacgttcgcggtcaggaaatcgctgtagccctgctcgttgtactgcgaatagttgcgaaccgacttgcccgcggtgatcagcgccgtcaccggcaaggtggctctgatcgcggtgttggcaatgccggtcgaaaccgaagcggcgtaagtgccgttgccgatcgatatcgggctggcaaccggtgtcgtgttcgtacctgcgagctccacgcggtacgcaccgggcaggagcgcatagttggacggcagcaatgtgtaggtcccggcgggtagtccgggcacgccggcagggatggtcacctgctgaccgaccaccggatcacccgcgccattctcgggtgcgaccggtgcatagccggacttgtagccaggcaggatggcgtagaccttgtcgctggccttgctgacaggcgtcgtggggttggcgttgacgagcggggcgttgagcacgttgatcgaaccgccgcgtccggagacgaagccggcgccgctgagcatgccgccccccgacatgtcgaggatcgcgccgctcgcgaccttgatcgactgcccatccagcaggatgccggattggacccaattggtgccgctatttgtcaggtcgaagggacggacgctgttgccgttataactataggtgacaccgtcaaccgtaccgccatagggaatggtcaggcccgccatcgatacggaggtcaggctgcccggcaggatatcgactcgttgcgtagagatgcggttgtcgtaaggattgttgttgccgagcacgacaacgccgaacggtgcgcggacgatgccgccctgctcgacaacaggcgcggcgagcgcgaggctgccgaacgcggacagcggtgcgtccgggatcgtatcggtgctgcggccgatggtcagcgtgggcggctgatcggactgcgctgccgtgaaattgctttgcccggcggtgacgaccgcgacagcgcctgtggcaggatagatctgggctgcgatgagagcgagattccagtcggtcgataacgtcgtcgcctgccccgccgcaccgctggccaggaagcggatatcgcccttgctggcgaacctgatgtcgctaaagccgggcgcgtacatgctgttcggcgcggcagccgagaattggatcagcccctgaatgtcgatctgaccggcatcggcctcgaagatcgcattggtcggcaacaccgcgcttctgggattgcggatgctgccgctgatggtgccgtcagggatattggcgaccgattcagcaaacaggatgtagggcgccgacagcttcacgctcccggtcgcggccgccatcgaggaatcgatcggcccggacaccggagctcccgacgtgaacgccgccgccgtcagcgtcaggctgcggccgagcgcgagcgacacgttgccggagaactgcatgtagtcgccggagatcagcgtcaggctgtcgaacccgccggccttgaccatgtcggcgctcacggtggcctggccgaacgcgagatgcgacgcatccgtccccggagcgatgtccgcaggcagcaaggaatccggacgcccctgcaccacggtcatcaggcttggcacgatcacattggacggcgccgtgctgttggggaaggtactcatcttgaagatcggcgtggtgagcgcgatcgacaaattgccgccggaagcgccgctcccgccggagaaggcgtggatatcgccgtcgagatagagaccgctctgcgacgccagcgtaacggagccgccattcgtcgtgaccatctgcggttgggttgacgacgctgcaccgcccgctgccagatcgatcgcgacgtgggtgccgtctgcattgagttcggcgcccgggcgcaggatcacgaaggcgccgccgccattgatggtgatggcgccgccgtcggtcgctcgcccgaacagatgtcctgatgtgtcggatgcctgataggccagacccgagacatcgagcctggctgcggcatcgacccagaccgaaacgccgcggccgttgccgttcaggtcgaagttgagacccgccagaaccggcgagctgtaggcatcattgaccaaagtgatgctgccgccacgcgcagtgaggttgccgaacacgctgatctggccgaaggcgtcgagcgtgatgctctggcccggatcgacgctgatcgaggcaccgtcgcccaccacgatcgcgccgccgcccgcgagaggaccggagccggatctgacgagcgagcgcagcgtgaggctcgcaccgccgcgctgggtcacagcggccttgaccgaatccgcggtgaacaacggcggcgtccacagcgtcagcgccgatgacggatcgctgccggtagctgccgcatagctgttcgccgtgaaccggtagaccggcatcgcggccgcaatcacggtgttgctggccaccacgacgccgagcccgccattgatgtcgtagctcgagaagccggcggtgaagaacgctggattgagcgccgctgccggtgtgatctggacggtctgcggcagcaccacgccggctggaataatggtcccgaccggataggtcatcggcgtggattgaattgatcctgcggcgtaagtgacttgatagggcgtgattggaaggccactcgggaagacgttggacggaatgacggttcccgccggaatacggccagtgccgctccagccggtgatgagcgtcccggccgggatcacgttgcctgcgctccaataacttgtcccgccattgctgtctctgctctggagggaatccatgccctgcggcacggtccaatctgcaccggtcggcgcggtcggtaccgctgagatcgtgacgtcgaccggtatcggcgtgtcgtacaccagcgaggtg

SEQ ID NO: 78 - DNA, 8729 bp, Bradyrhizobium enterica
cgcgcaggcaatacgatggtccgttgttcgatgctggtcatggcctcgctggccgcatacaggccacagccatccgccagcttgcgatcatgcatgctccgggcaatgacgtggaactggtgttctgcggcgcaggcgtagagcgcgaagatgtcgctctcgcggtcgcccagcatggtcaccatcgcagccttcgccaacagcggcttggctgccagagcggtcgcgatccagcgttgcgattctttgtccttcagatcgcgattgtcgtgcgagacggtgcggcggccctggcgggtccagatctcgccgtgcaacaggccaaggcagcagccgctttccgcgtctgcggccagcatcgggtgcagcaacaccccgcgggtgttgccatgaccgatctcgcccaagccacgccggttttgtgccttggtggcaaaattgatctcgctggtatcctggatcgccagcacatggcggccttcggccgccattaccgtaccatcgctccagctttcgattatccgcgtcgtcgtcaccttggcattgccgagaaagcggttgaagcgcacctcccgggcacgcatgcctcctgccagccgtcgcaggcagacatccttgcccgcgaccatgcattcgacgagcgccgcccccctttatcgaggcggagatccccgaaccgacctaatgaccagtcaatttgcgccagcatgtcgacacctccgccaaagccgaagtgccgcaatatgaatcacacgaaataccgattcgggaatccccacccaactagatgtgtgcatgccctagtgcgttcgcagggacgacacggagtttgttgtacatccttgccgcctcattatgacggcgagaatgagcgcttaccgtaggctggcgttgatcttgtccagcacggccgagccggggcacagcgcctgctcatccattgcgttgagcggcgtctcgacggtgtcgagatgggtgtgcagatcctcggcgtccggatcgacgtagagcaggccggtgacgatctggcccttggccgcatgcttctgcaggaaggtcatcgcgccgagccgatcatgcggatcgtagtcggcgtcgagtttgcgcagcgcgaggcgcgaaccgtcatgctgctcgaccacctgcacggtgccgggcgcgtaatcgacgctgatcggctcgcggccgaccagcacgtcgagccggttcaccgcatcattgtgctcgcggacatagtcgaagctcttggtcgagccggcgtgattgttgaaggcgatgcaggggctgatcacgtcgatgaaggacgcgcccttgtggcggatcgcggccgcgatcagcggcaccaattgcgtcttgtcgcccgagaagctgcgcgccacgaaggtggccccgagctgcaatgcgatcgcaaccaggtcgatcgcattgtcggtgttggtgacgcccttcttggacttcgagccgcggtcggcggtcgccgagaactggcccttggtcaggccatacactccgttgttctcgacgatataggtcatgttgaccgcgcgccggatcgaatgcgcgaactggccgaagccgatcgatgcgctgtcgccgtcgccggagacgccgagatagatcaggtcgcggttggcgaggttggcgccggttagcaccgacggcatgcggccgtgcaccgagttgaagccgtgcgaattgccgaggaaatagtccggggtcttcgacgagcagccgatgccggaaatcttcgccacccggtgcggctcgatcgagagctcgtagcaggcctcgatgatcgaggcggtgatcgaatcgtggccgcagccggcgcacagcgtcgagatcttgccctcgtagtcgcgatgggtatagcccagctcgttcttcttcaggccggggtgatgaaacttcggctttgcaatgtaggtcatgtcacggccttgcggagaggggtcaccttgaggtggtcctggtggtcgccgatcgcgttggcgatgaagcgtgcggtgatcggcgtgccgtcatagtgcaggatcggcaccagcctgacggggtcgatgccgttctcgttgacgatcagctgacgcagctgcgcgtcgcggttctgctcgaccacatagacgaagtcgtggtcggcgatgaagctcgcgacgctggagtggaacgggaaggcgcggatgcgcatgcggtcgagctgatggccgcgcgcctccagtatcccgatcgcctcgtccatcgccggcgaggtcgagccgaaatacagcacgccgtatttggtcggcttggccgcgttggcctgcagcggccgcggcaccatgtcctgcgcggtctcgaacttgcgcaccaggcgctgcatgttgtcggcgtagacggcgccttcctcggaatagcgcgcatagcggtcgcgcgaggtgccgcgggtgaaataggagcccttggtcggatgggtgccgggataggtgcgataggggatgccgtcgccgtcgacgtcgagatagcggccgaagtcgcggccttcctcgagcatctccgcggtcatcaccttgccgcggtcatattgcttcgcatcgtcccacttcagcgggcggcacagccggtgattcatgccgatgtcgagatcgagcatcaggaagatcgtggtctgcagccgctcggcgaggtcgaatgcggcggcggcgaattcgaacgcctcggccggatcttccgggaacagcagcacgtgcttggtgtcgccgtgcgaggcataggcgcaggcgatcacgtcgcattgctgggtgcgggtcggcatgccggtcgaggggccggcgcgctggatgttcatgatcacggccgggatctcggcgaaataggacaggccgatgaattcggtcatcagcgagatgcccggacccgaggtcgcggtgaaggcccgcgccccgttccaggaggcgccgatcacgatgccgatcgaggcgagctcgtcctcgccctgcacgatggcgtatttcgccttgccggtctcgggatcgtggcgatacttcttgcagtggctggtgaaggcttccgccaccgacgatgacggcgtgatcggataccaggcgcacacggtggcgccgccatagacggcgccgagcgcggcggcgctgttgccttcgatgaagatgcggtcgccgaccttgtcggatttcttcacccgcagcccgagcgggcatttcaggttctgcagcgcccagtcgcggccgagatgcagcgcatggacgttggaggagagcagcttctccttgcccttgtactgctcgccgatcagctgctcgaccaccttgggatcgaggtcgagcagggcgcagagcgcgccgagatagatgatgttcttgaacagctggcgctgccgaggatcggtgtaggtcgagttggtgatcgcggtcagcggcacgccgatgaccgtgatgtcctcgcggaatttcgacgacggcatcggcttggtcgaatcgtagaacagatagccgccgggctcgatcgaggcgacgtccttgtcccaggtctgcggattcatcgccaccatcatgtcgacgccgccgcgggcaccgagatggccgtcctcggtgacgcgcacctcataccaggtcggcaggccttggatgttggacgggaagatgttgcgtggcgagaccggcacgccgtgacgcaggatcgaacgcgcgaacagttcgttcgcggaagccgagcccgaaccgttgacgttggcgaagcggacgacgaagtcgtttacgctgctgatcgggctttggactgacatgttgatcccgcttgagccatatcgatgaggtacttctgcatgtcccaggcgccggtcgggcagcgctcggcacacagtccgcaatgcaggcagacgtcttcgtccttcaccatcacgcggccggtcttcaggtcaccggaaacgtacagcgcctggtcgtgatgcggcgaaggggccttcagccgttgccgcaaatcatcctcttcgccgttctcggtgaagctgatgcagtccatcgggcagatgtcgacgcaggcgtcgcattcgatgcagagcggcgcggagaataccgtctgcacgtcgcaattcaggcagcgctgcgcctcgccgagcgcgagcttgaggtcgtaaccgagctcgacttcggcgcggatgtccttcagcgccaccaccttgtcgcgatgcggcaccttgaagcgcttgtcggcggagatgtcgttgtcgtagctccactcgtggatgcccatcttctgcgaggagacgtgcacctcgggcagcggacgctcgttgatgtcctcgccggacagcatcttgtggatcgacagcgcggcgtcatggccgtgcgccaccgcccagatgatgttcttcggcccgaacgccgcgtcgccgccgaagaacaccttcggattggtcgagacgaacgtcttggggtcgaccttcggcatgtgccacttgtcgaattcgatgccgcaatcggcttcgatccaggggaacgcgttctcttggccgaccgcaacgagcacatcgtcgcaggggatggtctcgtccggctcgcccgagggcaccagattgcgccggcccttgtcgtcgtattcggcccggaccttctggaaggtgacgccgatcagcttgccggcgacatgcttgaatgccaccggcaccatgtagttgaggatcgggatgtcctcgtggatggcgtcttccttctcccacggcgaggccttcatctcctcgaagccggagcggacgaccaccttgacggcctcgccgccgagccggcgcgcggtgcggcagcaatccatcgcggtgttgccgccgccgagcacgatgacgcggcggccgatcttttcgacatggccgaacgagacgttggcgagccactcgatgccgatatggatgttggcgccggcttccttgcggccgggaatgtcgagctcgcggccgcgcggcgcgccgcttccgacgaagatcgcgtcgtagttctcggagagcagttgcttcaggctgtcgacgcgctggccgcccttgaactcgacgccgaggttgaggacgtagtcggtctcctcgtcgatcacgctgtcgggcaggcggaatttcggaatctggctgcgcatcatgccgccggccttgggatcgccgtcgaacacggtgcagtgatagccgagcggcgcgagatcgcgcgccacggcaagcgaagcagggccgccgccgaccagcgcgatgcgcttgccgttcttcggccccggcttcggcagccgatgcttgatgtcgtccttgaagtcggcggcgacgcgcttcaggcggcagatcgcgaccggattgtcctcgacccggccgcggcggcacgccggctcgcatggacggtcacaggtgcgcccgagaatcccggggaacacgttggacttccaattgatcatgtaggcgtcgctgtaacgcccctcagcaatcaaccggatgtactcgggaacgggggtgtgtgcgggacaggcccattggcaatcgactactttatgaaagtaatccggcgccgagatatcagtcggtttcattcctacctttgacccgcgcaaaaatgcctgaccgcgcggccttatcgttgacgacgaacgctcacgtggcgttgttccggtttttgaattggatcataggtttatcttattagagccgttccagagaaggcaaaggctaaattgtccgatcatctgctttcgcgcggctgatgcgcgtgtagcgttaatctcgattgcgttatgtggcggtgcagcatgtgcgcaccgccaatctgcgttgctagccgcgcggaagatcgctcttcacgatatcccacagcaatcgatagacgccgctggtgaccaccatcggtttcaaggctgcgttgcccgtgatgacggccgcggccgcagggactgcgccgacgtcggtggcgtcgatcaagacgaaccagtcaccggcgccgggatcggctttgccagcgtccggcgtcagcggcttcgacagcacgggatcgttctccaggagatgcatcgagatgatgccatcacgcgcggcgggatcgagttgctcccgcaatgcagcgcggagccggtccgctccttcggccggcgggcggaggcggatgatgccgagcgcggcgcctcggccgacgccgcggctgatggtgatgcgcgccaccccgcggatcatgttctggaagcgcgcgatgttggtcttcgaccagtcggtctggttggcgagcgccttgcggtaggccgggctctcaagcacctcgaaggtggtggtggagtagaggctgagatatttcggcttgccgtcatgggcgacgtagcggcgggcctcctcgaatccctcgatcgcgacacgttcttcgagatgctcgcggtcgtaccagcggttgaattcagcttcgtgtaagctgtcgatatccatcgaggtcagcagcatgccttgtccggcgattggcatcgggtgctccttttttgccttgttttatctgcacaatatcgccgaccggcgccggccggggaagccggatccgggcgccgcgggcggctcagaccaaggattgccacaattgccgcaatcctgttcagcgcgcattcacggaagtagcctttccatccgttacgccaactctcgagaagaaaagggacgaccactatggcgcgcattctgtgggctttgatcgtcggtctggtgtcgttcgccgcgcttcctgtccatgcggaggaccaggagaagcgcctcgcgctcgtcgtcggcaacggcgcctaccaggccggcgcgctgcagaccgccgcaaacgacgccggactggtggcgcagaccttgcaggccgccggcttcgacgtgatcggggcgcgcgatctcgatagcgagacgctccgcaagtcgttccgcgacttcatccagaaggtgcaggacgccggaccgaacgccgtcgccttcgtctacctcgccggctacggcgtgcaactcaccggcgagaactacttcgtgccggtcgacgccaagatcgcccgcgacaccgacgtgccggtcgaggcgatccgcatctccgactacagccatctgctctcggcattgccgatcaaggccggcgtgatcgtgctcgatgcggcgcgcagcaatcccttcgccaaggacggccagccgctggccggcggcctcgcgctggtcgatcccgaaccgaagatgctgatcgccttcaattcggcgccgggcaccgtcgcccccgacggcgcgccgccttacgggccctacgcgcaggcgctggcggaaatgattcgcgccggcggcctgaccttgcccgaggtgttcgaccgcgttcgcctgcgggtcaacgaaatgaccaagggcgccgagatcccgtggaatgcgcagaaggtcgacgcgcccttcatgttcttcgagcgcaagccggatgcgccgccgcagcaggtcgatgccggactgcgcaccaagccgatccgcgatttcccggcgcaggatgcctatgcggcggcgctggagcgcgacacgctgcaaggctatgaggattacctgcaggcctatccgaccgatccgctggccaagcgggtgcgcgcgatcgtggcggcgcggcgcgaggcgatcacctggcggcgcacctacaacgccgacacggccgacgcgtattggtcgtatctgcggcgttatccgcgcgggccgcatgcttacgacgcaaggcgccggctcgcctatctgtcggccgcgctggagccgccgccgcagttcgcggcgatcgattacgacgtgccgccgccgccgcccgacgagatcgtctatgtcgaccgtccggtgctctactacagcgatccggtgttcgccttcgcgccgccgccgccgccgccggtgttcttcctgccgccgccgccgccggacttcgtcgtgctgccgccgccgccgccgccgatcggcctgttcgtgctgccgacgccgttcttcgtggcgatgccggcctatgtcgccgcgccggcctatgtggtgccgccgcagaacaacatcgtgttcaacaacatccacaacacgacggtcatcaacaccgtcatcaacaatcccaaccccacgccggcgcagctccatgccgccggggtgaccgcagcgatgggcggggcgccggtcacggcggctccgcaactgccggccgccgcgatgcagcgcgccaacctggtgcaaccaggcggtccgcaaggcgcgacgccggcgcaaggcgcgatgggagcccctggcgcggcgcccaacgccgccaccacgccgaacgcgatgggcgctccgggcgcgcacactttgccgggcgcgaagaatggaccgccgctgccgcagtcggcgaccgcgccggccaacgccacgcagcagcatggcgccgcccagccgggcgtcatgcagccgggcgccgcgcagcccggctctacgcaacccggggcgaagccgaatgcgccagcgccaggcaagccggcgacggcgatggcgcctgccaacgcgcaacctgcgcctccagccaagcccggcgttgcaccgacagcaaacgcgccggcctcgcccgcgaccgccggcaaaccaggacggcagcaacagctcatgcatgccacgaccgcgccgaccgcaaacgtaaagcccgcaaccgcggcagggccggcgagccgcgcggcaccggcacggacgacgccggctgcgcgttcggcaccggcgcatgccgcggtgtcgccgccgccggtct

SEQ ID NO: 79 - DNA, 7960 bp, Bradyrhizobium enterica
cgcgcgatgctgatggtcgagccgccatcgatcgacggcaacgagctcaccgacaagggctacatcaaccagcgtgccggcctcgagcgccgtgcggaatccatcgtgccgcacggtctgcggttccatggattccgggctcgcgcttcgcgcgccccggaatgacggccaattgaaacgacaagaaccaagaaggtagcgccatgaatttcgatttctccgacgaacagaagcagatgcgcgacgaggcgcggaaattcctcagcgaacagtgcccgccgaaggccgtgcgcgaggtgctcgatggcaaggcgccctacgacaagtcgctgtggaagggcctcgccgagatgggtttcctcggtatcgcgatccctgagcagttcggcggtgcgggcgccggccatctcgagctctgcgtgattgcggaggagatgggtcgcgcgctggcgccggtgccgttctcctcgaccgtctatctcgccgccgaagcgctgctgatcgcgggcagcgacgcacagaagcagaagtggctgccgaagatcgcctcgggcgatgcgatcggcacgctggcgctgttcgagggcaagggcaatccgtcgccgaaggcggtcaaggtcacggccaatggcggcgtgctcaacggcgtcaagaagccggtcgcggacggcgcgatcgccgacttcgccgtggtcgccgcgcgcaccggctccagcggccgcgagtccgatatttccctgttcatcgtcgatctcaaggccgccggcgtcgaggtaaagtcgctgaccaacatcgatctcacccgtggccaggccgagatcaccttcaggaatgccaaggctgaaccgctcggcgccgccggcgagggctggagcgtcatcacccaggtgctcgatcgtgcggccgtgctgacggcgtttgagcaggtcggcggcgccgaccgcgcgctggaaatgggccgcgactacgcgctcgaccgtatcgcgttcggccgtccgatcggctcgttccaggcggtcaagcacatgctggccgacatgtatgtctcggcgacgctggcgcgctcgaactgctattacggcgcctgggcactttcgaccaacgccggcgagttgccggaggcagcggccgccgcgcgcatcagcgcgacgcaggcgttccagcactgcgccaagaacaacatccaggttcacggcggcatgggcttcacctgggagttcgactgccacatgtactatcgccgcgccaatgcggtggcgctcggtctcggcagcctgtcctattgggaagacgcgctgatcgatcgcatgcgcaagaagaacgcggcgtaagcggggaccgtcatgaatttcgacgacaccccgcaggaggccgcattccgcgccgaggcgaaagcctggatcggagccaatgcgccgaagcaatatgaggacgaactgcgcaaggcctcgctcggccgcgttgcgctcaagggcgccaacattctcgaggtcgcaaaagcatggcagaagaagaaggccgatgccggctgggcctgcctgcactggccgaaggagtatggtggccgcggcgcctcgccgatcgagcgcgtgatctggcagcaggaagagggaccgttcggccgcctcagctcgatgttcatcatcggccatggcatgtgcggtccgaccatgatggcgttcgccggcgaggagcagaaacgcaaatacctgccgccgctcgcctccggcgagaagatctggtgccagctgttctcggagcccgccggcggctccgacgttgcgggccttcggacccgcgccgagaagcacggcgacgaatgggtgatcaacggccagaagatctggacctcgggcgcgcattattccgactacggcatcctgctgacccgcaccgatccaacggtcgcgaagcacaagggcctcaccatgttcttcctggacatgaagagcccgggtgtcgagatcaggccgatcaagcaggcgagcggggcgtcggacttcaacgaagtctatttcaccgacgtgcgcattccggactcgcagcggctcggcaacgtcaatgacggctggaacgtgtcgctgaccacgctgatgaacgagcgcatgtcgatcggcgccggcgtggccaccggcttccccgagctgttcgatttctgcaacagcctgatgctggaggatggccccgcgatcgagaaccgcgcggtccgctccaagcttgcgaactgggcggtgaaggcgagcgggctgaaatacaccagcatgcgggcgatctccgcgctgtcacgcggtgagcgtccgggaccggagaactcgatcgggaagctggtcgccggctcgatgatccaggatgtcgcgacctacgctctcgacctgcagggcgccgccggcgccttgagcgggcacgaggatgccgaggttgccggcaaattccaggccatgctgctgcgcgcgccgggcacccgcgtcgagggcggcaccgacgagatcatgcgcaacatcatagccgaacgcgtgctgggcctgcccggtgatatccgggtcgacaaggatgttcccttcaacaagatcccgaccaagggccgcgcctgatcgcgcgtgaaatcaaaaagaggttcgccatgaatttcgatgacacgccgcaggaagccgagttccgcgccattgcgcgcaagtggatcgccgccaacgcaccgaaggagttcgaagaagagctctcgaagtcgtcgctcggccgcatcaggctggccaagcacgacatggtcgaggtcggcaaggcctggcagaagaagaaggcggaaggcggctgggcctgcctgcactggccgaaggaatatggcggccgtggcgccaccccgatcgagcgcgtgatctggcagcaggaagaaggcgtctatggcaaattgacccagccgttccagatcggcgagggcatgtgcgggccgaccgtgatggcctggggcagcgaggaggccaagcgccgctatctgccgaagctcgctgcgggcgaggagatctggtgccagctgttctccgagccgtcggccggctccgacgtcgcgggacttcggacacgcgccgagaagaagggcgacagctgggtggtcaacggccagaagatctggacctcgggtgcgcattactccgactacggcctgttgatcgcgcgcaccgatccgaatgtgcccaagcacaagggcctcacgatgttcttcctcgacatgaagagcccgggcgtcgaagtgcggccgatcaagcaggccaacggcatgcaggaattcaacgaggtctatttcaccgacgtcgtaatcccggacagccagcggcttggtgcggtcggcgagggctggagcgtgtcgctgaccacgctgatgaatgagcgcatgtcgatcggcgcgcggcttgcgaccggcgtgcccgagatgttcgagttctgctccaatctgatgctggaagatggccttgcgatcgacgatccggcggtgcgctcgaagctggcgagctgggcggtgaaggcgagcgggctgaaatacaccagctaccgcgcgatctcggcgctgtcgaagggcgagcggccaggtccggaaaactccatcggcaagctcgtctccggcctgatgctgcaggacatcgcgacctatgcgatggacctcgaaggcgcggcgggcagcctcaccggcaccgatgaggagcaggccaacggccagttccagcagatgctgctgtcatcgccctcgatgcgcatcgccggcggcaccgatgagatcctgcgcaacatcatcgccgagcgcgtgctgggtctgcccggcgacatccgggtcgacaaggacgtgccctacaacaagatcccgaccaagggacgctgagcatggatgcgaaaacacccggcgcgcgttatgcgaccgaagaccgcatcggcgcgctcgaggaactgctcaacgagcgctactcggtgcgcgcattcctgccgcgtgatgtgccgcgcaacgttatcgaaaacatcctgacgaccgcgcagcgcaccgcgtcctggtgcaacagccagccctggcaggtactgatcgtctcgggcgaggccaaggagcggttccgcaaggcgatctatgccgaggcctcgcgcggtctcggcgaggactacgacttcacgccgccgcgcgaatatgtcggcgtgtatctggaacgccgccgcgaaagcggcttccagctctacaacacgctgggtatcgcgcgcggcgacagagccgcctatgccaaacaggcgctggagaattacaatttcttcggcgcgccgcacattgccgtgatccacaccaacgagccgctcggcatctatggcgcgattgactgcggcggctatgtctcgaacttcatgctggccgcgcaggcgctcgggctcggcaccatcccgcaggccgcgctcgcgcgccattccggcctgatccgccgccatttcagcctgcctgacgatcgccgcgtggtctgcggcatctcgttcggctatgcggatcacgcacacaaggtgaacagctaccgcacgtcacgcgcaactgtggctgatactgtcacattcgttgatgtatagtttcctcaaggcgggacgtatcttcccgccgaggacaagaagaagcgacaagaaaaagccaataagaaaaatggcgaacaacgccgctccgacgccggctgagatcagctggcaactgcaccggttgcctgcgctcgggcgcgatgcgttcatcgccgctcattatctgggacagcccgttgcctggaagacccgcttcttcgacgcgatcgactggggcgcgggttcggtgctgcaattcagcttcctgcaacgcggctggcaccaccatgcgcggctcgacaatccgatctatgcctatatcgacatcgagcaacatccggaaacacgcggcctgcgccgcggtcgtcggatcgatctccagggcacaatcaaggggatcgatttcgtgaccgggattacgctcgagctggacaagttcgagattctgccggtcaatttcctcgaccgcttcgtgatcagctccgacagccgctattagcccttgcgtcccgccacgcggcgcagcggcgcgtcggcataacgcgcggccatcgcgccgatgagttcggccatcttcccgcgcagctcgtcgggcgcgatcacctcggcctcggcgccgagccgcagcagctcgctcgcggcatgccacaccgtcttgccgaccggcatggtggcgatgtgccagccgtcggcgtcggtactgccgacaagccgcatccgcgccttcacgtaaggatgcgccagcgcgtcgaacagcttcagcccgagcggcgacagccgcaccgtggcctcgttcgggtgcaactcggcctcgagccgctcgatcgaggcacgccaatacgtagcgaggtcgaagtccgccggccgcgcgaacggcgtgtccagaacagtgcaatccagcacccgcgcgacgcggtaggtgcgcgcattgccgtcgacgaggcccgcgagataccagctgccgcccttcagcacgaggccgagcggcgccgcgcgccgccgcttctcggccttccagctctggtagcggatctcgatcaggttctcgctcagcaccgcgccggcaatcgcgcgcagatgcttcggctcctcggtctcgccgaaccagttgggcgcgtcgaggtgaaagcgttgctgcaatcggttcgcgttggggcgcaaatgttccggcagcgccgccatcagcttggtctgtgccgccatcatcgcggcatcgaggccgagcgctgcggcgggccccggaagcccggccatgaacagcgcctcggcctcgccctgcgacaggccattgagccgcacgcgatagccgtcgagcagccgatagccgccctcggcgccgcgatcggcatagacgggcacgccggcggcggcgagcgcatcgatgtcgcgatagatcgtgcgcaccgaaacctcgcaggcttccgccagctcgggcgcggtgacctgtccccgcgcctgcagggtggtgaggatggaaaacagccggctcgcgcgcatggcgaaatcatacctgacacaagatgtcaggtataggtagacataagggggccatcccccgacggcgcaaggagacctgcccatgaccaccgctgcccccaccgatcgcgtcacgctgtattactcgccgcagacccgggccaccggcgcccgcgtgctgctggaggaacttggcgcgccctacgatctgcacatcctcaacataaaggcggctgagcagcgcaaggccgcctaccttgcgatcaatccgctcggcaaggtgccggcgatccgccacggcgacgcgctggtgaccgagcaggtcgcgatcttcatctatctcgccgatctgtttccgcaggccggcctgacgccggcgctgaacgacccgcgccgcggtccctatctgcgctggatcgcctactacggctcctcattcgagccggccgtgatcgaccatttcatgaagcgcgctccggcgcctatcacgcaatcgccctatgccgattacgacaccatgctggccgcactcgaggcgcagctcgccaaggggccttatctgttcggcgaagagatcacggcggccgacatcctttggggcatcgcgttcaactggaccatgatgttcggcatcgtgccgaaaagggacgtgttcgtccgctatgccgaacgcatcgccgcgcgtccggcgttccagcggattgcgaaggccgacgacgagttggcggcgcagcatgccgcggccgccggcgtgtgatacggatcgtggcgatggcgaaagtcctgcacagcaccaactgcttcaacaccctgatccgcgtcgcggaggattgcccggcgcagcgcggcgaggagccgcagctgcgcggcggccagccgacggtcgccgtgctgcaatatcggatgctcgccggcgcgccctacaaatacacctccgacgatgtggtgttcgtcacatcgtcggccggccgcgcgcttgatccaaaggccgcgaagaaggaacgcaacgcggcacgcgagacgttcttctcgcgcggccaggcctgcatgcgcgcctcgccgctcggcaagcgtttcggctggggtgtccacgccgacgacgaaggccgcatcgcgatctacgccgtcgacagccagcgctaccaggcgttggcgcgcgaccctgagatcgcacagacgcgcgcgatgcggagcaagcgggcgtgaggggattcagcgaaagatcgtgccgaatagcatactgtcagctccgtcatcctgaggagcgcgtagcgcgtctcgaaggatgcacggccacagtggggccgtcgacccttcgagacgccgctccgcggctcctcagagcgtgtgaatttttgtggcttgggcgaaagatgtagcgggagggatgggggatgtgattccctgcaatcgctgaattgcgggagagcgggagatggctgaagaccagctgtttggagaactgccggagcagccgaagccgcaaactgatgcggcgccagcgggtttgccgcgtctgcgcgagccgcagcgcgatcagattgaactgcgggcggtggatatcgatagcctgatcggggaagatcatccggcgcgggtgatctggtgctatgtcgacgggctcgagctgcgcgagcttgaagatcggatcaaggcgcggggcgagaggccgggtcatccggcgacgtcgccacggcttttgctggcactgtggctctatgcgaccagcgacggggtaggaagcgctcgcgccctggagcggctgtgcgagagccacgatgtctatcgctggctgtgtggcggggtctcggtgaactaccatacgctggcggacttccgggtcggatgcgccgatctgctcgatcggctgctcgccgaacatcttgcggccttggcggaggtgggcctggtcgacctcagc

SEQ ID NO: 80 - DNA, 6744 bp, Bradyrhizobium enterica
gcttcgccggcgcggcgcggcgaaggcggccgtgcctgggtatcgaggccgggcgggttttgcggattctgcggccgaggcggggccggcggcggcacatcggggcgcaaattgcgcggcggacgcggttcggccggcggtcgcgggcgcgcggcagtgtcggcagcattcgcctccggcggccgtgcattggcctccggcggcttcggattggcacggcgcaacgggtcggtgctgctgcgggcggcgccgccgggccgtgaggcttcacgggcgcgttgcgcggcctcggactcgaccttgcgcaccgcctcttccagcgacagccgttcgcgggtgatctcggactccgagagcggcggctgcacgccgcgaagttgctggatcaacgccgtccgcgcccgcgcatacagcgcgcggcgggcttcgccgggagcgttggggtccagtccggcgatggcacgggcgatcagcgggtagtagtcagccatttccacacaattggtgggatataggtaatatcccgttaagcctcgaacggattctgtaccagaatagtatcttcacgttccggactggtggacagcagggcgatcggacaccccaccagctcctcgacccgccgaacatacttgatggcctgggccggcaggtccgcccaggaccgcgcattggccgtcggctgcttccagccctcgatgatctcgtagatcggctccacgcgggcctgcgcgccctcgcccgccggcagatggtcgatttccttgccgtcgagcttgtagccgatgcagaccctgatgctgtcgaacccgtcgagaatatcgagcttggtcagcgccagcccggcaattccgcaggtccggaccgtctgccgcaccagcatcgcgtcgaaccagccgacccggcgcttgcgcccggtgttgacgccgaactccttgccgcggcggccgatttcctcgccgatctcgtcgttcagctcggtcgggaacggaccttggccgacccgggtggtgtaggccttgcagatgccgagcacatagccgacggcgccagggcccatgccggtgccggtcgcggcctgcgccgccaccgtgttggacgacgtcacatagggataggtgccgtggtcgacgtcgagcagcgcgccctgcgcgccctcgaacaggatgcgcttgccctcgcggcgcttgagatcgagcagccgccacaccgtctcggcatagggcaacagcttcggcgccagcgccgacagctcggccaggatgctctggccctcgatctccggcagattgttgccgcggcgcagcgcgttgtgatgcgccagcaggcggtcgatcttgtgcggcagcgtgtcgaggtcggcgaggtccatcaggcggatggcgcggcggcccaccttgtcctcataggccgggccgatgccgcggcgggtggtgccgatcgaagtgatggcgttggaggattcgcgcaaggaatccagctcgcgatgcagcggcaggatcagcgtgacgttctcggcgatgcgcagattgtcaggcccgaccgcaacgccctgccccttcagcttggcgacctcgtcgaggaaggcctgcggatcgaacaccacgccattgccgatcaccgccagcttgttcgggcgcagcacgcccgacggcagcagcgccaacttgtaggtctcgccgttgatcaccagcgtatggccggcattgtggccgccctggaagcgcacgacgatgtcggcttgttccgacagccagtcgacgatcttgcccttcccctcgtcgccccattgggcgccgacgacgacaacattggccattgcgaagatgttcccttcaggtgtttcagaccatgaccatgatcgcggcgaaaacgcgtccgccacagcgatcatgcgttgatatgcccagcccaaaccgcggcgcccggccgcgcgcacgcaaggcgcctaccggataacggaagcgggtcggctgcgcaagcaagaagggggccgtttgcgccttttggacaagctacaaccctttgatatcccctgaaaattccatacggcgccgcgccgcgccaccctggcgggaatttaatgttggcgcggcccggggcagcccgtccgggcgattgatcggcgagcccattgcggcgatcattccgccgtaacaaccggccggatccatgcccaattcgacccaggcgacgatggcgctgcgcaagctaggcattgccttcaagctgcacacctatgtctacgattccaacgccgagagcatcgggctgcaggcggccgaggcgctcggcgtcgacccgaaccgcatgctcaagacgctgatggcggaggtcgacggcaagccggtctgcgccgtggtgccgtccgactgcgaggtcagcatgaagaagcttgccgcggcgctgggcggcaagtcggccaggatgatgcgcccggccgatgccgagcggctgaccggctaccatgtcggcggcatcagcccgttcggccagaaaaagaaggtaccgaccgcgatcgacgagaccgcgctcagccatgtcacggtgttcgtcaatggcggccagcgcggcctgcagatcgagatcgatccgaacgacgccgcgctcgccgccggcgcctcgatgaaggcgctggtggcgacgcaggattgatcgtggcgatcagtgcgaggatttgtcccggacaaactccgcgccaacgtaatcggacaggccgctcaattcctctgccgaaatatcgttgacgttgagcctgagctgcatgatcgccaggtcgagcagatgtgcggcaaaggttgcgccggccgccgtcacgatgctgcgctgttcgaccaacaccgcgatgacgtcgcgcaagctccgcaattgcacttgatccatggccctttgcccgatgctggccgtcgtgatgtgtgttgtcatggggaaaccggttgcagtgtgctgatggacgccgcgccgacgggtggaatgtacggcagccgcgcggcctccccgccgagctgcgggatgcgcgagcggacctcacggacttcgatgtcgatggtcattgggggcggcaccagcgtcaccgaggctttcggccacggcgccggattcggactgacggcggtaaagcgataggccgcggcgatctcgagcgcgagcaattgcagttcgagcatcgcaacgcccatgccggcgcaggcgcgcggtccggccccgaacgggatgtaggcgtcggtgttgtagcgccgcgtcatcaggaagcggtcgggctgctcgaaatgcctgggatcgcgctgcaattgccaggggcagagcaacagcgaggtgccgaccttgaggtcgcgcccgccgatcgtcaccggctgcatcacctcgcgggagaaccaccaggcgctgggatagagccggcagacctccttgaccagggtcgcgctgacgtcggcacgcctgaccgcatcgacgcgcaattcgccgtcgtcaccgatgcaatcggcggcctcgtccgcgatctcgtccatcagcgcgggatcggccgccatgtgatagagcacccaggcggcggtcgatccggtggtgtggtggccggccagcagcagcgtgaggatttcgtcgtgcaggtcgcgatcgctgaggccgagcgcctcgagatcgcgcagcgcgctggtcgagccggcgctgctgcgcagccgctgcaccacggtcgacatcgcaagcttggcgcagatccggttctgccgcctgcgataccaagacaccggtccaagcggcagcacacggaacatctcgtcggcgagatcatcctcgatggtgccgaccgcctgcaccagggcctcctcgtcgccggacgagatgacctgggcgccgaacacggcgatgcagatcgtgcgcagcgccagcgtcgccgtgaagcgatgcggatcgaacgcgccgagccgcgccagccgcgcgccgaccgcgcggatctcggcgcacatctgcggcaggtatttttcgacgctgccctttgccatgtgcttgtgcagcaccgcacgccgccgcttgtgctcgtcgccatgcagcatcagcgagctctggcccagcaccggcgaaagcttcttgatcagccggcccttgccgatttcggtttccggcgccttcaggatcgggcggatcagatcgggatcattcaccagtaacaccggcgcaggcccgagatggagcggcaccagcccgagcggcgcggcgttgccgcgctcaagcaggaatttgagcgggtcgctccgaaacgctcgaacgtccgagaacatgtgtggcatcgtggatctccaattgccgtccaaggtcgaggaatttggtgaggccgggattgccggcgatatcgagcgggatctcgccggcgagcgccgtcagcggtcggccatagcggtcgttgccgatcacctgcggcggaccgtagcgctgggtgcggatgcccatccgcatcaggaagcgctcataggtgaggtcggccatcgccaccagcgccgctgcgccgcgcaactcggcgaagcgaaacatcagcgcatagttggcgcgcgctgcggatgcggtggccgcacccggcagcacaccgaagcggctgatttcccaggcgtcgcggcgactcggaaagcggcgctgtgccaactgcgggaagaccgacttggtgagataggggtagtcggtgcggatggcgcggaagccgccgatcagttccgagccgagaaacagcaggcaatgttcggtataccagacgtcgaactggtcgcgctcgacgtcgccggtcgtggtcagaagccagccgcaatgatcgacgaacagctgcttgcgcagcctgagcatcgcctgaacatgtgccggatagcgctcctcggtcgtgacgagcgcatggtattccccccaaaggtgcgacattccctccgcctccagatatcgccggcatctgggacaaaaaggcttaattgtggtacccccggaaaccgggggttttactcaatggtcctggcagaagcgatttcgagcatcgaggcgtcgggcacgatcgacgagcttcggctgtcgctgcacaaggtcatccaggactacggcttcgccagcttcgccttcatcgatgccggccggcccgagctcgacctgccctaccacaccggcacctacaacccggcctgggagcgcgcctacatccagaacgacttcgtccattgcgatccggcgttgacgcgagtccggcgaaccaacacgccgtttcactggggcgagctgaagctgccggagcggcaaggccgcaagcgtccaccggagctgaggatgatggaggccgcgcgcgatcagggatttcgccagggcttcgtcgtgcccttccactatcgcgaccggctcggcgccgtgcattcgagttcgacggtgttcttctgggaagaccagccgcgcgacttcgacaagctgttcatctgccaccggcatgaactgcatctgttgatgatctactgggtgcagcgggcgatggacatcgtcaaccgcgaccagcgcaatgcgccgtccatcctgaagccggccgacgccgccgaaaccatcaagctcacggggcgggaaaaagaagtgatcgcctgggcggcgcgcggcaagaccgtggccgacaccgcgcagatcctcggtatttcgccggagacggtggaaggcttcatcaagcaggcgctgcgcaagctcgaggcatcgaacaagacgcacggggtggcgaagagcatcgcgctcgggatcatcgacttgtgagcggcgccgcgcagcgatcgcggcggactcgggattgctggcgcgcgtcaggcggaaacaccgcgacatgtggcgaggtcacacatccgggttggattcatcacacccgtcgctcgcaagttgcattcgtctgcagtcttgataataaggtcagggaccgggtgatgcgaatgcgagcgtcgcggaccatgggtgcgcatcgcactgtccacccggcgcgacggcccggttgtcgtggaggcgcggatattcccgcatgtcggacggtgcggccggaccaatcgtcgatccggatcatccgtagaagtcccgtcgcgacgaaccgcagttccatttgctaccaatcttggtcggggacatgccgccaaccgacgtagctggagatcgccgaagcgcaccatgagcacatcgcaggacgaccagatcgatcaactggtgcaggcgcgctggcgcgcaatcggattgtcgcaggcagatctcgccgagatcctgtgctcgggggcctccctgcagaagaacggcgtggacggcgccgtgaaggtggatagcggccgcttggcgaccgttgcagagatgctcggaatcgccgccgacatgctcaatcggcggccggccgcgacggcgcagccacaaggcggccaggcggcagaatcgctgcagtccctgctcgagctgcgcatgctgcgggtgttccgcgacgtgcgggaccccgacaccaggcgaatcctgatcgagctcgccgagcagatcgtcaagcgccaggccatgccgccggaaaccggctaaagcgcgatgagatcaggttgaatcgtcatcgcgctttagattcttgtttaagcatgatcttttcggaaaaccgcttcgcacttttccggatcatgctttagcaggacgccgtcgcggcgctccgtaaggggccttcgcgcatggtcgcgatgcgtccatccccattgatggaacggcggaatccgtgtctgtgacatgggc

SEQ ID NO: 81 - DNA, 5983 bp, Bradyrhizobium enterica
tacaagcactgccacgggcggtacgcttagccaatgatttcaagtagttaggcgtctcgactgttcaaaactcggtcgtttttgtctaactctcgaaagcatttcaatcctggtggtgcttgctgaacttcagggacaccacgaatggacggcgctcgctatcttgaagatggcaagctcacgatttttcgccgagccggcacctactacgcccgcctgcgactttcgccggggaaatatgtaactcggtctttgaagacgacagttgaggagactgccgttcaaacaggccgtcggctgctgttccaaatggaacaccgagccgagcagggcttgccgccaaaatccaaattattctcgactgtcatcgacgagtacatccgcttccgtgagcgggatcatgcgcacggcaagacctcaacggggatgctgaggcagatcagaagagtttcgaagttctggcgtgagtacgctgggcagctcgccgtcgaggacatcaacgacaaggtgatgcgggagttcgttccctggcgccgtgactactacgcctcgttcgacaagctgccgaagaacgccaagcggtatcccacggataagacgcttcagtgggacatgatgctcgggaaggccatcgttaggtgggccgctgagcagggctggcgaggcaacaaaccgccaatcactatttccttcacgccgaaaaggaaacgtgtgcgtcctgcgtttgagcgctgggaatactgcaagctttggcgcaccttatgtaagcgcatcaaaacggcaagagatgttcgcacccgcaaaagcagggagctgttgcgcagttatgttcttgtcttggccaactcaggcattcgcaccggcgaagcaaacaatctgaatgtccgtgacgttcacccgtttacagatgaaaaaggtcgcaaaaatttccgcttggtagtgcgaggaaaaactggtgagcgggacgccatcttgagatcggtcgcagccaaacgattggacaaatacttgacaaagcgtcggaaggaagatcccgacgacttgctgttcgtcatgccagacggatcgaagattatcacgctcatcgatcagctgaatgcagctttgcgaggtgccggggtcgagcggagtagcttcaacgaaaagtatactgtctacagcctccgacatttctatgcagtcaatacgctccgcaatggagtgggcgttttcgaagtcgcccgcaacatgggtacatcagtgcagatgatacaagagtactacggaaggcaggctacgcctgctgtgtttgctacgagactcggcgactagcccacgaatttcctggtccctgaactggctctgcgggcaaaagcttgtgcgccttgggacctcgggctttgccaggcaacacgactcgcttacgttgaaaggaccggattcccaactggagattcgcaagtgtggttacaaactgcctgtgatgctctgctgtcagggcatgtccttcagcttcgatacgacggttacaatcgagacgttgaagtccatgccgtcggaattactaaggaggaccacgctgttatgcgtgtttggcaggttgccggaggcagcgtcagtaatgaacctgtgggttggaagctattgcgattggacgaagcaactggcgctttcgttactagccaaaaatcactggcaccccgccatggctacaaacggggagataagaccatgatcaccatcaaatgtcagctctagcacgcctcagtcgcttggtccgattgaacgagaaagcgacgagaatctaggaagcctgcgatgcctaagaaactaatccctatggctattgcgtacgatttcgacgggacccttgcgcaaggcaacgtgcaagaaaatacctttattcccgctatcggaatgacaaaagccaagttctggtctcgcaacaaggagagagcagagaaacacgaggcagacgaaattctctcttatatgacgtttatgttggagcgagcaaaagcagccggagtgccggtgcgtcgcagagacattgcccagcatggcaagacggtcaaattgtttcccggcgtcgaaaagtggtttgctcggatcaacgctcatgctggtcgacacaatgtgaaactggagcacttcatcatctcgtccggcatcaaggagatgataagggcgagcaagatcggtcgccagtttcgcaagatcttcgcctcttcgtttgcttatgacgaaaatggcgtcgctagctggcccgcattggcgatcaactacaccactaagacgcaatacttgtttcggattaataaaggggcgcttactgtcagcgatcacaaaaagatcaacgaatacgtcgatcctgaccagcgaccgattcccttcagcaacattgtgtttatcggtgatggcgataccgacattccttgcatgcgcctggtccgtgagcagggcggccactcaattgctgtctaccgaccgaacacgtccagcaagaaggcgcagaaactgatcacggacagacgggcagacttcatttctccggcagattattctgacggaaaatcgctggacctcatcatgaaaacaatcatcgaaaagattgctgcaagcgatgctgtgcgccagatgaaacgtaacagttagctagaccaagattggtccatgccagcactggcgaatgttgtgtcacgggacaacagcaatcgacaggcaccagcgaaaccggcgttgctaaggtgacaagcccagggattgactgcttactgaaggagatcaattgaagctagcgttgatgaccgaggccaatacccagcttcagcgccttctgacgtaatgaaccttcggtgcgtttcatctctttcgcaattctcttgagaggtgttctcgccctcgagtgtgccttcagtgctttgatgtcatctttcgaatagcgaacaggagtccgcttttttgctttttttgccattgagggctccttgaattgaggggccttcgtaacaggacttatccccctgtcaacattgaggtgcagaagaagggcgctcggctaagatgggcggaaattcgatgttgaagagatccccgattgtaacgctctggtcatgcccgatggagcgcaaatcatcacgctcatcgatcagctgaatgcggcgctccgagacgccgggatcatcagaagcagcttcggtgaaaagtatgccgtctactgcgtacggcacttctgtgcggtgaatgcgctgcgaaatggcgtcggcgtgtttgatgtcgctcgcaacatggatacatctgtgcagatgatccaagagtattacggtaagcaggccacaccaaccgtgtttgcaactagactaggcgactgaatttacgaaactaattcgtaaaatggtggctagctcattcgggcaatcccggacaactatttacaaaacgatactttgcggtattctacctaagggagagcaagctcaatgactcgcccaatttcagctaagcaattttaggagtcgagaaaatgtcgaaaccagaagatgttgctaaagctctcgaagaactcgaaaaggccggtgctaagattcatgagggggacgccaagggaaaaaaggtcaccgcctctgtgatcggagacattcggaaaggagtgtcgccgcagtttgacgcctgggtgagctggacgaaaagcttctaaagaatggcccaacagcagataattttcaaattggcagaaaggtgcaatattaattgcacctactgctattacttccacggcggcgaacgagattttctaagtaagcccgcaagaacaaaggcagatgtcggagatgcgctgagcgattacctcaagcgtactttggccgctggagagatagataaagcgcaagtaattttccacggtggagagccgttgctttacgggaagaggcggttcgacgctttatgcagcaaattgcgatctgacatcgattccccatccctggatttatgccttcaaacaaacgcaacactgatcgatagcgagtggattggaatttttgagcaacatgatgtgaaagtttgcacgtccttagacggtcctcaatctgtgcacgattcatttcgtgttgatcataggggacgagggacgtaccagaacgttcggcgtggaattgatttgttgatcgaggctaagagagcgggcagactttcaagcgtggcttgcctcagcgtcattcagccaaaattctccgggagggacgttttcatccatctagtaaatgaagttgggtttgatcaactcgactttttattcccggatgtcacgcatgacaatttcactggggattcgaagtcatatggccgctttttgattgaggcgttcgacgagtggttcgcccaggacaatccggtcgtgaacatacgtgtgcttcgctcgacgatgtcggtacttctgggaggcaagtcgtacctggctgggtttggctcgagccagccagacgcctttactgttcgctcggatggcgctgttgagctggacgatttcctgagagtctgtggcctagacgttgtggatacgggccttactcttaaagacctgcagcgcacggaactgcgttcgctgatctcagctcgagctctcgacgctcaatttagtaacctaccattgaaatgtgctgactgtgacgtggcgggcgcttgcaagggaggccaaatctctcaccgcttcaaagcgggaaatggcttcgaagaacgatcggttttctgtgaggggctgtatgatctctttgtgcatgttgcgaaagcattggtcgaggcaggcgtagccagtcagtctgttgttggactttctcgtctagagatcgtccagtagtccggcggacgctgataagcgagccagacaacacggctatcccgtggaacatgaggaatgctgttagcgcctcctccaggaaggttaaatcaagcctaacgagctttccggcttgccttgtgtgtattcagaaattcagccggttcaacctcgagcgtcgcagcaagcttctcgataatctttaagctggcgtagaacacgcccttctcaagctggctcaaataactccggctaatacccgcctcataggcgaggtcatcctgcgagaggcccttcgcattccttatgcgccgtagatttgtggcgaacacttcccgcaggtccatgcagggaagcatcgagtgttgttcaatatatcacacctcgatatactgaacaaaatgtgctatgccgctcgttgttagcttcttttgttgagcgacgggggcaatttgaaaatgcgctacttgccgctactttcggtcttaatgcttgcgggctgcaattccggagatctcacttgcgactctccgcaagtcactacggtcgtgaccgatattgccatgaagggcaaaggcagcatgtacaccgcagcgagaactgcgctgccgtctgtggttgatccatctacgtggtcaacgttggaggccgaagcgaagcagattagccgcaagatccaagcagcaaaagtgcggtgcggcaactctagtatggtgtgcgaggatatgagcgtcacgcccacgttggctgcatttcgtaatatcaactataatggatcaaggccgatgactgcggccgaagtggcgtattacagctccaacttcctgcctttgttcgatcaattgcgatcccttcaagacaagcggaaggcgattcaggaagaggctcggatcaaagaagaaactcaattagcggagttcgataaatcagttcggtatgaactcggccttatccgaccgcagcagaaaaacgagcagactggtgcaattgcgtgcgaaggtcgactgtcaatgcatgcttcaactgggacttggtatcgtgaagtgttctacacagccgagcgaacgacggatggcaacgtctttgttcgagcgcaaaagtcggattgacgagacagcatccccgttgaggtcttgccgtgcgcatgatcccgctcacggaagcggatgt

SEQ ID NO: 82 - DNA, 5824 bp, Bradyrhizobium enterica
agtcgtggccggatgttgcggggataagagcgaggcggagcaaagcgacgacggccttcggtcagacatgccaaatcgaggacgccgtgggcgagccgagagaaacggttagtggacatcaacggcgacaatcgacgtcgtgacgacggacagaaccgccggcagagcgcacccggttggcaatgcgtgaagatgcacatcgaagcccgaagcaacaggtgaccgcgcggctttgctgagcacggctgcgatggcccgtcgggcgctatcatgccagtcgaccggggacaaattgggacccgcgcagaaagcgctgatcagagatcgcacatgccttcgcattcgttggcgaggagatcgagctggccacggtcagcgtcttcaaagtcggtgccgtatcggcgacatcgggatcgagtgggcggcttctgcatggtcagggtccgtcaaggcgggagcttcgaatggcgtgatgcgcagcgggcatcacgccgtcggtccttgaacatacaatgcaaatgcattacactgggacgcacgatcggagccttcgatgccgaaaaccgccgaaatcctcgaaattcccgccacgatcaccgagcggggccaaactacggttcctgccgccatccgcaagatgctggcactgggcaaacgggaccgcgtggtgtttcgagggcttgccgacggaacggtcgtcctggccaagaaagcggcggacgagcaggctgaccccgtcatcggaaattttctgcgctttctcgagaaggacatggcggcgcacccggcgcgggttcgagcgattccttcgactctgctcgcgcgcggtgcagccctcgtcaagggcgttgaggtcgatctcgacgcagccttgccggacgacgatgcgtgacggaccagacgatcgaaatcaatggctggaccatctacgcgcatccgctcttccttgatcagctggaggccctaatcgcggccgtcgagaaggcgcgtgccaaagacccgaaaggctataagacgaagcgagcggcaaaactgcttgccgcggtcctgaaagtcgcctttgagaacatccccgccgatccggccagcgacgtattccgccaaggcgatacgctcggcgccgactacaaacactggtttcgcgcgaaatttttgcaacagtatcggttgttctttcgctatcagcaggcggccacgagcaagattatcatcctggcttgggtgaatgacgacgacacgctgcgcgcctatggcagcacgacggatgcttacgccgtgttccggaagatgctgaaccgaggaaacccacctgatacgtgggacgcgctggtcgccgcagcgtccggcgccgggccgaaatcgcggttgcgagcatcgagagcgaagccgaaggattgacgcctgtgccgaccgataggggagtggattgccgctgtttgccgattggtgtgattgcgagcccgcgcaagacggccgcaagcgcttactgaaatttaccgagcgggttgggggacgagcggcaattgctggccgtcttcccgatctgctgcgctctcactacgacgaaatggaacgcatagcggaggatgtcgcccttctcggttatgcgagcgccgcagcattgctagccgagcgtcttccccgaaccacgcgggcacgctccggcgagctaggggaaatcttcgcaaccgagctggttgaggagtcgttgggcttctcggtcccggttcgtcgccttcgctataaggatggccgcgagatggcgctccgcggcgacgactttatcggcgtgcgatcgagtgctgagggacacctctttcttttgaaaggagaagccaagagccgggccaatctcgccggcgcaacgattatcgaggctcgaacggcgctgtcgcgtgatagtggccggccgacggcgacctccctgctctttatcgccgacaggttgatggagggtgatggtccgctcgcggcattgggccgaatcatccgaaatgaggtcgcaagccgcgcagttccctccgatcgcatcgaccatgctctcttcacgatgtccggcaatgccacgccccgagcgcttttcgacgatctgcgcggtgccggcgttgatcgcagccacactgtaatccaccttcggatcgacgatcatcaggagttcattcggctgtcctacgagggagcactcgcccttggagacggttgacgaactggcagccttcttgacgcaggcgaccgctgacggtgtcaggggtcggctgcaagctcgcggcgaggcgcggtccatcattcgccgcgacggcgtcctgcctgacgatgcgccggcgttcggagaaacgattgacaccgatctgtccgaatatgcgctctccgtgctgcgcgcatccatggcgcttcgggaaggcggcggcaacgatgagatttggcggcgcggcttcgcgcgggccggaaacgcgttcgaagcactggtgcaaaatggctcccacgaggatgtcggccggggcttctatcggatcgcaggcgccgccgcgtatcatctggcaagctactccgctctcgccttctctctgatctctcaacggcctgagaacgcgaatctatcgccagcggaagaagcgttggcgcatcttattttgcgggatctggccggtctaggtcgccgcgcgcgagcgtggctgctgaacccagcccatggtgatgcaaatattagccaggcgttgcgcgcaggagagattgattcggacgacgccgtcaggttgatcgccacatcaaccatttttcgcgccctcgcgttcttcgaattcgctcttcagaccggggccgcggtcctgattgaggagtctcggtccctcctgcgccgcgcgatctccctcgccaggaacgccaatgccgtgtcgctgtggtggaccgcgcgcatagcgttcaatcttgtcgatgacctgtggtctagcagcttgcatcaggtgcttcccctcgacgggccggcgggcgcgggaaactatcaggatttgcgccaactcttcatcggggaactctttggacgtgacgtcgccgaggtggagctttggccgtcgcagatcgaagcagcccgacgagcaaccgatgaccgacgatctcgtcgtcgcgttgccgaccagtgctggcaagacacgaatcgccgagatcgccgcattgatggcgctcgcggcgcgcaggcgggtcctcattgtaacgccgcttcgcgcattatccgcccagacggaacgatcattccgtcggacgttctcgagccttgggttctcggtctcgtcgctctatggcgcggctggagccgctggcggcgacgaagacgcactccgtacgcaggatattgtcatcgccacaccggagaagctggacttcgccttgcggaatgacccgtcgatcatcgatgacgtcgggctcgtagtcctcgacgaaggtcacctgatcgggccaagcgaacgcgaaattcggtacgagaacctcgttcaaagactgctcaggcgtgctgacaacgaaacccgtcgcatcgtctgtctctcggcgatcttgcccgaaggggatcagcttaacgatttgaccgcttggattcgtagtgatgcaggtggaacaccgattcagtcgcgctggcgaccaacgcggcaacgcttcggcaccctcatgtggcagggtaactcggcccgcctgagcttcgatctcgaagcaggcggaccctatattcgtcatttcgtcccggaggaggcagctcgccggccacggcgcacgccgttcccgatacaaaggagctgacgctcgcggccgcatggaagttttcggctcagggtaagcgagcgctcgtcttctgcacgcaacgtgatcacgtcgagggatacgccgagaccatcgttgacctgcacagtcgcggttatctgccctcgctgcttgacgacgcagccgcggtcgcgcgtgctttggccgtgggtcgcgagtggctaggcccggatcatcccgcggttcggtgcttgccgatcggtgtcgcgattcatcacggtcggttaccagggccgttccttcgcgaggtggagggcttgctcgccgcaggcgttctgcgcgtgacagtcgcgtcaccgacgttggcgcaaggtctcaacctcaatgccgctgtgctgctgattccgaccctctaccgtgctggcgttccgttgtccggcgaagaattcgctaacgtggccgggcgtgcaggccgtgcctttgtcgatctggaaggccttgtgttgcacgtgatgttccaagccgaggggtggcgacaacgcgcttggcgagacctcgtcggatcggcgacggcaaggtcgctttcaagcggcatcatcaccatcgtcgccgaggtgctcaaccgtctggcgcgcgcgaacgtcttcctgcgggccgacgcaatggagtatctcgcgaatgcccaggaggcctggtttccacaggaccatgccgctgatgccgagccgatcgagagtctgatcgaaaagctcgatgcaactgtctttggtctcatcgaagcgctggacagtggcagcgcggagcttccgcggctaatcgacgaagccctgaacggatcactgtggtctcgccagatcgcccggctaggcgaacagacccgctacaaccaactgtggattctccaggctcgcgcgcgcctaatctggaacaaatcggacgccgtgcagcgccgcgccaccttcgcgatgggcattggactggaagcgggcctcgccatcgacgcgatcgcccctgaattgacggaacttcttgatcgggctgatgacgcagcacagaccggcgcaattgacgatttgagcgccgctctcaccggcatggcggcgcgcttgttcggcattcggccattcgtgccggatgtcgatctgccggcgaattggcgcgagctcctcgcagcctggcttcgcggcaccgatgttgtcacgatcggtctggacaacatgcgcgtcatcgaagacgcgttcgtttatcggcttgtatgggcaatcgaggcgatccggatgcggcgccgtgcgagcggcggagaatcggactttgttgaaggcagcgccgcggccgttcttgaggccggcgtgccgcaggccatgatggcgagtctagtccgggccggactgccctcccgagtcgccgcaatggccgcgattcgtgaaacacaaccggttttcgtcggtggggcggaaatgaaccgatggttgcgatcgaatgagattgcagcgctctcggatcagcccgattggccgaccgccgatacagcgcatatctggaagaagttcagaaatgacgcactcagtggtgcaacctcgaagtggaaaactcaggactggacgatgcaaggcgacgtgcccaactttgtcgatgtgggaatgccgggtcgcatcgagattgaagaacatacgggcgcagtgtcggtcacgacgccggactaccgctccatcgttgggatccgacagcgccttcggcaatttcgaccaagtctgtgccatgttgaattcgcgaccgaccgtcgcagctcgcgcatcatccggcttgggcgaggtgaagcgcaatggcaagacaacgaggggtagacatctgatgggtatgcctagaacatctgccgtcgctacgccggggacaaaccgcatatgccggagccgggcacggagccgccgggccgcagcgcgctgaacgcgcgattgatcacccgcgtgagaagagacgtcgatgcagaaacggccccgcctttcggcggggccgttgccgtggaggccccttagtcccggttcggtcgggaccagatgagctggaggccctcctggcc

SEQ ID NO: 83 - DNA, 5436 bp, Bradyrhizobium enterica
ccgcaagatccatcccgcctatctgttcgaggtgaagaagccatcggagtcgaaatatccgtgggactattacaagctgatggcgacgatcccggcggatgaagccttcctgccgctcgagaagagtgcctgcccgctggtgaagaagagctgaggcgccgtcatccccgtacagggcgggtcagcttcgctggcctgccctgtgcggctgtcttgccttgggggcgaagtccagccgatagcgcatcggactggtgtcgaggcgggtccgaaaatggtggcgcagcgcatccgccgtgccgaaaccaaccgcggtcgcgacgtcctcgaccgacatggcggtggcttccagcagatctcgtgcctgtgtcatgcgctcctgcagcacccattcgcccggtgacatgccggttgccgcctcgaagcgccgaatgaaggttcgccggctcatgcgggccctgcccgccaggctctcgatcgtcaggtcgcgatccagattcctccgcatccatgcgcagagctcggcgagaggatcgccctcggcaaggaccaccggatttggaatgaactgcgcctgcccgccctcgcgatgcgctgggatcaccaggcgccgcgcgacatcattggcgatctcgggcccgaaatccttgcgcacgatatggatgcagagatcgagtccggcggcccgcccggccgaactcatgatgtccccgtcatcgacgtagagaaccctggcatcgacccgcagcgaaggatgccggcgcaccagcggctcggcatgagcccaatgcgccgcgacgcgtcgtccctccagcagtccggcgccggcgagcacgaacacgccggaacagatcgatgcgatgcggacgccgcgcgcatgcgcacggcgaagcgcagcgagcaccgcctcgggcggtgatgcctcgatatcctgccaacccggcacgatgatcgtgcccgcttgcgacaggaacgagaagtcggcatcggcgacgatcttgacgccggccccggccgtgagcggcaccccgggccgctccgcgcaaaccgcgacccggtaccagtccggtctcatgttcggcaagccaaacacctcgagcgccatgccgagctcgaaggcattgacgccgtcataggccagcaccgcgaccaccctgtcgcgggaacgatcccgccgggccccgccatcacctgccggcttcgtatgtcgcgatcttggcacgatattcacgatatatgtcattcgtgccaatggtcaagaacggcttcccgcacgcatggtcgagcctcgcaatcgaaccgacatgcctggagaaatcatgaccaacactgcaacgtcgtcgccgggaccgtcggcgtcctccctcgaacacgggaagcaccgggccgcgcaaggcgtgtatctcaaggggaccttgtattgcctcgcagcgtcagtctcgttcgggttgatgtttcccgtgatggcaagtgcgctcacccgcgtcgatcccttcaccttcacatccctgcgttatctgatcgcggcggccgtctcgctcgtgctgctcaggatcacggaggggccaaatgcgctggacctgcaaggcgagccgatcgcgctcgcctggctgctgggctcggtcgggttcgccggcttcggcttcctggtgtttctcggccagcaactggctggacgcgacggagcgttgacgacatcgatcatggccgccacgcagccgttgctcggcatcctcatcatctcagtggtccgccgggttcttccgccgctcgtgacgatgctgctggtgctgctgtcgttcggcggcgtcgcgctcgtcatcaccaagggagacgtcggcgggctgctgcgcgaaccgcagaactattcggccaacgcgctgatcgtgctcggaatgatcttttggctgatttacaccttcagcgcggcgcgcttcgcaagatggtcggcgctcaaatacaccaccatgacgatgtcgctcggcctgaccacgatcgtcgcgatcaacgcgatcctcgccctgacgcgggtgatcgcgctgccgggccccgccgatctgctcttcattgttccgcacctgctctacatgagcctgattgccagtgtcgtcggcgtgctgtgctggaatctcggcaacaagatcctgacgccgctcaacggcgtgctcttcatggacgtcgtgccgatcaccgcattcaccgtctcggcgatcgccggcgtcgtcccgacgcggatccagatcgcaggcgcatgcatgaccggcgtcgccttgatcctgaacaatctctacctgcggctccgcgcgtgacgaagtcgccggatttgcgcagcgatcgaaccccgaaggagacgctcaatgagactgcaactggtgcgtaacgcgacgttgaagctcagggtcgctgaccggacgatactggtcgatcccttccttgcaccgaagcacagccggccgtcgatcggcgggcggtcactcaatccgctggtggatctgccgatccccatcgacgacatcctggatggcgtcgagcttgtcatcgtttcgcacctgcattccgatcatttcgatcccctcgccaaatccttggtgccgaagcatctgccgctggtctgccagcccggcgacgaggacaagatccgatcgtttgggttcgaggacgtcataccactcgcagaccggatcgattggcgcggcatcaggctgctgcggcgcgacgcccgtcacggcaatggtccggtcgtcgagaagatgggttcggtcatcggcttcagcctggaagcgcctggcgagccgaccctgtactggtcgggcgacacggtcctctatccggcggtcgaggaaacgatcagaagcaccgcgcccgatatcattgtcatccatccttgcggcgcattgtgggaaggcgatccgatcgcgatggatgccgagcaggcggttgccgtatgcgaggcggctccccacgccatcgtcgtcgcaacgcatctcgatgcactcgatcatgcgaccgtcagtcgcgccgatctccggcaatacgctcgatcacgcggcattccggctgcccggttgcgtattcccgacgacggcgaggtgctcgcgttcgatcggttctgacccgcgtacgagatccccggctaccgctggtcgcgcgccttggctggctacttcttcggcttgctgaacttgaagtcgaggctgaaggagaactgatcgtcgcgcaggtccgccggcggcggtggcaccggattggaacgatgcaccgtcgagaccgccgcgtcgtcataggcggcatcacccgatgattccatcacggcaacggacaacaccttgccaacgcggttgatcacaagggccaacttcaccttggcatccttggacctgttctccgggaacttcttgtgcaggtcgaaataggcgctgatcttcttgccccatttggccgtcagcgcgaacttgtccttgccgatcccgggattgggcgccttggtggtctccgactgacgcgtcgcgtcttctagcttggtgggcgattggtcgatgtgcttctcggcggcttcgctcgtctcggtctgaaccttggcgacctgcgcctcgtcctccttcggcttcttgctgttgtcttccgtgacgaggcggtcggcgtcctcagtctcggtcggcttggcctgcggaaggtcggtctccttgacctccgccttctgctgggtcatttccggcgacgcttcctgcgctcggtcctccggtccagggggcgccggattatcctcgtccgtcgcggaggcaagctcgaccgcgtactccgcgccggcggcgccaagtccctcgtcgccgtcatcgctgcgcaaattcgccagcgccagcgccgcaccgccgaggtgcagcccgaccgccgtcaccgcggcgatcacccagagccgcttcgacgtccgcagatcgagatcgggattggtggacatctctgctcgccgtcagggtttggccggctcggcctgctgggccgcgggcgcgcccggtacgccctcgagcgtgaccagcttcacatgcgtgtagccgccggcgcgcaacaattccatgacgcccatcagctcgccatagggcaccatgcgatcggcgcgaaggaacacgtatttgtcccggttcatgtcgggcaccgcatccagcgaattgatcaggtcggcccgcttcaccgcgttctccccgatcgctagcgtcaggtccggcttgatgctgagataggtcggtttgtcaggcttcttctgcggcgtcgcgctggaggtcggcagatcgatcggcagatcgacggtcgagagcggagccgccaccatgaagatgatcagcagcaccagcatcacgtcgatgaacggcgtgacgttgatctcgtgcgcctcgacaaggtcgtcgtcaccgcgacgccggccaccggcaggtcgatgccgagatcgacggtcgagagcggagccgccaccatgaagatgatcagcagcaccagcatcacgtcgatgaacggcgtgacgttgatctcgtgggattccgcgaaatcgtcgtcgccgtcgttctctgagatcgagactgccatcgcctactccgccgcggcggcgcgtgcatgcgcgttgcgcggaacgtcgccgggtatgctgccatgggtgcgatcgagatcacgcgacagcagccgtcccgcggcgcccgaggcgcggttgacgagctcgagatagaccttcgtgagccgcgaaaaatggttgtagatgatgaccgcggggatcgccgcgacgaggccgatcgccgttgcaagcagcgcctccgcgatacccggcgccaccacggcaaggttcgtcgtctgcgacttcgagatgccgatgaagctgttcatgatgccccagaccgtgccgaacaggccgacgaagggtgacgtcgcgccgatgctcgcgagcaggcccatgccgacgcggatcttgcgcgcttcggcgcgcacgatctcggcaaagctcgacgccgcgcgctccttgatgccgctgtcgctggagatgcccgccgacagacgtccttcacgcatcgcggcagcaatgaacgcggacagcacggtgcccttggcgccgagcgcgaactgcgcctcggcgagcgaccgcgattcagcgatcttggcgagcgcgccgcgcagcttgctctgtgcgacggtcagctcgatcgtcttggcgatgaacaccgtccaggtcacgagcgatgcgaacgcgagaccgagcatcaccgccttcacgatgatgtcggcgttcatgaacatgttccacggcgacaattcgtgcaggccggtgctggtcgatttcagcaccttgccgtcgccgcccgcgggcgcggccggcgacgcatcgagcgctgccggtgctggagccggagccgcggcgggcgtcggcgccgcctgcgcttgcggcgccgcaaccggcgc

SEQ ID NO: 84 - DNA, 4231 bp, Bradyrhizobium enterica
gaagacttcaagaagcgctacggcaactatccgtcgtatgcaggctacaccgcctatgacgaggtctactacatcgccgatgcggtgaagcgcgccggttcggtcgaggccgacaaggtggtcgatgcgctcgagaagaccgattgggaaggcaccatcggacgcgtccagttctacggcaaggacgatccgttcacccattccatcaagtacggcaagggcctgatcaccggactgatgctgcagtggcagggcggcaagcaggtcgcggtctggccgaaggaggtcgccaagagcgatctcaagttcccgagcttcatcaagctcaccacgaactgactgatgatcatgctcccgggccggtcccgggagcatcgctattcagttccgcatcctccacaacaggcagccctgctgccgcggccgatatgagatgcttgccttacaaatcctgatcgatggttttgccatcagtgcgctctatgcactcggcgcgaccggcttcaccctgatcttcggtgtttccggcgtcctcaacctctcccacggtgccatcatggtggccgcagcggtcgcggcctgggccgcggccagcgtgttgcacctcgacatctactcaggtgcgctgttcggggtcggcgtcgcgctgatagtctctttcgcgacctatttcgcggtcgtgaagccgatccagaattcgacccggatccccaacgaggagaaggagatcttcgtcctcaccggcaccctgctgtggggcatcatgatccaggagctgatcgcctatttcttcaccaacaacgccaagacggtgctgccgatcgtcgagggcgtcgtcgacatcttcggcaaccgcacgccgcgcaacaacatcttcaccgcgctggtgtgctgcctcgcgatcggcctgctctggctgctggtgaaccgcacccggaccggcaaggcggtgttggcggcctcgatgaacccgcgcggcgtcacgctgctcgggctcgagctcacccagatctacattgtggtgtggggcatctacggcatcctcgccggcatcgccggtgtgctgctcggcatgttcttgggcgtcagctcctacagcgtcgggccgctgaccgcgagcgcgttctcgatcgtggtgctcggcggcctcggcagcgtctccggctcgctgatcgcggccttcgtggtcggttatctcgagaccatcacggcctacatgatctcgccggcctaccgcaccattccggcgctgctgctcttggtgttcgtgatgtacatccggccccagggcctcttggggaggcgctgagatggccaacttcttcacctcgcgcctgttcttcatctcgctggtctgcgtggcggttgcggcgacgctgccgctctacgtctcgggctacatcctcgggctcctcaccgtcgcgttctatttcggcgtgttcgcgatggcctgggacctgctgttcggcttcgccggcgaggtcaatttcggcccgaccttcctgatcggcaccggcgcctacaccgccggaatcctcaacaaccagtacggctggtcggtctatgtctgcatcctgctcggcgcgctcgcctctgttgtcgcgggcttcgtgctggcgctgccggcgctgcgggtgagggggccgtatttcggcctcaccacgctggtcgcggtgctgatgttgcagaattttgtggtcgttttcgccgatctcaccggcggcgagatcgggctgacgatccctgacgtcatcaccatcaatgccggcgccaattactggatcgcgctcggcttcatgaccatcagcgccgcgatcctgtacgggctgtcgcaatcgccggttggactcgtgctgcaggcgagcgggcaggaccctgtgcaggcgggcgcgctcggcttcaacatcgtcaagcacaagctcgcagccttcatcgtcagcgcgttcttctccggcctgtcgggcgcgctgctggtgttctacttcggcaccgcctcggtcggcaccgtggtcgacgtcgcggtcggcgtcaacgtgatcgtctccgccgtgctcggcggccggcgcaccgtgctgggcgcggcgttaggcgcgatcttcctgatcgtggccggcgagttcctgcgcccgaccggcgagcttgccaccttcatcgtttcggcggtggcgctgctcgttgtcctgttcttccccggcggtttcctcggagcggccctgtcacgcgaggcgcgctcttaaatggatcagaccgtgaccacagcaacgctcaccgtccgcggactgaccaagagattcggcggcttgaccgccgtgaagaacctctcgttcgacctgcacccgggcgagatcctcggtctgatcgggccgaacggctcgggcaagtcgaccgcgatgaagagcgtgatgggcatcgagcgcccgaccgcgggagaggtgatcttcgacggcgagaacgtcgctggccttcccgcgcacaagatcgcgcgcaagggcttcggcatggtgttccagcactcgcggccgctgaaccggcagaccgtgctggaaaacatcatggtcgcgctgctgcccgacagcctgttcatgctgtttcccgacaaggcactgaccgagcgcgccaaatggatcgccgagcgcgtcgggctcggcgcggtgatggatcgccgtccgccgacgctgccgttcgccgatctgcgccggctggaattggcgaaggcgatcgcgcgcgatccgaaggtggtactggtcgacgaaccctttgcgggcctcaccagcgccgaagtcggcaccttctccgccctgatccgcagcttccgcgacgagggacgcgcggtgatgctggtcgaccacaacgtcaagagcgtcgcggccctggtcgaccgcgtactcgcgatgtatctcggcgaggagatcacgaccggccgcgccgaggacgtgatgaagaacgagaccgtgcgccgggtctatctcggcggcgcgatcgagacccacgcgcgacccgagacctcgttcaaggacaaggtgccgctgctgcaggtcgagaatgtcagcgtgcattacggcaaggcgcaggcgctggagaacgtctcgatccacgtccatgagggcgagttcgtctcgatcgtcggcctcaacggcgccggcaagaccacgctgttcaacacgatctccggcttcctgccctataccggcgagatcctgcgcggcgggcagccactgcgcggcaccgggcctgccaagatcgcccgctccggcctcgtgcagtgcccggaatcgcgcgaactgttcggcgagatgacggtgcgggaaaacctcgatctcggcggtcagcatctcgacgacgcggcgcgggccaggcagctcgcctggctgttcgagctgttcccgatcctgaaggaacgccagggccagatggcccagacgctgtccggcggcgagcagcagatgctggcgatcggccgcgcgctgatgatgcagccgcagatcctgatcctcgacgagccgacgctgggacttgcaccggtcatcctcgaactgttgtcgaaggcgctggagaagctgcgccagaccaccaagatcacggtgttgctcggcgagcagaacgtgaccttcgcgcttccgcatgccgaccgcgtctatgtgctggagcacgcgcggatcgtctgggagggcgatccgggccggttcgccgcggaggccggcaaggactttctctgacgttcaacgattgaaaaataacaaagcaaagggagacgaccatgtcaggatattcaaccgccgcccgcacgagcctgttggctaccgcgctggcgctctgcctcgcggcaccggcctatgcgcagtccaaggatccgatcaagatcggcgtgattgccgaggtgcagtcgatcgccggtgcggcaaccccgggcggcgcgcagatcgcggccgacgagatcaacgccaagggcggcgtgatgggccgcaagatcgagatcgtcacctacgacaacaagagctcgtcggcggactcggtgcgtgcgttccagcgcgcagtcagcgaggacaaggtctccgcggtgatcgcgagctacatcagcgaggtcgtgctggcgctcgagccgtgggcatcgcggttgaagatgccgctgatcacgccgggcgccgcctcgaacgagatcaccaaggcggttcacaacgactatgagaagaacaagtacaccttccacggctacctgacctcggcagcgcag

SEQ ID NO: 85 - DNA, 3044 bp, Bradyrhizobium enterica
cgcgcaggcaatacgatggtccgttgttcgatgctggtcatggcctcgctggccgcatacaggccacagccatccgccagcttgcgatcatgcatgctccgggcaatgacgtggaactggtgttctgcggcgcaggcgtagagcgcgaagatgtcgctctcgcggtcgcccagcatggtcaccatcgcagccttcgccaacagcggcttggctgccagagcggtcgcgatccagcgttgcgattctttgtccttcagatcgcgattgtcgtgcgagacggtgcggcggccctggcgggtccagatctcgccgtgcaacaggccaaggcagcagccgctttccgcgtctgcggccagcatcgggtgcagcaacaccccgcgggtgttgccatgaccgatctcgcccaagccacgccggttttgtgccttggtggcaaaattgatctcgctggtatcctggatcgccagcacatggcggccttcggccgccattaccgtaccatcgctccagctttcgattatccgcgtcgtcgtcaccttggcattgccgagaaagcggttgaagcgcacctcccgggcacgcatgcctcctgccagccgtcgcaggcagacatccttgcccgcgaccatgcattcgacgagcgccgcccccctttatcgaggcggagatccccgaaccgacctaatgaccagtcaatttgcgccagcatgtcgacacctccgccaaagccgaagtgccgcaatatgaatcacacgaaataccgattcgggaatccccacccaactagatgtgtgcatgccctagggcgaaggccgggacccataaccacagggtagcgttgttgaaacacaggctgcggccccagcgacgcgcaacaatcgagatttggggtaaagggtcccggccttcgccgggacgacgatgaagatagttcttgcttcaagctatcgcacctgcggaagcaatccaattgtcatccgtgtgtcgcgtcaggccaaacgcgtgtcgctatagtccaagtgtccggacgcgagttgcgctatctcaaccccttcaggcgcccggttgctcgcgcatcgaaatcgcgtggattaagtacaccagccgtcaaaagacaaaatccaaaacaaggggactgctgaagttgcacgcgggtgatccttcgacactccgtgccaccgcagccgtctccgccctccgattgtctccatcatcgaggatcgatccgtgatcaagattcttcgccgctcgttcgttgccggtatgctgtcgcttggcctggcgttgctgtcacttcacggcgccgaggcgcaggcacagggcaccgacaccattctcgtgctcgatgcatccggctcgatgtggggcctggtcgacgggcagagcaagatctccgctgcgcgccaggcggtcgatgcgatcctgtcgaaatggaatccggccgatcgtctcggcgtcatggtctacggccatcgctcgaagggcgactgcaaggacatcgagctgatggtgccggtcagcacgttcgatccggtgaggatcaaggctgcgatcgacggcgtcaacccgaaaggcaagaccccgatctcggattcactgcgtgcggccgcagaggcgctgcactcgaccgagaacaaggccaacgtgatcctggtctccgacgggatcgagacctgcgcgcccgatccgtgcgcggcggctgccgagttgaagaaggccggcatcggcttcaccgcccatgtgatcggccttgacgtcgccgatcccgcggcgaagagccagttgcaatgcatcgcgcgcgcgaccggcggggtctatctcgatgccggcaacgccgcgagcctgaccggcgcgctgaccaaggcggtggcggcgacgcaaggcaccagggtcgccagcgaggcgccgccgaagccggcggcggccgatccctatctcggcaagaaccttcgcggcgtcgcgcggctcgccgaagggctcgatccgatcagcgacgaggacgtcaattggggcatcttcaagcgcgccggcgacgagaagggcgagcacgtcaacaccttctacggtgcgccgttcgccgacaatatcgcgcccggcgattacatcgtcgaggtgacctaccggcagctcaagcgcgagtttccgctcaaggtcgagaagggcaaaccggctgcgctcgacgtcatcctcgatgccggctacgtcaccagcgaaggcgcgatggccggcggtgtgggcaaggtcgacgacgtggtctggcaggtcaccgacaagggcggcaaggtggttgcgcaggagtacgacgcggtgccgcgcttcgtgctcgccgccggcaattacacgctgacgctgaccaagggccagtcgaagaccagcaagccgttcacggtcgccgccggcgattccagcaacgtgcagctgacgatcgatgtcggcaagctgatcgtcaccaccacctatgcggaaggcgggcccaaggtcgagaaggacctcgtggtcgcggtccaccagcctgcgaagcccgacggcgacgagggcgacaaggtcgcgcaggagtacgatcccgaatcgaagttcgatctgcccggcggcagctacgaggtgaaggtgacggtcggcgaggcgaggggcaccgcgagcacggaagtgaagtccggcgcgccgacccgggtcacggtcaatctcaatgccggcgtggtcgggatcaagaccgacagtgcccagcagatcgacatctacagcgccgagcgcgacctcaacgacgagcgcaagcacgtcgcggtgaactatgaggcgacctacaacgtcgcgctcaacgccggcgactatgtcgcggtcgcgacctatgccgacggccagaaggtcgaaaagccgttcaccatcgccgccggcaagcgccagacggtggagatcaagcagccgtaaggcgcggcgcgtcggcgtcgtgcatgtgaggtgagcaccctcttcaggctccctccccccttgcgggtagggctatcgcatatgggccaggacggtgagaaggaagtcgttgctccatc

SEQ ID NO: 86 - DNA, 2986 bp, Bradyrhizobium enterica
atcgaatccttgatgcgcgcgcatcccggcgtcggcgagcggctgatcgtggagatcaccgagaccgtcgcgatccaggacatcgacgacgtccgcggcttcgtcacgcggctgaagaatttcggcagccggatcgcgatcgacgatttcggcgccggctacacctcgttccgcaacctgcgcaagctcggcgtcgacatcgtcaagatcgacggcgccttcgtgcagaacatcgtgcgctcggccgacgatcgcgccttcgtgcagacgctgatcgatcttgcgcgccggcttgagatcaagacggtcgccgaatgggtgcaggacgaggaagccgccgtgatgctgcgcgaatggggctgcgacttcatccagggccgcctgatcggcctcgcctcgccggagcggccgtggaacgtgccggcggaaaaggtcgtgcccgccgcgggctgacgtcgttatacctgccacgcgggtcattgcgttgaccccggcccccgcacctcatatccggcagcgcaagcgtgcgcccgaatcgtgcggctgcgctttttccggagagcatcgcggcatggactggaacgactttcggctgatccttgccatcagccgggccggctcgctcaggggagctgcgcaggagctgggtaacgaccactccacgatctttcgctggctcaacgcgctcgaggcgaggtttgaggtccagctcttcgagcgaaacggcggcgtctatacgccgacggacgccggagaccggatgctgctcgccgccgaacgcatggagagggaggtgctggcggtcgaccgcgacgtcaccggccgggacgctcggctgtccggcaatttgcggatcacctgctcggaatcgctggcctaccgcatcctcaacgatctgctcgcggagttcaggtcgaggcacgcggggatcacgctcgagctgctcgtcgacaaccgccagctcgacctgctgcgacgcgaggccgatatcgcgatccgggcgacgcgcccgtctgagggcgacttgttcggacggcagatcgcggagacggcgtgggcgctttacgcgagcccgcgctatctggccgaccgcggccggcccggcggcgccccgttcgagggccacagcttcatcggctgggatagttcggcggccgcggccgcggcgagctggctcaccgcaaccgtgccgaatgatcagatcgtgtatcgctccagcagcctgatcaaccagatgatggcggtgaaggccggcatcggcatggcgttgctgccctgctatcttggcgatcaggaatccgacatcgaaaccgtctccgtcccggaggccgcgctcacgcgtgaactctggctgatcacccaccgcgatctgcgcaacaccgcccgcgtccgcgccttcttcgatatcgtggggcaggggctgacggcgcgtcggcaattgctcgaaggacgttcgcgcaatcgcgctctgatctagccggcgggattgtagccccgttgctgaaacggatgcgcttcggcgaatgccggcaaggcgaagcatcgcttcgccagcgccgccacctccggaaatgccgcgagctccatgcgatagacgtcggcgagggccacctggcccgcgatgctgatgtcggcgatcgtgggggccggtcccagcgcgaaggaagccgccggacgccgcgtcagcaatcgctcgtaggtcgaaagtccctcggcggtccaatgcctgcaccatgtctcgatggcggcggcatcggcgccgaacgcctgcgcgagatgcttgcggacgcgcgggacggtcaggggatgcgcatcggcggcgaggatcattgccagcgatcgtgcataggcccgttcgcttgggtcggccggtagcaaccgcggctcgggatggatctcgtcgagatattcgatgatcgccagcgactggaagatggcgcggccgtcatgaacgagggtggggacgacatgctccgcgttgacttcggcgtagcccggatcgaactggcgtccggagaggatgtcgatgtcgatttcctcgaaatcgaggttcttgagcgcaagcgcgacgcggacgcggaatgccgcgttcgagcgccagaagccgtagagctggatggtcatcgggattgccttctgtcggaggcaatctctgtagcggaccccgcgaggtgcgtcgcaggtgatgcgattgccgtgcggcaatcagggcttgcgcgtccgcaagccctgtcggggcgcggggaggtgcttcagcgccgcgcccgcgggccaaatgtcgcaagccacggcgcgagaccgtgcggcagttcgaattgcttccgcgcggcatcatcaaatggcttcacctcgaagccacgcaccagcttgatgtatctttcggcgccgggcgacagccgaacccggccatcggcgagtatcatgacgaatccgccgtgcggcgtttcgtgcagcgtccagagggccttgccggtcgagatatcccgcagggtaaatccgtcgatcagacgactgccgtcaaccgagaagtcgccagtgcgctcggtgcgcagaagcgtgcggccggttgcgacgtcgacaatggcctggctctggccatggatgaagcggccactgggagattgcccagcaatcagtccggaaaaatctccaaggtcgaaccattcgtggcggatatctgcatcggtcggcaggatgcgctcgacaacgccgagatccctcatcacccggtcacagaagatcacgccgcaaacggggcggaatgccggtgtgagtggcgcaatcaggctattcgcggtcgtcgatacgtcgcgccatttacctgatatgaacagcgatcgattgcgcatcacgagcggtcggcccgtatccgagacggcgccgatcttccaatcgaatccttgatgcgcgcgcatcccggcgtcggcgagcggctgatcgtggagatcaccgagaccgtcgcgatccaggacatcgacgacgtccg

SEQ ID NO: 87 - DNA, 2763 bp, Bradyrhizobium enterica
tcgacgaggacgcttgccgcagccgcaaggaccacgccccggagaaccttgccgtcatccgcaagctcgccatcaacgccctgcaagccacgccatgaccttcgcccggggctcacccctctccccaccctcccccgcaaggggggagggagccgccgagggtgctcacctcacgttcgcaggcagactgaacacgctgagcggcgtagtcacacgtgcgccgggacgcgcaccgcgaaaacccttcctacaccatgacatcaggcatgatctcgaccggcgacaaccatcgcgcgtgcgcggccgccgaagtcaatctttgctcaacgggttgcctttagggtgccggcggcggccggatgttagggcgcgacctgtttggttaaggagatatagcgatcatgcccgcgacgaacgtggccgaagggcccaatcagcgacaagccggcttcaatctcttcctcgtcggcttcctgatcctgttcctcgagctggcctgcatccgctggttctcggccaaggtcgtcttcctgcaattcttcaccaatatcgtgctgctggcggccttccttggcatgtcctgcggctgccttgccgcgcggcggaccaccaactggcttgcgctgtttccggggctcgcgctcgtgaccttcgccgccgtggccacgatcatggtgctgtatttccagtggggcgagttcgcagtcgacgtcggccatcaggcctcgccgcaggaggtgttcttcggcaccgaatatcgcaacccggatctcgccaaattcgtggtgccgatcgaggcgatcgccgggctgttcttcgtgctgatcgcgctgatgttcgtcggcctcggccagacgctcggccgcgccttcgatgcctacccgaaccgcgtcgccggctattcgctcaatatcggcggcagcctggcgggcatcgtggggttctcgctgctgtcgttcgcacaggcgccgccggtggtctggttcggcatcagctgcgccggcatcgcctatctgctctatcaggacaaggcgctgtcgctgctgcgcctcgtgacgatcatcttcgtggtcggatttaccggattctacaccgatcgttccggcaaccatgacatccgctggtcgccttactacgccgtcgacctcaacaagaagagcggcgaaatcaccgtcaacagcatcggccatcaggaaatgatgccgttcagcgaacgcggctcgtcctattcgctgatccatttgctgcagcagcacagcggcggcgcgccgttcaaggacgtcatgatcatcggcgccggctccggcaacgacctggcgcacgccttgcgcttcggcgtggagcgcgtcgatgcggtcgagatcgatcccgcgatccaggacatcggcatccacaaccatcccgacaagccctatcaggacccgcgggtggtgccgcatctcgacgacggccggcatttcctgcgcaccaccgaacgcaaatacgatctcgtggtgtatgcgctggtcgactcgctgatcctgcacagcggttatgccaacatccgtctcgaaagctacctgttcaccgaacaggcgttccaggacgtccgccgtgtgctgaagcaggacggcatcttcgtgatgtacaactactaccgccagggctggatcgtgcagcgcgtcgccgagatggccaagcaggtgttcggctgcgatccgctggtgctgccgctgccctacaaggaaaccctgacgtcatcggaagcggtcggcttcaccaccatcatcgcgggctgcaatccccgcatctccaccgcgttccgcgaccgcggcaagttctggctgaacagcattccgccggagaacctcgcggtcgacggtttcgacaagccgcaggagaaagccaaagacaaggcaaccacgcagcgcggcgactgggtgccgctggcgccggcgaaattggtggtcgacaatgaaggcgccaggcaatcgaccagcgacgactggccgttcctctatgtcagcgggcggctgatccccgacctcaccgttcgctcgatgatcctgctcggcgtgctcgggctcggcctcgtctatctgttcaagccgaagggcgcctggcggccgaacaaccggatgttcttcctcggcgcggccttcatgctgctcgagaccaaggcggtggtgcagatggcactgctgttcggcagcacctggctggtcaactcggcggtgttcttcaccgcgctgctgctgatcctcgccgccaatctgtatgtgatcaaggtgccgtccacccggctggtgcggcactatgccgggctgctgctgctgctcgcggtctcggtgctggtgccgctcgacaccttcctgagcggcggcattgtctggcgctacgtgatcccgtgcgcgctggcgctcggcccgatgttcttcgccggcgtgatcttcgcccgcaccttccgcgacgaggccaatcccgaccaggcgttcggatccaacatcgcgggctccgtgatcggcggcctcgccgagtcgtgctcgaccctgctcggcttccgctatctcctgatcgtggcgatcggcttttacctcttgtccgcctggatgccctcgcgcaagggctagcgtggggcgagtaagggacgcaacagcagaagggttccctccccccttgcggggtagggttagggagaggggtaccacacggggactctctcgatttgtctttcgacgacgcgatcaagattgcaaaggcaacacttcgcctcgatgatctcgc

SEQ ID NO: 88 - DNA, 2556 bp, Bradyrhizobium enterica
ctcgccgccttcgctaaagcttcggcgcgccagtgactcatggcctcgtcgaagccttggcgaagacgggccgggcgatccagtacgccgcggcctctcgattcaagcaccgcggcctctggaatactggatcagccgcatgcgcgggtgatgacgctgagcacgctgtttgacaggtgaatcggatttccaccgtcgtcctggcgaaggccaggacccattaccccagatgtgcattgccggacgaggctggggccgcggtccggctcgcaacaaatagcggtggttatgggtcctggctttcgccaggacgacgccgaggatgtggagctacgccctaccccgaccgccggttgctggtgttctgggtcagattgccgtgcgcggcctgctcgcggatgttgtgcttctcgtcgtcgcgatggcccttggtggtgtcgaggggaacgctgggagcgctgccggggcccttgtggctcttgttgtcgtcgggaacgggctggatggtctttgtctttggtttcgtcatcatcgtctccgttacgcaacgagacaacgccgcccctgcgggcggcgttccggaaacgcggcttcacaacaggccgggccctacagcttctcctgctgcgaaggctgagcctgctgctgctggcgctgacgttcctgctcctttgcgtgatggcggccgtagaggcatccggcggccgcgccgagcacgccatgatgaccggcataatggccggcgacaccgccgacgaccgcgcccttgatgcagcccttggcgtcggcgggcgaagttgcggcaagcgcagtgacggcaataatggttgcgacaagaatggatttcatgatgcggctccaatggaattgtccggcatcaacggccaagccaccctgccggttcccgccgcttcgcgccagaaattcgctgcgcacaggccgcgatcatgctctaaatgccgccgcattgcggaccgtgttttgaagatcgtgcagacattacatattgccttcctcgcgcgggcgcttgccgcggcgatcctggtcgtcgccagccatttcatctccagccctgcccacgcggaggatggcgaccgtgcgctgcttgcgactttctgcaccggcgccaatatcaaggggtcgacctgcacgcgggcgaaatcctatcccggcggccgggcctgcgacgtcaagctgaccaaggagcgctacgccggacgcttcctcgctccggacagcacattgcttgtcgtcaattatgaaagcgaatgcgagccgcacgcgaccgatttcggcggcgtcgcgctgttcgagcagaacggcaaggccacccgcttcgtgcgcttcctggcgggcgcgcagggccatgactgcatcgtgctatccaaggatgagcagcaggatgagttggtctgcacggttggccacatgggccagggcatcgtcgagagcgcggtggcgcggatggagttttccagcaagcccggcaagcggatcgagatcacacccgacttcctgctccgggccgaggatgcggtcagcgcctacggcgccaacgtcgtgaagtgcaacgaggggccgaagtatttcggtctatccaacctcgccgccggcccgcgccgcaacacggttgcggtcgacatcgactacgccgacgacgagatcatccgcaccgcctgcggcgcgggctttccgaagtcgaaggagctctactacgacctccaggccggcgaggcctttgtgccggagggttcggaaaggaagacgcggtttatcatcgacctcgtgaccggcaaggccgcgccggcgaattaaggccgcgccagcgagttaacggccgcaccggcggatgagcgcgccgcgacagcgagccggcgcgatctcaccggccggctgccggatcatgtgcactttgtgccacaatacgtggtggttgccgaacctaatccgctttcgcacgtcaaacatgtgtttgatagtggaacgcacgggttcagagtgtggaaccggggcaagtcggatggaaccggcggagtcgatcatgggcgaggatttgaaccggcaacgcgtcttgaacttcctcgacgtctattacgcgggcggcatcgagggcgcgctcgagcgctgcagcgacgacgtcgcgtttctcgccaacgccccgatcgacattctcccgcatatgggccagcaccgcggcaaacccgcgctgcgtcagatgtggaccacgatccacgagcgttactccgacatgcgctacgaggcgccgatcgtggtgaccgaaggcgacaaggtcgcagcacagctccgcgtgttcttccgcaagcgcaacaatcgccgcatggtgcagttcgacgtcgcggtgttctacacgctgcgcgacggcctgatcaccgagatccgcgagatcatcgacaccttcgacctcgtccagcaggtgctggagcgtgacatcgcggcagcgctgaccgggcagaacgcggactaaagcgagatgagttttggttgaatcgacttggcgccgtcttgcttcacctctccccggtggggagaggtcgg

SEQ ID NO: 89 - DNA, 126426 bp, Artificial Sequence; identical to SEQ ID NO: 25
  exemplary vector sequence

SEQ ID NO: 90 - DNA, 24 bp, Artificial Sequence
  Primer
tcgagggctacggcttgaagattt

SEQ ID NO: 91 - DNA, 24 bp, Artificial Sequence
  Primer
acaacgtgttgccgccaatatgag

SEQ ID NO: 92 - DNA, 20 bp, Artificial Sequence
  Primer
gcgagaagatgacccagatc

SEQ ID NO: 93 - DNA, 19 bp, Artificial Sequence
  Primer
ccagtggtacggccagagg

SEQ ID NO: 94 - DNA, 1390 bp, Bradyrhizobium colbertium
aacccgtccactttatcgggggaagatcaaagtgctcggacgaggcgaacgcaaagtaatagcttgggaaggtcgaccgacccactacatttagtcaatttgacctagcctcgatacgttcctttgtcgatctagcggaagttgtggcaattggcctaagctaatcgcttggcgggtgaggcagagatcatgaacgtgttggccggtcgtgttcgtggtagcgaagacgtgcttgatgtggtgtcacgagaggcgcccacacgccgcgagttgcgtgctgcccgagatcgtcagcggggctactcgatcaatgtgaagcagatcgtcttagcgtttgccgtcgagtttgtaattatcggcctcattcttacaaacacgcttttgatggttgcccaacttcccgatgcaaccacagcaaagattatccaagcgatgctgtttcccattgcaatggcgatggttgaactcgctcgcgtgccgttggcaatcgccgtacgcacgcagacatcatggaacattaagcttgcgtcgcttctcggtgttctttgtgccgttgctgtgacttcgaactcgctctattcaatcggagcttcgtcctttactccacgactcgaagacacccataagagagatagccaaatcaaggagcttgaggacagacagcagcagttcaagagtcagatcgaggccgcaagagaggaaatggatcgccgggagcgggagcgaaatgcctcagtatccgctgtgcagtctctccaagcgcaattggcacagcagaagccgcaggattgtgccgtggtgacagtggctccgagccctgccgctccgcccggaacgccctcttcaactagacaggtttgccgagaaaaccccctgatcaaaaggctcgattccgagatatcgatagcccgcaccaaatcgaacgacgccgaggctgcactaaggcaagcgcaagaccaatacagcaaggtggcaaacgacaagggcctgcgcgagatacaagagcaaattacgaaagcgacgaccgaaaatcgagaatcgatctttcaaagtcagctgcattcgctggcggcaatgatcttcggcgtggacccgaacaatgtgactcctgaccagataaaacgagttgagttctatctgatttttgtatcatcgatcgcagcagccctatcctcaactttgatcgccatgacggcagtgagaagaatcagggttgcagaaacagatccaagcattgagctgcccgatgaagctatgacgtatctgttcggcccactcttggtcgcattgcgccaggaggcacgcgaggctgttaatactgcagtgaaggatggtgctggtctgaaaggggccgcacaatgtgcggattccgctcgatgtcgcccagcat

SEQ ID NO: 95 - DNA, 57852 bp, Bradyrhizobium colbertium
accacgccgcgagatcgggcaggcgtgtctgagaattgagatgcctgtgcctgccgcaaccgagagggggtaggcccgactcactcacggatgccggcgtcgccgtcggaacgaggtgcagttctccagctaaaaaatcaaaggttgtataacatcgtccctgcgaggtatcgcggtaggctaatccgtgtcttcctggttacgattgtgccgcccgcgcaacactcctcttcgatttaaccctcgtcgcgggtggttcgcatcgccgccgctttttggccacacccgaacatgaataaaatcgctctaatgttttagagagcagcggcggtcttcgaaggcaacgagaaaatcccaaggtcgattcaaatcttggctctgatttttcgggtctgaaagggttggctggggaaactggttgcatgggcgcgaagatcgacaagcagaggctgccgagccgtcacgtgacggaaggccctgcgcgcgcgccgcatcggtcctacttctatgcgatgggtctgaccaccgagcagatccaccagcctttcgtcggcgtcgcctcgtgctggaatgaagcggctccctgcaacatcgccctgatgcgccaggcgcaggcggtgaagaagggcgtggcatcggccggtgggacgccgcgcgaattctgcaccatcaccgtgacagacggcatcgccatgggccatgacggcatgcgctcctcgctgccgtcacgcgaatgcatcgctgattccgtcgaactgaccgtgcgtggccatgcctatgatgcgctggtcgggcttgccggctgcgacaaatcgctgccgggcatgatgatggcgatggtccgtctcaacgtgccctcgatcttcatttacggcggctcgatcttgcccggcaatttccgcgggcagcaggtcaccgtgcaggacatgttcgaggccgtcggcaagcattcggtcggcgcgatgtcggacgaggatctcgacgagatcgagcgcgtggcctgcccttcggcgggcgcctgcggcgcgcagttcacggccaatacgatggccacggtgtccgaggcgatcggccttgcgctgccatactcggccggtgccccggcaccctatgagatccgcgatgcgttctgcatgaccgcgggcgagaaggtgatggacctgatcgcgtccaacatccggccgcgcgacatcgtcaccctcaaggcgctggagaatgcggctgccgtggtcgccgcgtcaggcggctcgaccaatgctgcgctgcacctgccggcgatcgcacatgaggccggcatcaagttcgacttattcgacgtcgccgaaatcttcaaaaagacaccatatgtcgcggatttgaagccgggcggccgttatgtcgccaaagacatgtttgaagtaggtggcataccgcttctgatgaagacgctgctcgacaacggcttcctgcacggtgattgccttaccgtcacgggccgcacgatcgccgaaaacctcaagagcgtgaagtggaatccgcaccaggacgtggtgcacccggcagacaaacccatcaccgtcacgggcggtgtggtcggtctgaagggaaatttggcgccagaaggtgcgatcgtgaaagtcgcgggaatgtccaacctcaggttcaccggtccggccaggtgcttcgaccgtgaggaggatgctttcgaggcggttcagaagcgcacttaccgcgaaggcgaagtgatcgtgatccgctacgaggggccaaagggcggccccggcatgcgggaaatgctccagaccacagcagcgctgaccggccagggcatgggcggcaagatcgcgctcatcaccgacggccgcttctccggcgcgacccgcggcttctgcatcggccatgtcgggccggaggcggcggtcggcggaccaatcgggctgcttgaggacggcgatatcatcgaaatcgacgcggtcgccggtacgcttaacgtaaaattgagcgacgccgagctcgcccagcgcaagaccaaatggagcgctcgcgcgactaatcatacgtcgggtgcgctctggaagtatgctcagcaggttggaccagcggtcggaggggcagtgacccatccgggcggcgcgcacgagaaacagtgctatgcggacatttaggcgtgccacagttgcgtttgtgttgggggcggccgcgctggccgcgccggcgctcgcctttgacggtgcgccggtcaaccccaaggatgcggccatcccggtcgtgaccaacttgccgggaaccgcgacgaccttgcgcggcaaggtcgcgccggtgacgcaggaaacctcgctcagcgccctgcaatatgctgccgagggcggtcacccgatcgcgcagtggaagctcggccgcatgtacgccaatggcgacggtgtcgctcaggacgatctgcgcgccttcgaatatttcagccggatcgccaacgcgcatgccgaggacagcccgtcggccccgcaggcgcagatcgtggccaacgccttcgtcgcgctcggccgctactatctggccggcattccgaattcgaaggtcaaggccgatccggaccgggcgcgggagatgttctcctatgccgcctcctatttcggcaacgcggacgcgcagtacgatctcgcccgtctgtacctgaagacccccgacgcctcgcgtgaggacttccgctacggtgcgcgctggcttggtctcgccgcgcagaagggacagcaccaggcgcaggcgctgctcggccagatgctgttcaacggcgaccgcctgccgcggcaggccgcacgcggcctgatgtggctgaccctggcgcgcgacagcgcaggtcccgacgaggtctggatcaaggaaagctacaaccgcgccttcgccaaggcctcggacgacgaccgcgccatgtgcctgcagatgctggagcagtgggtgcagggccgccgggagtaagcggccgaggcggcttcaggccgcctccagatccagatccgcccataccggcacgtggtccgacggcttctcccagccgcggacatagctgtcgattccgacattggcgagccggtcgctggcttgtggcgacagcagcagatggtcgatgcgcaggccctggttcttctgccaggctccggcctggtagtcccagaaggtgtacagccccggctcgtcggtgacggcccgcaaggcatcggtcaggccgaggccgagcagggactgaaagctctcccgcgtctccgtcttgaacagggcgtcctcggtccaggcggccggattgtgcacgtcgcgggcatgcgggatgacgttgaagtcgcctgcgaggatcagtggctcctccgccttgagacgctccttcgaatattcaagaagccgcgacatccatttgagcttgtaagggtatttctccgtcccgaccggattgccgttgggtagatagagacaggcgatacgcagtaccccgcgcttgagggtcaccacgccttcgaggaagcgggcatgcgtatcctcctcgtcgccggcgagccccgacttggtctcgtcgaaccggagcttggagagcagggcgacgccgttgaacgtcttctgcccgtgcgtgaccacgttgtagccgagcgcctcgatctccagccgcgggaaggcctcgtcgacgcatttgatctcctggaggcagacgatgtcgggctggcactccttcaaccaggtcaggaggagatcaatccgctgccggaccgagttcacgttccaggtggctactctgatggacatatcgacggctccgggcaggaggcatggttagaacaaactgcaaacgcgcccgtcaaggacgccgcaaaatcacccacaaaattaacccggcttaagcaggcggcaggtcattgatcgtcaaaaggttgctgatgggatggccggacagtcaatgaagcgaattgagccgcgtgacggcctgatcggcgcattcctgtattggctcggcggcttcgagatcgaggacggcctgatcgccgatctcagcgagcggcaggtccgccgcatccgcgccaagcagatcgacgccgtgacgcggttgatcccggtcaccatggcggtgacgatgctcaacgtcgccatcgtcctgatcatgttctggggcaggggctggaacgacttcctcgcgatctggggcctgacgctcgccgccaccgcttcgcttgcggtgcgctcatggcgtcggtcgcatcaaaatccgccgcaggaagcctccacccgcgctggccgacagatgctgcggcaggccttcttcctcgccgcaatctggggcgcgctgccgctcgccctgttcagccgcatcgagccgaccggccagctgatcctggcctgcctgatggtcggcatgatgtcgggcggcgccttcacgctctcgacattccctcgtgcgggtctcgtctatctcgccaccatgaccgtcgcctgcgccggtgcgctgctcctgtgcggcaccgggccctatctggtgacctcggtgttcctgctattgttcgcattcttcatggcgcgcaacatcgtctcgcagggcaacctgttccttggcaatctcaaggcccagctcgagctcgagcgccagaccgagatcatctcgctgctgctgaaagacttccaggagaacgccagcgactggctgtggcagaccgatgccgacgggcatctggtcgacgtaccccaacgcttcgcggacgtcgcgcagctgccgcttccactgctgaagggatcacatttcgccgatgtgctcgacatgctttgcccagaggacaagcgcgcagcctacaacgtcgtcggcctgatggagcagaatgaaccgctgcacgagatgaacctcacggtcgtcgccggcggcgaggcgcggctgtggtcgctgacggccaagccggcctatgaccgcgacggccagttcctcggttatcgcggcttcggccgcgacgtcaccgaacgctggcgcgctgaaaaggccgaggccgaaagccgcgccaagtccgacttccttgcggtgatgagccacgagatccgcacgccgatgaatggtgtcctcgggctcgccagcatgttgcttgaaaccacgctcgaccccgagcaacgcgaagccgtcgccacgatccgcgactccggcgataatctccagcgtatcctcaatgacattctcgacttgtccaagcttgaggccgggcgcttcaccttcgaggcgatcgatttcgccccgcaggcgctggtcgaagctgtcgcaaccgttgttcgcgcaggcgccaagagcaggggactgaccgtcaacgtcgagctcgatccaaacctgccgccgacgctgcgcggcgacgtcgcgcgcatccgccaggtgctgctcaatctcgcatccaatgcggtgaagttcaccgatgaaggcgaggtgacgatttcggtcacctgccaggcgcggcgcgacttgctggcgaccgtcgaatggacggtcaccgacagcggcatcggcatcgccccggaaaagctgggccagctcttcagcgacttcgcccaggctgacgcttcgatcagccgccgctttggcggcaccggcctcgggcttgccatctcacggcggatcatcgagcagatgggcggcaccatcggagtcacctcgacgccgggcgagggctcgagtttccgcttcacgctggtgttgccttggagtcaggtgccggtatcggaccaggccacaggccgcgatgaggccgaggagctcaaggcccgtatcgccactctcgaccggccgctgaaggtgctggtcgcggaggacgatgcagtcaatcggatggtcgtaagcaagatgctgggcgcgttcgaggtcgaattgcgtgtcgtcaccgatggtgtcgaggccgtcgcggcggcatccgagagcgattacgatgtcgtgctgatggacgtgcgcatgcccgatatggatgggctcgccgcgacgcgggcgatccgggcgcaaggcgggagctgcaaagccttacccatcatagcactcacggccaatgccttctcggaggatgtcaagatctgccgcgaggcgggcatgtcggacttccttgccaagccgctgcgcaagccggcgctggtcgcggcgttgctgcgtgcgctcgacggctacaccatgtcggaggacgcgccgctccagccggagctggcgccgatcgaggtggagtggacggaggaggaaaggcagataaccggagcgtaaccgcctcagaccgagaagctggtgccgcagccgcaggacgcagtggcgttcggattgttgacgcggaacgaggcgccgatcaggtcatcgacgaaatcgacctgcgaccccgccaggaacggctgggaggcggaatcgaccagcaccaccgcactgtcctgctcgatcacgagatcgtcgtcggtacgggcccggtcgatgtcgaacttgtactggaagccggagcagccgccgccctcgacggagatgcgcagcatcgcgccggagccttcgcccttgaggatctccccaatccggcgtgcggcgcggtcactgatggtcacggcagtcgtcatggtcggtctccgatcgtcccgcagtcacagaaaggtcttgcccatttcatttggtgtcccgcgtccggcatagttaagtgcaaggatacgcagaatcaaatggatagggactaaattcgtcgtgtccgtcggaatggcagccccccgcgcgccctatgcctgcgaccccgatcgcagccgaggccggctggtcaccgagcccccgagccggacccgcagcccgttccggcgggattgcgaccgggtcatccattccaccgcgttccgccgcctgaagtacaagacccaggtgttcgtgttccatgaaggcgaccattatcgcaccaggctgacccactcgctggaggtggcacagatcgcccgagcgctggcccgacagctcgggctggatgaggaccttacggaaaccctggcgctcgcccacgatctcggccatccgccctttggccatgccggcgagcgggcgctggatgcctgcctgagggagtttggcggcttcgatcacaacgcccagacgctccgcgtcgtcgcttcgctcgagcaccgctatcccgagttcgatgggctgaacctgacctgggaggcgctggaaggaatcgtcaagcacaacggtccgctcaccgatcgcagcggcgccccggccggacgctatcgtgagcacggcattcccgtcgggatagccgactacatcaagacctatgaccttgaattgtggagcttcgcctcgctggaagcgcaagtcgccgcaatcgcggacgatatcgcttacgatgcccacgacatcgatgacggcctgcgggccggcctcttcaatctcgacgatctgaaggtgatgccgctcaccgcggagatcattgccgagacttcggcgcactatcccgatctcgaagacgtcaggcgcggtgccgaactggtgcgcgagctgatctcgcatctgatcggtgcggtgttcaccgaggcccagaggaaccttgcggcgctcaagccgcaatcggcccaggatgtccggcagcagagcagggcgctgatcgcgtttcccgccgaggtcgccgaggaggaagccgccatcaagggcttcctgtatcagcacatgtatcgccacgagcgcgtgatgcgggtgatggggcaagcggagcagatcctgttcgacctgttcgcaaggtatttgaaggagccgtccgaactgccgcctgaatggctgctgggcgcggaggcggacaatgagggcgaccgggcgcgccggatcggcaatttcatcgccggaatgaccgaccgtttcgctctgaccgagcaccagcggctttttgactcgaccccggatttgcgttaggcggcgcccatgccccagacctcctcatccctacatctgttcgccgacgtgctggcgcgcgtgcacgccgcctgccgcgcgctcgccgcggaagccaattggcccgagggcatcgatttctcgcgcgtcgttgtcgagccgccgcgcgatgcctcacatggcgacatggcgaccaacgcagccatggtgctggcgaaggaggcgaaggccaagccgcgcgatcttgccgagaatatcgccgagcggcttcgtgccgacacgctgatcgccaaggtcgacgtcgccggacccggcttcatcaacttgacgctgaagccagcagcctgggccgaggcgctgcggacggtgctgcgcgaaggggccgattatggccgtgtccgcggcggcgccagagtcaatgtcgagtacgtctctgccaatccgactgggccgatgcatgtcggccattgccgcggcgcggtgttcggcgacgcgctggcgagcctgcttcagttcgcaggtcacgacgtcacgcgcgaatattatatcaacgacgccggcgcccaggtcgacgtgctcgcgcgctcagcgttcctgaggtatcgcgaggcgctcggcgagaacatcggcgccattccggaagggctctatcccggcgactacctcaagccggtcggagcggcgctggccaaggagcatggcgacaagctcctggcgaagagcgaggccgaatggttgccgacagtgcgcgccaaggcgatcgggatgatgatggacgagatcaaggacgatctcgccgccctcaacatccgccatgacgtattcttctccgagcgctccctgatcgagaccggaaacaacaaggttgccgagaccatcgatttcctgaaggccaagggcgacatctatgaaggccgactgccgccgccgaagggcgcgccggtcgaggattgggaagaccgtgagcagctgttgttcaaggcgacggcctacggcgacgacgtcgatcgtccgctgatcaagtcggacaattcctacacctacttcgcttccgacattgcctatcacaagaacaagttcgaccgcggctttgccgagatgatcgacgtctggggcgccgaccatggcggctacatcaagcgcatgcaggcggcggtgaaggcgacgacgtcaggcaggggggcgctcgacgtcaagatcgtgcagttggtgaagctgctgcgcaatggcgaaccggtgaaaatgtccaagcgaagcggggacttcgtcaccttgcgtgaggtggtggatgaggtcggccaggacgccgtccgcttcatgatgctctaccgcaagaacgatgcggtgctcgatttcgaccttgccaaggtcatggaacagtcgcgcgacaacccggttttctatgtccagtacggccacgcccgcggccattcgatcttccgcaacgcgcgcgccgaggtgttcccggagctgcctgaggataccggtactcggatcgcctggctcggtgagtcggcggtcgagcggctgtcggacccggtcgagcttgaacttctcaagcgcctcgcaatatatccacgtgtgctcgaagccgccgccgcggcccacgagccgcaccgaatcgccttttatctctatgatttagccagcgaatttcatgcactttggacgaaggggcgcgatttgccctatttacgcttcattatcaataatgatgcagatctaacgaaggcgcggctggccatggtccagggcgtcgtctcggtcctggcatcgggcctcgccatcctcggcgtccatgccccggacgagatgcggtagtttggggcgaactacttaaggggattcgggggtaaccggcagaagccggatcgcttagacttggttgaaagccttgtgggtcgaaagccgtgccttggtcgaggggcgcgcggctttcccgaagggacgcatcatcacgatggccgaacgatatcaggacagaccgtttccttccgatgactatggtcgcggtggcgatcagtatgggaaggcggagagcgatcccttggccgagctcgcccgtctgatcgggcagaccgatccgtttgcggcgcagggacggccggctgcgcgctccccggccgcgcccacgcaaagctatggggaagacgggtaccgccagcacgacgaccggcaggactacgccgagcaggcctcgccgcctgggccaccctcatggatgcggcgcgccaatgtgcagccgcagccggcacccgcgccggagcctgactatcccgtctcggtaagcccggttcatccgctacatcgctattcggccaggtccgccgcgcccgaacctgttcatcagccgcaggcctatcaggatcacggccaggagaatcagtcttaccaggatcagtcctaccaggatcaggcctaccagcagcaccgtccgtcttaccaagagcagtcctatcaggagccgtacgcgccggatccttcgcgctacgatgatgcgctctacggccgcctcgagacaggtgagcaggactatcagcgcgatccgtcctatccggacgatccttatgcgttccagagcgactatcccgaagccgaactcgacgagccgaagaagcagcgcggcggcatgatgacagtcgcggcgatcctggcgcttgccgtggtgggcactggtgcggccttcgcgtacaagacctatatcggctcgccccgcagcggcgagccgccgatcatcagggccgacaatgcgccgaccaagatcgtgcccgcgccgagcgattcctcggccaaggtgccggaccggatggtcagcggtgacggcactgagaagatcgtgccgcgcgaggaagccccggtcgacgtcaacgcaaaggcgggcggtccccgagtggtgttcccgccactgaaccagaatgcgaacccaccgtctgtggcgagcgtctcgccgtctgcaattcccgcgccgagctcgggagccgtcccgagcaatggaacgttgccaagcaattcgccgcgcccgatccggaccgtggccgtgaagggagaccagaccgacagcgcgccaccgcaatcggctgcagtcaagccgacgccagcggcgccgaagcctgttgctgcacccgctgtgccggccacgccgcgcaatccgccgacctcggccaatgccagcgtccatcagccgatgtcgctggccccgcaaccggcggccgagccttcgcagaggatggctgcgactagtccgactccgctcgcgcccgccagcagcggcggcggctacatcgtacaggtctcctcgcagcagagcgaggacagtgccgccgcgtcctaccgcgtgcttcagagcaagtacggcaacgtactcggctcccgctcgccggtgatcaagcgggtcgacctcaccgacaagggcaaggggatcgtctaccgcgccttcgctggcccgtacgcttcggccgaggaggcgacgcaggcttgcaacagcctgagggccgccggcttgtccgcctgcttcgtccagaggaattaaaggccgtttccttgaccccctcgcgggtcagggttaatcggccgtcatgagcacgcgggccttcattaccggcgtatccggaacggaactcaccgccgccgagcgggagtttatccgtgaccagcgcccgtggggcttcatcctgttcaagcgcaatgtcgcgacgccgacgcaagtcgctgcgttggttgcggaattgcgctttgtcgcgaatgctcccgacgcgcctgtcctgatcgatcaagaggggggacgggtgcaacggctgggcccgccgcactggccggtctacccggcgggcgccacgttcgcggccttgtacgacactgattcggccctcgggcttaccgcggcgcgtctcagcgcacggcttatcgcggccgatctcgccgatctcggcatcactgtggactgcctgccgctggccgacgtgccggtgccgggcgccgatgcggtcattggcaaccgggcctacggcactgagccgggcaaggtcgcggctattgcccgggcggtcaccgaggggctggagcagggcggcgtgctgccggtgctcaagcacattcctgggcacggccgggccaccgccgacactcatttcaagctgccgacggtcgacacgcctcgggccgaactggaacggaccgatttcgccgcgttcaagccgctcgcggacctgccgatggccatgactgcacatgttgtgtttagcgccgtggaccccgcccatccggcgacgacatctgcgacaatgattgctgacgtgattcgcggcgcaatcgggttccagggtttgttaatgagtgatgacgtgtcgatgaacgcgctgtcggggaatatcgccgagcggacccgcgccatcttcgcggccggctgcgacgtggccctgcattgcaacggcaacatcgaggagatgcgcgacgtcgccggccaggcacccgaactgtccggcagggcgctggagcgcgcgaacgccgcgcttgcggcccgcaagccgccgcagccgttcgatcgggcggccgcacgcgcggaactggacgcattgatcgcacgggcaaacacggcatccgcatgaccgcagaaatcctatcgttcgaaaccgggcggccagcagagctcgccgagggtgagccggcgttggtggtggatgtcgagggctatgaagggcctctcgacctgctgctcgcgctggcgcgtcaacagaaggtcgacctcgccaagatttcgatcctggcgctcgccgaccagtaccttcacttcatcgaggccgcgcggaagattcggctggagctggcggctgactacctcgtcatggcggcctggctcgccttcctgaaatcgcggctattgctgccggagccgccgagcgcggaggggccgagcgcggagcagatggcgacggcgctggccaaccgcctgcgccgcctcgaagccatccgcgaagccgccaaccggctgatgaaccggccgcaattgcagcgcgacatcttcccgcggggcgagcccgagcagatcgccgagatcaagcatccgaaatacacggcaaagctctacgatctgctgaccgcctatgccgcgcagcgccagtcgcgcgtgctggcgagcgtgcatctggccaagcgcacggtgtggtcacttgccgaagcgcgcgccacgctggagcgattggttggcagcctcaacgaacaggatgactggggcgtgctggacgatttcctgatccgacacgtcgccgatccgacgcagcgggcaacagtgttcgcctcgagcttcgccgccgcgcttgagctggtgcgcgaaggccagctcgagctgaaccagaaagaggcgtttgcgccgatctatttccggaaagggcgccaaaaaccggtcctggacgcagctcctgcgcctgatgcgccggtcgcctaagtgcaagaaggagaatctgccatggcaagcctggctgaagtgcgcgtagaagaggccgagccgatggagaacgaatcccaggcgcgtccggaggaattgcggctgctggaagcgctgctgtttgcgtcgagtgagccgctggataccgccacgctggccaagcggatgccggagggcgtcgatgtcaaggccgcgctcgagcagctgcaggccgactatgccctgcgcggggtaaacctcgttcgcgtcgccaacaaatggaccttccgcactgccggcgatctcgcttggctgatgacccgggagagtaccgagacgcgccgcctgtcgcgtgccgcgatcgaggtgctggcgatcatcgcctaccaccagcccgtgacgcgtgccgagatcgaggagatccgtggcgtcgtcacctcaaagggcacgctcgacgtgctgctggagaccggctggatcaagccgcgtggccgccgcaagacgccgggccgtcccttgaccttcggaaccactgaggaattcctgtcgcagttcacccttgaacagctcggcgatctgccgggcctggaagagctgaagggcacgggtctgttggattcgcgcctgccgaccggatttagcgtaccgacgccgtccgatgatccggcgctgcgcgaggacgaggatccgctggaaccaggcgacctcgatcttgcgctggcgccagcggtcgagcccgagacctcgcaggagccgccggcaagtggcgatgagggagccggcgagggtagcagcgaaggtggcaccaacgagtgagtcccggtgctttacggcccctgcgaccggttaacactagcaagattgcgtagtgccgacagcgaattggcgccgccttggtccttgtttttgagacctgccaagcctaggtttcggtgaagatcggccgggtccccggccatgcgcgtttggagggttgcaggatgggttcactcagcatttggcactggatcttggtgatcgcagtggtcctgctgctgttcggccgcggcaagatttcggatctgatgggcgacgtggcgcagggcatcaaggcgttcaagaagggcatgcaggacgacgacaagcccgcagacaagcccgagccggcgaagtccatcgagcacaatggcgcgccgaccgcgtcccggtccgacgtcggcagcaaggccgtctgagccgaaagagcacgcgagacgtgggtagcggccccgatcctgcgcgcgagggattgggccggcttcggctggcgtgaacggaagacctcatgttcgacatcgggtggagtgaactggtcctggtcggggtcgtggccctgatcgccatcggcccgaaagagctgccgggcgtgctgcgtatggtcggacagtggatgggcaaggcccgcaagatggccgccgaattccagggccagttccaggaagctatgcgcgaggcggagatggccgacctcaagaagagcttcgacgaggtcaaggaagccgcgaccggcttcaccagcaacaatccgctcacctcgctccagaaggacgtcagcgacgcgcttcgtgttgatgcgctggacaagccggcggagacgtcgacgacgacagccgtcgatccgccttcgacgcccacgaccccggaagcgccgacacccgcgaccttcatggaagccgaggcccatgcagctgcgaacgagccgctcgcgatcactcgtgaggtcgaacaggcggcggttgcgcaggacaccgcaccatccgaggcaatcaaggacgccaaagcgtcatgaccgacgccgatatcgaggccagcaaagccccgctgatggaccatttgatcgagctgcgttcgcggctcatcaaggcgctgcttggcttcggcattgccttcatcttctgtttcttcttcgccaagcagatctacaacgtgctggtctggccgttcgtgtgggtggcggggcccgagaattcgaagttcatctacacggcgctgctggaatatttcatcacgcagctgaagctcgcgctgtttggggcaggcttcatctcgtttccaatcgtggcgacgcagatctacaagttcgtcgcgcccggactctacaagcacgagaagcaggctttcctgccatatctggtcgccacccccttcttcttcgtgctgggcgcggcgctggtctacttcgtcgtgttgccgatgctggtccgcttctcgctcggcatgcagcagaccggcagcgacgagacagcacagatccagttgctgcccaaggtcggcgaatacctgtcgctgatgatgtcgctgatcttcgccttcggcatcgctttccagcttccggtgattctgacgctgctcgggcggatcggcatcgtcagctcgacgatgctgcgcgagaagcgccgctacttcatcgtcttggccttcgtgatcgcagccgtgctgacgccgcccgacgtgctcagccagtgctccctcgcgtttccgctaatggcgctgtacgagggctcgatcctcgcggtggcgatggtggagaggaaggcggccgccgcacaggctgcgaccggtaccgacgtctcgacgccggccaatccggcggagtagggcgctttcgtccgatcatcgcgctgctccgccatgattcgtcatacccgggcttgacccgggcatccacgacttgatctaaggcggcagacacgtggatggccgggatagacccggccacgacgggaaagcagccatgcacgacatcaaatcgatccgcgacaatccgcaagccttcgacgccggcctcgcacggcgcggtttgaagccgatgtcggcctcgctgctggcgatcgacgagaagcggcgcgcggccatcctcgcctccgagcaggcgcaggcgcggcgcaatgcggcctccaaggagatcggcgacgccaagaaggccaaggacgaggcgcgcgcagcgaagctgatggccgaagtggccgagctcaaaaccacgatgccgcagctcgaagccgctgcgaaggcagccgacgaggaactggcgaaagagctgtcggcaatcccgaacattcctttcgatgacgtgcctgatggggtcgacgagcacggcaacgtccagcaccatgtgttcggtaaaaagcggaactacagcttcgcaccgaagctccatgacgatctcggcgccgcgctcggctacatggacttcgaggcggccgcaaagctctctggtgcgcgtttcgtcgtgctcaagaaggcgctggcgcggctcgaacgcgccatcggccagttcatgctcgacctgcacacgacagagcacggctacaccgagatcaatccgccgctgctggtccgcaatgaggtgatgttcggcaccgggcagctgccgaaattcgaggacgatcagttctgggcgatcaagggcgaactgctcgcatcgccggaccatgagcggctgaagacggagcgcctcggcctgatccccaccgctgaagtctcgctgaccaatcttgcgcgcgaatccatcctcgacgagaagcagctgccgatgcgcctcacggcgctgacgccgtgcttccgcgccgaggcgggcgctgcgggacgggacactcgtggcatgatccgccagcatcagttcaccaaggtcgagctggtctcgatcacgacgcccgagaccagcaaggacgagctggagcggatgctgtcctgcgccgagcaggtgctgcaacggctcggcctgcattatcgcgtgatgacgctgtgcgcaggggacatgggcttctcgtcgcagaaaacctatgacatcgaggtctggatgcccgggcagggcgatggcggtatgttccgcgagatctcgagctgctcggtctgcggcgacttccaggcccggcgcatggatgcccgctcgcgcgggccggacggcaagccgcgcttcgtgcacacgctgaacggctccggcaccgccgtcggtcgggcactgatcgctgtgatggagacatatcagcaggaggacggctcgatcgctgtgccggacgtgctccaaccctatatgggcggcctaaaggtggtcgcgcgcgagtagggttgcgaagattggccggccggctatcctgctggcgcctcaacgcgaacccaccgttcatgcccttgcaccgcgacatcttctgggtcggccgacaatgggcggtgactggtgccggaatccaggccatcgatcagcgccttcgcggtgtgctcgacatcgcgatcgcgcggctctgggacgatgatctcgtgcagagccgacgggccaagcctggtgtcaatgctgccgacttcgacaaggcgctgacggtggcacgcgaacgctttccgaaggcgccggtgtctggtccggtcgtcgcccagcgggggacgctcggcgcgatcgagactcccgtcgtaagtcctgtcgtgccggcgatgagcctgcgcgcggaaggccggctcgcgcgcttcctgccgcaatggcggattcgtcgctagcggggatcggggggaacctgccgcccgggctccgatcaggccggtttgcctgatgggccacggccggatatgacagatcaaacggcttttgtggaagcgatctggcgcatgcgcattctctgcaccaatgacgacggcattcacgccccagggctcaaggtcgtggaggagatcgcgcgtgccttgtccgacgatgtctgggtggtggcgcccgagctcgaccagtccggcgtgtcgcactcgctgtcgctaaacgatcccttgcgcctgcgcgaagtcggcccgcgccactttgctgtgcgcggcacgccgacggactgcgtcatcatgggagcccgccatatcctgggggccaagctgcccgatgtcgtgctgtccggggtaaacaaagggtcgcaacgtggccgaggacgtggtctattccggcaccattgctggcgcgctggagggcaccatcctggggctgccgtcgtttgcgttgtcgcaagagttcagcgttgagacccgcgaccggccgccgtgggacaccgcgcgcaagttcggacccgacatcgtgcgcaaggtgatcgccgccggtgttccaaaggacacggtgatcaacgtcaacttcccgtcatgcgcgccggaggatgtgctgggcgtccgcgtcacgcggcagggcaagcgcaacctcggcttcctcaggatcgacgagcgcagggacggccgcggcaatccgtatttttggatcggcttcgagcggacagcaatgctcgacacgcccgacgccggcaccgatctggcggcgctgcgggagcgctacgtctcggtcaccccgctcaggctcgaccgcaccaatgaggcgttttcggagcagctcagcgcgacgctgaaataggcctagccgccgcgaagcgcggcttcgatggtcttgccgagcgcgtcgagctggaacggcttctgaagcgccggccggtcgcggtactgttcgggcaggccggaggagccgtaaccggtggcgaagatgaacgggcagcccttcgccatgatgacatcggccaccggcgagatgaccttgccgttgacgttgacgtccagaattgccaggtcgaaatcagtggtctgcgccagccgcatggcctcggcgatgtcgcccgcttcagcggcaaccttgtagccgagctcctccagcatatccgcgaccatcattctgatcatgacctcgtcctcgacgaggaaaacagagcggcccgaaagccctgtcgcagtcataggtgagtccttgcccattctcgcgaacgttcgcagataacgataagtgacgcaatgcgcgtttcggcgaaggcaaacccgcaaatggcttagcgccttgaaggcccgattgtggtcaaatgccgggccgaaaggctagcatgagttcctgagccggaacaagattctcgcctcggggtcttgcggcgcagtgcggcgttccgccagacgagatgagcagcagcaatgacgtcccagcaccacccgccggaaaagatgatgtttcagctgacgctgaggcgtcgcggcatcagcgatcaggccgtgctgcggacgatggaggaggtgccccgcgagcttttcgtcgacgaagccgatcgtgacggcgcctatcgcgatagcgcgttgccgatcgcctgcgggcaaaccatcagccagcctttcgtcgtcgcctatatgaccgagcagctccagctccagaagcagcaccgggtgctcgagatcggcaccggctccggctaccaggctgcggtgctgtcgcggctcgccggccaggtgctgacggtcgagcgctatcgcaagctcgccgatacggcacgcgcccggcttgaaaagctcgattgtcacaatgtcgaggtgatgctcggcgacggtctcaatctgcctcccaacattggtccattcgatcgcatcatcgtcaccgccgcgatggatcagatcccggagaacctggtcgagcggctggaggtcgggggtatcctgattgctcccgtcggcccgcatcagggcgtacagacgctgacccgcctgacccgcaccgacaccgggatcgagcgcaaggaactcgtcgaggtccgcttcgtgccggcgctgcctggcgtcgcgcgtgagctgtagaatccgggatcggctgcgctgccaacgtcttattgggagggttaagccgttatttactcggcgggtgtttacttaaaacaccagttctgttgcgtacgagtgagtaaccatgtccgctgtcgccgagttgctttactcgcgccgcgtgccgcaggtcgcggtgctggcgctgatctccttcagctttgcaggatgcagcgccgacatgtcgtcgcggctgtcccagtcgaacttctccaatcccttcgcctcggaatccacgggctcggtgcagcaggccccgccgccgcagcgtgagttgccgcaatatgcgcggccgcagacgcagcctggctatcatcaatcgcagcctttgccagcgccggccgtagctgcgccgcaatcctatccggtctcgtcgggcgggggagtctctggcggtgggcgcggggtcagctcctatgcgcctccggcgcagccgcatctggaaaccacggccaccgtgccgccgcgctcggttgcggcggcccagccagccggcggaaccaagatcatcgtcggcaccagcgatacgctcgatgtgctcgccaagcgctaccgcgtcaccccgcaggcgatccttgccgccaatggctacaaggggccgcgcgcgctgtcgccgggccagcagctgatcatcccgcatccggcgacggcgcctgccgcggctcccgtcaccgccgcagccgctaccaagcccgttgcggccgtggctgcgccgtcgagcacccatttcgtcaatcagggcgacacactcgccagcattgcccgcaagaaccgtatctcgacagctgagctcgcccgcgtcaacggcatcgatccatcggcaaaactcaagcttggcaccaggctgaccgtgcccggtgccaagaccgcggccgtcgctgcgcctgcggctccggtcgcagctgcgcctgttgcgggaacgcttcagcccgtcgccgccgctcccgcacctgccaccaagatggccgccgtcgcgccggtgcagagcgcgcgtttggctcaggcgacgtccaatgtcgaagagaagcccgccgagacgcctgcgaaggcggcggaagctaccggcgcgctgccgaccttccgctggccggtccgcggcaaggtggtcacgagctacggcgccaagaccaatggcaaatccaacgacggcatcaatctcgcggtgcccgaggggacgccggtcaaggcggctgaagacggcgtcgtcgcctattccggcaacgagctgaaaggttacggcaatctggtcctggttcggcactccaacggctacgtcaccgcatatgcccatgcgagtgagctgttggtgaagcgcggcgataccatcaagcgcggtcaggtcattgccaagtcgggtcaatccggtgaagtggcgtcgccgcagctccacttcgagatccgcaagggatcgagcccggttgacccgcttcaattcctgaacggggcgtgaggcgccgcagtctgtggagcggacgatccagtgctccagagacagtcattgtggagccgcgaggccgcagcgtactggattcccgctttcgcggggaatgacagttgcaggttgtcgatcgctgctgctaagtcgccgtcagcttcacgccaagccggcccgccagctcctgcacgaactgccaggcgacgcggcccgagcgcgagccgcgcgtggtggaccattccagcgcctcgcgctacagcgcttcatcgtcaatcttgatgccgaaatggctgcaatagccgcgcaccatggcgagatattcgtcctggctgcagcgatgaaagccgagccacaggccgaagcgatccgacagtgagaccttctcctcgaccgcttcaccgggattgatcgcggtcgaccgctcgttctcgatcatctcgcgcgccagcagatggcggcggttcgaagtggcatagaggatgacgttctcgggccggccttcgatgccgccttcgagcacagccttgagggacttgtaggaggcatcgttgccgtcgaaggagaggtcgtcgcagaacacgatgaagcggaacggcgaagcgcgcaattggtccatcagcgcgggcaggctctcgatgtcctcgcggtggatctcgatcagcttcagcctgtcggcctgtttgcgctgcgcgttgatgctggcgtgcgccgccttcaccagcgacgacttgcccatgccgcgagcgccccagagcagcgcattgttggccggcaggccgttggcaaagcgctcggtgttctccatcaggatgtcgcgcatccggtcgacgcccttcagcaggaacagctcgacgcggctgacccgcggcacggcagcaagccgcccgttgggatgccagacataagcatccgtccgttcgaacgactcgcgctcgacggctggtttgccctgggcggagaggtgcgccgcgatggtctccagcgcgcggacgatgcgttcctgcgcaagctctggggctgccttgatcgctttggaggctgccgtggggcgttttgccgcgacgcgggcggcctttctggcaggggtgcgggggcctttgccggccgggcttttgctaaggtttttgggcatgtccgaagttcctgagaacgcagccttatcgggcctgacggtccgccgcaaggtggcccaaaagggcagcctggcagcgttgcaattggggcaatggccgctatagtccgcgcgaatttgaccgaaccggtcgccgttgagggcctgaccggctttcccccgttctcacgaggatcgtccgaatgctgattactcctgcgtatgcccaggctgcggccgccggcgacaccaacagcatgttgatgtcgctgctgccgttcgccctgatcttcgtgatcatgtatttcctgattctgcgcccgcagcagaagaaggtccgcgatcatgccgaactcgtgaagaacatccgccgcggcgacaccgtcgtgacttcgggcggcctcgtcggcaaggtcaccaaggtcgtcgatgacgaccagatcgagttcgagatttccgacggcgtgcgcgtgcgtcagatgcgccagatgatctcgggtgtgcgcgccaagggcgagccggccaaggagtcgaaggacagcgcgaaggaaaccgccaaggacgacgccgcgtcgaagtgagcgcttccgcgagcatctcaagtctcccgatctgacaggtccagtcgatgttgtatttcacgcggtggagggcgctgggggttatcctgacggcgctgatcgtgtgcctctgcgcggtccccaacttcttccccgaggagcaggtcaagacctggcccgcctgggcgcagcgcaggctcgtgcttggcctcgacctccagggcggctcctatctgctgcttgaggtcgactcggcctatgtgaaaaaggagcggctcgatcaggtccgcgacgaggttcgccggacgctgcgcgatgccaagatcggcttcaccggcggcgtcactgtgcgcaacgacgctgtcgaagttcgcatcaccaaggaaaccgacgtgcagccggcgctcgccaagctgcgcgagctgtcccagccactcggcggactgatgggctcgagcggtcagcgcgacctcgaggtgaccgatgcgggcggcggtgtgatccgcctgaccgttccgcagccggcgacacttgatcgcctgcgcaggaccatcgagcagtcgatccagatcgtcgagcgccgcgtcaacgaactcggcaccgtcgagccggtgatccaacgccagggcaacgatcgcatcctggtgcaggtgcccggtcttcaggacccgacgcgcctaaaggagctgctgggcaggaccgcgaagatggaattccggatggtcgacacctccgtgccgccggatcaggcgcagcagggcagggtgccaccggaatccgagctcttgatgagcgcctcgccaccaccgacaccgtacgtggtcaagaagcaggtattggtcgccggcggcgatctgaccgatgctcaagcgagcttcgatcagcgtacgggtgagccggtcgtcagcttcaaattcaacacgtcgggcgcccgcaagttctcgcaggctacgaccgagaatgtcggactgcctttcgcgatcgtacttgacaacaaggtgatctcggcgcccgtgatccgcgaaccgatcaccggcggccagggccagatatccggcaatttcaccgtgcaatcggccaacgatctcgcgatcctcttgcgcgccggcgcgctgccggcaccgctgacggtggtggaggagcgcacggtcggtccgggcctgggccaggactccatcgagaagggcgagcttgcggcttacgtcggctcgatcctcgtcatcattttcatgctcctgacctatcggctcttcggcgtgttcgccaacatcgcggtggccatcaacgtcgccatgatcttcggcctgctgtcgttgctcaatgccacgctgacgctgcccggcatcgccggcatcgtgctcaccgtcggcattgcggtcgactcgaacgtgctgatctacgagcgtatccgcgaggagttgcgcggtggccgcaacgcgatctcggcgatcgatgccggcttcaagcgggcgctcgcgaccatcctcgattccaacatcaccaccttcatcgctgccgcggtgctgttctacatcggcaccggaccggtccgcggctttgccgtgacgctcggcatcggcatcatcaccacggtgttcaccgccttcaccctgacccggctgatcgtggcctggtgggtgcggtggaagcggccgcagagcgtgccgatctaggagcctgatcgtgactcacaccgttctcatcgggctcggcgtcctcattgccattctcaccgtggtctcggcgctcggcctgctgccgtccctgcgcatcgtcccggacgatacgcatttcgacttcacgcgattccgtcgcatcagctttccgatctcggcggcgctgtcgatcctcgcgatcgtgttgttcttcacccacgggctgaatttcggcatcgacttccgcggaggaacgctgctggaggtcaaggccaagtcgggcgccgccgacatcgcggcgatgcgcacgacactggattccttgcgtctcggcgaggtgcagttgcagcagttcggcggacccgagaacgtcttgatccgcgtcgcggagcagccgggcggcgacgccgcccagcaggaggccgtgcagaaggtgcgcaccgcgctcggcgattccgtcgaatatcgccgcgtcgaggtggtcggcccgcgtgtctccggcgaattgctggccttcggcatgctcggcctgatgctcgcgatcctcgggatcctgatctatctctggttccgcttcgaatggcagttcgcgctgggcgccatgatcgccaacgtgcacgacatcgtgctgacgatcggcttcatgtcgatcagccaggtcgatttcgacctgaccagcatcgccgcgctgctgaccatcctgggctattcgctcaacgacacggtcgtcatctacgaccgcatccgtgagatgctgcggcgctacaagaagatgccgatgccgcagctgctcaacgagtccatcaactcgacgctatcgcgctcgatcatcactcacgtcacggtgacgctggcgctgctcgcattgctgttgttcggcggtcacgccatccacagcttcactgcggtcatgatgttcggcgtggtgctggtcggtacctacacctcgatcttcatcgcggccccgatcctgatctatctcggcgtcggcgagcaccgcgaggatgctcccgacacggctgcgccggctaagaaaagcaaggcatgatccgaacctcgcgccctcgcaggagtttgcgagggcagtaagcccattcggacgaagctcatggccggcgatccaaacgctccgcatttcccgcgctcggcgcccatcgaggcctacggcaagggcggtttcgctttcgccggcatgtcgcatcggggctcgctgctctgcctgcccgacgcgatctgggcctgggatgtgacggaccccgaaaagatcgaccgctactcgctggatcgggtcttcgcggccgccaacagcattgacacgctcctggtcggcaccggaaccgggctgtggctgccgccgccggaactgcgtcacgcgctcaaggcggcgagggtggtgctggacacgatgcaaaccgggcctgccgtgcgaacctacaacatcatgatcggcgaacggcggcgggtggccgccgcgctgatcgccgtgccatgagccgcccggcaccgccagccgactccgccgccttctgcgccgatctcgtgcgcagccatgactttccgcactatgccgcgaccttgttcgcgccggccgccgagcgtcgcgcgctgctggcgctgtacgccttcaacgtcgagatcgtccgcgttcgcgaccaggtgagccaacccctgcccggcgagatccgcctccaatggtggaccgacatgctgtcgggccatgtccatggcagcgccgagggcaatcccgtcgcagccgagctgctccacgcaatccacgatttcgacctgcccgtcgagccgctgtcgctgcttgccgacgagcatcagttcgatctctacaacgatccgatgccgaccatggctgcgctggagggctatctggccgcgacctcgtcggcgctgttcggtctggcggcgcgggttttggcaccgccgtcggaagtggtcgagcatctcgcccgtcatgccggactggcgcagggcatcgtgcaggtcatcgccaatttgccgcgcgatgccgcgcaccggcaattgttcctgccgcagcagctcttggagaagcacaattgcagcatggaggatgtgttcgccggcaaggatacgcctcaactccatgcggtgctcacgcagctctcgggagaagcccggcagcacgtgaccacggcttcctcgctgctgacgcaggtggcgccgtccgtgcggccggcgttcctgccgctgagccaggtgcgggccgatctaaagcgcctgtcgcatcctgggcgcaatccgtttacgctgcagccgccgtcccggttgcgcaccctctggaccttgtggcgcgcctcgcgatcacgtgagtttaccaaatagcggctggcttatcgcctcagcctgccaaatgctctatgctgtcccatggctgagttgtcccaaagcacgtcatccggtctcagcggctttccggtcgcacccggcgacattcatgccgccgccgagacgatccgcggcgccgtcgtcgagacggcctgtagccatagccgcacgctgagcagcatctgcggctgcgacatctggctgaaattcgagaacctccagttcacatcttcgttcaaggagcgcggcgcgctgaatcgactcaccgcgctggcgccggaagagcgtgcgcggggcgtcatcgcgatgtccgcgggcaaccatgcgcagggcgtcgcctatcacgccaggcggctcggcattcccgccaccatcgtcatgccggtcggcacgcccatggtgaagatcgagaacacccggcatcacggcgccgaagtggtggtcaccggcgcgacgctggaagaggcggccgcctttgcgcgaagccacggtgaagcgcgcagcatgatcttcgtccatccttacgacgatccactcgtcattgccgggcagggcacggtcgggctggaaatgctcaaggcggtgccggagctcgacacgctggtcgtcccgatcggcggcggcgggctgatcagcggcattgcgatcgccgcgaaggcgatcaagccgtcgctgcggatcttgggcgtcgaggcctggctctatccctcgatgtacaacgccatccatggcggcaatttgccggtgcgcggcgacacgctcgccgaaggcatcgcggtgaaatcgccgggtaagatcactacggaagtggtccgccgcctcgtcgacgacattgcgctcgtcaacgaagccgagctcgagcgcgcggtcgcgacactgatctcaatcgagaagacagtggtcgaaggcgccggagccgccggcctcgccgcgctgatgtccgatccgtcccgctttgccggtcagaaggtcggcctcgtgctcagcggcggcaatatcgacacgcggctgatcgcctccgtcctcacccgcgaactggcgcgcgaagggcggctgacgcaactgtccctcgatattcctgatcgcccagggcagctggcagccgttgccgcgctgctggccgaagccggcgccaacatcatcgaggtctcgcaccagcggaccttctccgaccttccggcaaaggcgacgctgcttcaactcgtcatcgagacccgcgatggcgctcatctcgatgacgtcatggccagactcagcgcgtccggattgagcgcgcgctgcacctgaaccgctcgccggccattcactatcgcgacgccagagccgcgagatgaccgatcagccgatcgatctcggcttccgtattgtagtaatgcggggaagcgcgcacgagcggcggcagagcccggtgctcggcatcgatgcgggtgcttgacgggtctgacgcgccgatcgtgatgcccgacgccgcggcgctacgaacaatggtgtcggcctcgtacccctccatcgtgaagctgacgatggcacccggcgcgcgtccgaggtcgcgaatggtgatgccgcggatggaggcgaggccatcacgaaggcggcccgccagcaggcgacagcgctgctcgacgggacccatgccgatgtcgagtgcataatcgacggcagcaccgaggccaagccgggccgcgtaattgttctcccaggtctcgaatcgacgggcatcgtcccgcagccgataggcgtcccgtgcgacccagggcgccgcaaagtggtcgatcattggtggttcaagctgctgcaggagcgcccggcggacgtagaggaagccagtcccgcgcgggccacgcaggaatttacgcccggtggccgacagcatgtcacaaccgatcgcatcgacgtcgacctccatttgcccaacggcttggcaggcgtcgagcagatagggaatgccgtgcgctctcgcgatcttgccgatcgcggctgcggggttgaccagcccgccattggtcggaacccaggtgacggcgatcagcttcacgcgctcatcgatcatccgttcgagcgcgtgggcgtcgagctcgccgctggcatcgctgggcacgacgtcgatcgtcgcgccggttcgtttcgcgacctgtagaaacgcgacatagttggcggcgtattccgcctcggctgtcaggatgcggtcgccctcgcaaaacggcagcgcgtagaacgccatctgccaggcaaccgttgcattctccatcagcgcgatctcgtcgggggcggcattgagcaggcgcgccaccgagccatacacagcgtcgagccgttcggactcctggtcggctgcggcataaccgccgatttcgctttcgagatcgatgtgccccttcagcgccgcgacaacgggcgccggcatcagagccgcgccggcgttatgcagatacgcaagccgcgctgtggcaggcgtgtcatcgcgtacccggccgatgtcgatcattggcgcctccgcttctgacgatcctcgtcctgaattatgcgcgtccaggtatgggagcaagacggggccaggtttggcctcaaatgcagaggctgagcagcttgatgtggcagctgctggatttgggcttgcttgccggagcagcctcgcgtttcaccgcgaccagcggctccttgtccttcttgcccttacccttgcccttgcccttcggctcgtaatcgccggcaatcaccatggcccaataggttcgtttgccgctggcattcttagcgctggcaatgccgacgcgggaagccttgtgcagcaacaggttcttgcggtgccccgacgagtcgatccactgtctcagcgtcttctcgaaactatcgtagccgtaggcgatgttctcggcggcgcggcccgcgccagccggtgcgacacggcggttgaaagggccgagcgcgtcatggctaagttcgtccttggccgccatcgcgcgggcctggtccatggcgatgcgatcgagcgtggcatcgcggacgacgcgaacctcaccatgcgtgaggcggaagttcgagatcagctcggccggggagtccgccagcgcgggcgcgcctgtcagcagcagaaggccagcgatcattcccccaagcacacgatgcattacgatcccccgaacgcccatgttctttgccggccctgcgttgtctgaacgcttctcgatcgccaatgtggacgcttcaaggcacgggccgtactagctggttggcaggttcgcttcgaaattgaagcggtcgcgcaggttcttgcgctgctcgaggatgtccttgaggaaggcacggtcctggtcgttcttcatcattggctcgatcagatcgagctggttcatggcgaccagctgaagaacctcggtgcgcggcttgccgctggtatcgcgcggcagggcgtggacgacctggatgtgttccggcggtttcgggccctttgcggctacgagctcgctgcggagctcgccttcgagcgcggcttgatcggcttcgacgaaggcatagagcccgacaccggaacggcggtcggcgaaggcgacgatggcggtatcgcgcaccgcggggttcctgcggatcagctctgccagcacgggcgcgtcgttgaccagccggcggccgccgccctcgcgatcggtgaagttgaacaggccgcgggtgattgcgcgatagaccttcttgccggtggcgagccacaggctcgcggcgaacgatttcttcgccaggatcttccgctcccgcggagtcagcgcctccggcgcgtaggagcgcttgtgcttgaggagatggcggagatcttcgtaggccaggattcgatagagtcgaccgcggcgatcaaagcacgcggcgagctggaagtcggtgacataggctcggccgtcgcgcccgaccagccagttctgctccttggccagatcgttgtggcaaatgccggcgcgtcgcagccggcgcagcacggccttggcggagcggaaataggcgagatcgccatgcggctttgccagatgcagcgcaacgccgtcgacgaagccccgcacgagcgcgcggcgtccggtccatagcagctcgggaccggcatcaaggcccttggcacgaaccagcgcgcgcttctcgcgggcgaacagatggcgtgccagcaggaacgaccaccatggcacctcgtcgagccggcgcagcaccgcatcgacctcgccggtctcggtgcggaagcggccgcgctcgactgtcgagaacacgtcgcgcttgagcagcacgccctcggtccatcgcgccgagagtgccgcggcgtcgtcttcagggaggctcatcgagaactcatgcggcggcggcaaagcgcaggtgatcggcgatccagcgatcgagatcggcaagcgcccgtgcgctcagcgcctgcttcttggccaccgtcttctcgttgccgcgcaaccgcgtgccgtccggcttcttcgtcggcgcagtcgcaagcggcggaaacagcccgaaattgatgttcatcggctggaacgagcgcgcgcccggctcgatcgtctcgatatgaccgcctgtgatgtggccgagcagcgatcccagcgccgtcgtgcccggcgggccgacgagcgtctcgccccgtgcgtcggcggcggcgtagaggcctgcgatcaagccgacgctggcggattccacgtagccctcgcagcccgtcatctgaccggcgaagcgcagccgttgctgtgcgcgcagacgcagttcgccatcgagcagttttggcgagttgaggaaggtgttccgatgcaggccgccgaggcgggcgaactcggccttctccagcccgggaatggtgcggaagatgcgctgctgctcgccgtacttcaatttcgtctgaaagccgacgatgttgtagagcgtgccgagcttgttgtcctggcgtagctgaacgaccgcgtaaggcttagtggtcggatcattgggattggtcaggccgacgggcttcatcggaccgtggcgcagcgtctcggggccgcgctccgccatcacttcgatcggcaggcagccgtcgaaataaggcgtgttggtctcccattctttgaactcggtcttctcacccgcgatcagcgccgcaatgaagccgtcatactgctccttggtcatggggcagttgatgtagtcggcgccggtgccgccggggccgaccttgtcgtagcgcgactggaaccatgccaccgacatatcaatcgactcgcggtaaacgatcggtgcaatcgcgtcgaagaaggcgagcgcgctctcgtccgtcagttcacggatcgcgtcggcaagcggtgcagaggtgaggggcccggtcgccacgatgacgttgctccagtctgccggcggcaggccggcgatctcgccccgggcaatctcgatcaggggatgatcgttcagagccttggtcacggccgccgagaagccgtcgcggtcaacggccaacgcgccgccagcaggcacctggttcgcgtcggccgctcgcatgatcagcgaatcgagccggcgcatctccgcgtgcaggaggccgacggcgttgttggcagcgtcgtccgaacggaatgaattggagcagacgagctcggcaagcccatcggtgcggtgcgcctcggtcatgcgagtcggccgcatctcgtgcagcacgacgggcacgccagatttggccacctgccaagcagcttcggaaccggcgaggccggcaccgatgacgtgtacgatgttggattggggtcctgtcatggggcggacaggtagcgcttttcgacggggagtggaatcgccgagatcgagttttctgccaccagatgcgacaacgcccgcacgaggcgggcgctatcggttcgtccagtgaagggggctgaacggcatcagccctgatactgaccggcggcaacgcgcgggatgtccgagcgatcaaggccgatatcggccagctcgcgatcgctgagctgtgacagctcggcaacattgcgctgatagtcccggaaagcctggatcatgcggatgagcgagagcagcattggtagtctcctgtagttcgattcagctcttgccggagcctcatcgttgaagtgaatatagatgggagtggtgcactgcgaaagttccgatgttgcgatgcagctaggcgaagaacgcatagcgcgagtaaccgacgattaaccggagggcactcccacccaaagcttgcctcaaagagcgtcagcttagtgataaatatccgtaacatcacggatttacgtcggacaattgatcttgatcatcgcagaaatgatctgcttgtagacggcctgtcggggcggctgatcagctcctagactcaattcttacctgcgtgattcgcatgagaaaaatgaatttaaattcattaattgagggcggccagtattgaagctccgattcacacccatggcgcgggcgctgccgagcgaatggtttgcggcgggacgcttggaggtaataaggtgcgtctcgcccttgtggggttagggggcgcgtgcaagctgggctgcgaaataggcgatggtcctggagtagacctcgctcttgttccactgctgcaggacagcaaagttcggactgcccggctgccaatcctttcctcgctgccaaccatagccggcgagataattggcggtggaggcgagcacgtcgggcgcgttgtgcaagaggtcgcgcttgccgttgccgtcgaaatcgacggcgtatttcatccaggatgacggcatgaactgggtctggccgagttcgccggcccaggcgcccttcatgtcggcaggcgcaagatcgccgcgctggacgatgcgcagcgcatccatcaactcggcgcgaaacatctcggagcgccggcagtcataggcaagtgttgccagcgagcggatcgttgcgaacttgccggtgttgacgccgaaatcggtctcgagaccccagatcgcaacgaggatctcgccgggtacaccataggtctgctcaatgcgcgacaaaacggagccgtactgcttcatcctgttcgagccgcgctgcaggcgtggcggcaccatgcggcctgaaaactcgtcgaagctctgggcgaagaccttttgtgatcggtcacggttaagcacgctctcatcgagcgtcacgccggccagcccggcgttgatcgcctgttgcgaaatgcctttcgccgcggcgtcggttctgaaatccgcaagccaagcgtcgaaattgcccgaaccgcaggcgacggcggccagagctggctgggcggacaggattgaggcggagagggcgagggcagcaagagcgagacgagaaatcgtcgaggtcattcgagcaaatggattccgtgaagcgatctgaccggcggacgcaatctcggtcggaaccgcggccaaagcaaggcgcgcgacaggggaagatcctgcccaggccggggccagggcagggtcgcatgtcacgatatcgtcagacgtcgatccggttgcgccaagggaagaggttggccgggaagtcggcggccggtttgcgcggacgatgcggcgggggcggcaccggatttgcgcccggctctgagacgatcaccttgcggtagagatgccaagtggcatgcccgagcagagggaccacgacggcgagtcccagaaatgccggaatggtgccgagcgcgagcagcaccgccacgatcaagccccacgccgccatcggcaccgggtttcttgcaacgacgcgcagcgacgtgcttatcgcctcgaacgcgccggcatgacgatcgagcatcaaggggaacgatacgacgcttacgcacagcgcagcgagcgcgaacaggaagccggtgccgcagccgaccacgatcagccaccagccctgctcggttgtcaggacgcgcgtcaggaaatccgagatcccggccgcgccctcgtagccgaacgccgcgatgtagatcgcctgcgcggtcgcgacccaggtcacgaacagagcgagcagcaacgtgccgacgccgagcatcgcaccgaatgaaggcgagcgcagcacatccatggcatcccaggcgctggcagattcgtagcgctcgcgccggctggatagctcgtagagtccgagcgcagcgaacggcccaatcagcgcgaatccggccgccagaggaaacaacagcggcagcaccgaatagcccatcacaacgcgggcaagcacgaggccgagcactggatagatcacgcagaggatgatggcgtggctcggaacagccttgaagtcttcccagcctcgcctgagcgcgtcgtggagatcggacagctggatggttcggatcaccggtccagccgcatcggagggctgggccatcgtggggacattgccctgatagagtgtggccatggtcgctagctcccttcgcggcccggtcctgcgccggtaaacaacgcaagcgaccgctctcttgaatgatcgcgatcccgaccaggcgcgaattccggatggcatcgcgagctgaaccgcaagcatactcctaactccgagtcctgtccctcacgcttgggtgaattcgatgccgcggcgcaactacgacggcgtcattctgtcgtcatttcgccgcagataagctgatgctgctgatgttcgccgaacttcgcgggcgcaacgcagtcacttcgtgtatgagtgccactcaaggcccttccaacggatccttttcggggagcagacatgagcattttcgggaaaatcatgggcgcgatcttcggcggcccatcggcctccgccgcgcccgccggtggcgccgcttcgcccagcgcgcccgcagggacgccgggcgcttcggcgcccgccgccgcgcccatgcccgcggtcgacgtggctgcaatcgtcgacaaggcggcagctgcacacaagggcgagaagctggaatggcgcacctcgattgtcgacctcatgaaggcactcgacattgattccagcctcgctgcgcgcaaggatcttgccaaagagctgggctacagcggcgacatgaacgactcggccagcatgaacgtctggctgcacaagcaggtgatgtccaagctcgccgccaacggcggcaagctgccgcccgagatcaagcactgacccatcgtcgccggaagggcccgcgatctcgcgggcccttttgctttcaggcgaccagatccgcatcctccggatgccgatcgatatagtcgacgacgaagctgcagccggcgatcactttcctgccgtcgcaccggatcaggtccagcgcccccttgaccaattcggacccgataccgcggccgcgcagcgcgcgcggcgtttcggtgtgggtgatgatcacggccgagggcgtcagacgataattggcgaaggccacgtcacccccgacatccagctcgaagcggcttctgtccttgttgtcccgtaccgatgcggtcatgcaagatccttccgaaatccagattgacacctgatctagggggcaaattccgctcttgccaaggtgagaccaaggagattggcgctgacgagacatccgcaagtgcgcgccgttgcaacgcagcgcaatatgcacttctcgctccgcggcccgatgaattgaccgtaaatattcctccatgtcgctcttgcaaggcgaactacggttcccacgtcgtggattagacatacgcccgaatacggctggcagggtcgttacacattcggagtgatcgccggccgcagacgtatgcttcttttgcaggagggtacgatgtcggactttggtttcctgaagactcatcggacatgggaagactggtgcgggatgctggtcggcgcgctgatcgtggtttcgccgtggtttcccgtgcaggatcaggcggcgatcgccggaaatcagacggcggttctgaatacgatcgcggtcggtctggtcgtgtttggcgtcagccagctcgagtacgtcgccttgcagcgatggcaagaggtggcgacaattctcgtcggactttggctcatcgcctcgccctacgtgatcggctattccggtgacggctttctccgcgtctatcacacgggcctcggtgcggtggtggtgctgctcggattgctccagctgtggcaggactgggacctgactgaccaggacatgctcaagcatggacaataggccggcgctctcgcaggctcgccgcccacgggcggcaggcccgctcgctcgcgtttaatcggccgctttggcgagcctggaatcctcgggccgtggctgcgggcggaggcagccctggcagatgaccaaggagcggttgaccctggcgtcctgctcggcctcgatgccgtcctgcgcctgccaccattccttcgaatagggctgaacgccggcttgcatcctgttgtgcgcggagcgcgcagcggtccgcgtcgcttgcgcggcagggcgcggccgattgggatcttgcccggcgccatcccaagcatagcgcgcaggcttgaaagcggggttcttgaccagaggcgcctgcggagtcgcggcacatccggcgagcgccagcgtgaacaggagaatgacgggcgctttgatcatgagatgcactctgtacgcgggggaccgatgaagggtgcgtcgatcatgcttaagatttcctgaacgattgcggtcgtagttgcgaccaacgccaatgcgatatctgatcctcttgctcaccttggtcgtgacttgcgcgcgcggacgacgcaacgccgttcaatccggccgactatccgcctggcgtgcagaaggcggtccgctacgccaacgaggaatgcgacagccaggagggcggcgaagtgactttcgcagcgaacaccgtgcgcaagatcgatctgaccggcgacggccgcgtggactacatcgtcgatttccaggacaccaagtgcggcgatcgcgagacgacctattgcggaactggcggctgtgtcgtgaagatcctggtgacactgcccgacggcggcgtacgcgaggtgttcgaaggccatgtgctccgctacaagatcatgggcccgccgatgaagcgcggcgctgggcgcatcgtccggttcgatctgcacgggagcttttgcgggggctacggcgcgcaggcctgccagaagacgaaggccatcacggcgacgccgtttgccttcgagcagccgtaggaagccggagggagccggccttgcagggacgccggcgttggcgataaatgggctgcaatgagcgggtggctcgcgtgtcgccccatcgtcgaagaggaagcccgatgcagcccttgcgtatgtcccgacgcgtcatgaatctcgcctacatgctgacgcagaacgcgcggcggcacgcatcgcgccccggcttcgtctggggcgacaagtcctggacctggcgcgagatcgatgcacaggtctcggcactggcagccgcgcttgcggcgcgcggcatcgccaaaggcgatcgcattctcgttcattccaagaacggcgaagagatgttcgtttcgatgttcgccgcgttccggctcggcgcagtctgggtgcccaccaatttccgcctgatgcccgacgaggtcagttatctcgcgcaggcctccggcgccaaagcgttcctgtgccatgtcgattttcccgagcacgctgcggtcgtgaagggcggcgcattggagttcacctggagcatcgacggcaaggccgcgttcggcgagcgatcggtggctgacgcgatcgcctcgcagcaggatgctgccgtggagaacgtcgccgtcgagcacgacgatccctgctggttcttcttcacctcgggcaccaccggccgctcaaaggcggcggtgctgacccacggccagatgggattcgtcgtcaccaatcatctcgccgatctcacgccgggggtgacggagcaggatgcctccctggtggtggcgccattgtcgcacggcgccggcgtccatcagctgatgcagaccgcgcgtggcgcacgcaccgtgctgctgccgaccgagaagttcgacatcaacgaggcgttccgcctcatcgaggagcatcgcgtcagcaatctcttcaccgtgccgaccatcctgaagatgatggtcgagcatcccgccgccgacaaacacgaccattcctcgctgcgtcacgtcatctatgcgggcgctccgatgtatcgcgaggaccagaaggtggcgctgaagaagcttggcaacgtgatcgtgcagtattttgggctgggcgaggtcaccggcaacatcaccgtgctgccggcggcgctgcacgatcccgaggacggcccgcacgccaagatcggaacctgcggcttcgagcgcaccggcatgcaggtctccatccaggacgacgagggccgggagctccaagcaaaccagagcggcgagatctgcgtcatcgggccagcggtcttcgcgggctactacgacaaccccgaggccaatgcgaaggcgtttcgcaacggctggttccgtaccggcgatctcggccacatggacgaggagggcttcgtctacattaccgggcgcgcttccgacatgtatatctcgggcggctctaacatctatccgcgcgagatcgaggagaagatcctgacgcatcccgcggtcggcgaggtcgccgtactcggcgtgcccgatgcgacctggggcgaggtcggagtcgccgtttgcgttgcgcgcgaaggcgcgaagccagtgagcgaagcggagatggcggcgttcctgtcgccgaaggtgccgcgctacaagatgccgaagcggtttttcttctgggaggcgctgccgaaatccggttacggcaaagtacccaagcgcatggtgcgtgatgaactcgaagcgcgcgggctgctcgatctcaatgaaaagcaggcgggctgagcgaagggaatgcggagcatcaagcagcccggcttgccgtcccccgaacgcgttcaatgggtggaggcgaggggacgcgcgttcacgttcacgcttcaagccggcctgccgctgctcgaggctgcgctgcgcggcttcgccgccgagggttttgcgggcggcgtgctgaactttcgccgcggcgcgctcggaccgttcgcctatgtcatgccggcgctgtcgaagaccggcgaaaacgcggcattctacagcgacacgttccggccaaagggcgtgacgcgcgtgcggctcggcagcatgacgctcggcatgcgcgacggcgcgccgttctttcattgccatgcgctgtggacggaggcggacggtaagacaagcggcggtcacatgatgccggatgagaccgtcgtcgccgaaccgttcgaggtcgaggctttcggcatcgatggcgcgatgttcacggccgaacccgatcccgaaaccaatttcaagctgttcgggccggtgtcggccgagagcaccggcgctccgacgacgagccgtgcgtttgccatgcggctgcgtccgaaccaggactttgccggctgcttggaagatttttgccgggcgcgcggaattgcacgcgccaggatccgcggcggtgtcggctcgaccatcggcgctcgcttcactcatggtggagtaattgagccgtttgcgaccgagcttgcggtcaaggccggcacgatagcgccgggcagcgccggcgcgcttgaggccatcctcgatgccgccctgatcgactataccggcggcatcgccgagggctgcctgatccgcggggacaatccggtgctgatgacgatggaactggtcttggaggtggtggattaggtcacagcctgggcttgccgttctccgcggaaaccacttcctcaggatcgttgttcctgatatgttcctgtgaccggacgaggcaaagggagggctggagatgcgagggcgacagcgggacatcaggctgccggctccctatcttcggcgcgtctggctcgaccgcacgctggtccccgactgggaaacgtatccgtactgccttccgatcttccgccaagaattcgatctgagcttcgacaccgcgatcaccatcatcgtcggcgagaacggcaccggcaaatcgaccatcctggagggcattgcagcgctcgccggttatgacgacgccggcgggggcaaaggctatcgcgcggtcgatcattccagtgcgcgcgagatcatgggcggggagttgtcggccgcgcttcgcgccgggtgggtgccgaagatcaccaacggctggttcttccgcgccgagactttcttctccgttgcgcgatatctcgacgaagtctccgacatgccgcccgattttctgtcctactcccacggcgaaggctttctgcgcttcttccaggagcgatgtcagaagcagggcatcttcatcttcgacgagccggaatcggcgctgtcgcccgcgcgccagatggagttcttgaagctgctgcaccgcatggacacctccaggaattgtcaggtcatcatggcgacacattccccgatgctgatggcctatcccaacgcgcggcttctgcagttgacaaagcatggacttgaacccgtgacggtggaggagacggatcactaccgcctgatgcgggagttctgcgcagatccccgtgggttcgtagaagcgacgctggccgagtgatggcgcagtcggcggccgctctctccgtcgtcattgcgagcggagcgaagcaatccgggttctttccgcggcgacgacggctagggcctcgccacaaccgtgccacgaacaagtctccccagagtccaaaaatgcgctacgatgatctcagcgcgccccaagtcgcgcagatcgaaggatgaggaaacgacatgaggatgagaagcggagcggcgatcgccggggtggcggcgctggtggttgcggggatgactctgacggctgcctttgaaccggttcgggcccacgggccgacacggcagaaggtacgggaagccatcgagatcaatgctccgcaggagaaggtctgggccgcgatccgcaattttcaggacatgagctggcttccacccgtcaccaagaccacgggcgaaaagggcaacgagatcggcgcgacacggacgctgacccttgcgggcggcgcgacggtcgaggaggagctctataaatacgagcccgacatgttgagctattcgtatcggatcaccaaggtggacgtgaaggtgttgcccgtcaccaattattcctcgacgttgacggtgtcgcctgcatccgatggcaaggcgaaggtggaatgggccggcgcgttctaccgcggctatcccaacaacgatccgccgccggagctgaacgacgaggctgccaaggctgcagtgagcgggctgtacaaggccgggctcgaggccctcaagaagaagatcgagagcggtagctgatcgtgcgcgcgctggctctggcggcgctagccgccggccttggcggccttgcgctcggcactgcagtcgccgaagaggcgttcgtcaccaaccagctgagcgatgatctgatggtggtggatctcgcgacgtcgcgcagcgttgcgacgatcccgatcggcggcaagccggcgggcgtggccgtcagcacagacgggcgttttgcctatgtgacgagtcccgacgccaaggcggtgacggtggtggacgcggccgcgcggcaagtcacggggcggatcgaggtcggcggcggaccgctcggcattgccgtcgcacccgatggccgtaccgcctatgtcgccgactggtatgccgctgcggtgcgggtgatcgatacggcctcgcgcagcgtcacggccagcatcgcagtcggcgcctcgccatcgggcctcgcggtgacgccggatggcgagctgctgctctcggccgaccgtgacgacgacagtgtctcggtggtggacaccgcgacgcgccagcgcaaggccataatcaaggtcggtacgcgcccgttcggcatcatcatcgacgccgatggcaggcgcgcctataccgccaatgtcggctccgacgatgtctcggtcatcgatatagcggaggcccgcgaaatcggccgtgtaccggcagggatgcgcccctatgcggtggcgctgacgcagggccgcggcttcgtcaccgaccaatatggcggcaccgtcaccgtgttcgacttggcgagcttgaagccgatcaagcgcatcagtgtcggcgattatcccgaaggcatcgcggcaaccgcggacggcaagcgcatcatcgttgcctgctgggagagcaacacgctcagcatcatcgatgcggccgaactgaaagtcgtgggtgagatcaagaccggcgacggcccgcgcgcgttcggggtgtttttgcgcaggaccgagtagttcgtcaaaacccgcggcgactttcccaaaggggcccaaatcggccgatgcagggcctcaagctggatagggctggggttgatggagcgatgaaggagcggccgcgcgcaagcgtggggcgttttcgaacggtgcggctgccgggtctcaacccagaaccattccgccaaagctcaattgacgttctgcgcctctgacacggcgtcctctggcgcaccccgatcggtccagtccggcggcaagccgatccgttctccgacgaggccggccaatcccggcgctcggccgaatgtctcgcagatcgcttccttgggcgcgccaccgagcgaggcgctcaatctgtcggcggacggaggcgctgggaccttcccgaacggactctccgcggtcaccaaaaacctcccgaaatcgcttccgaaagcgtcggcaagatcataggcgtcgccatcgctcgatacacgcggagagctggtgaaggaattcgccccgcgcgcccagatcatggccgcctgttggttgccgctgcgatcgcgggcctcggcctcgacggacaggctcccaagtccaattggaagccgcggcaccggaatgggcacgccgggagcaacgatggacggcacaacgctcgcgaccttggagacgcccgctgccgtcgcatcggtcggcgcaatgtgtgtgatgatcgcgcgaacattcaagtccgcagcctccgtggtggccacgatccggaagcgctcgctcagcgcaagacacatcgatctgttgaccgcattcttgatcagcgtgcgctgctgctgcgagaacggccggctcgccgcggctgccgtgaaggcggtcggctcgatgcgagccgtcttcgctgcgagaacatcggccttgctgatccggagctgcgacttcgtcagcagaccatcggacggcgtaagattgtcgtatgaggcgagcgacccggcgcgttcgagcggggcggccgcgcaaccggccgccatcaagttcaagactgctaccgcgggccatctcatggcgaggaaacgagatcggtcgctccctgggccatgcgccgggaatgcgcggcgggcaggggagaaggtgcggcccccggcgccgacgccagcaacggctgccaagtgacattccagcgcgccagcgttgccccgttgccttcgaaaaccaggtcgagaaaggccagactgagctcggcggtcgcgagcttgactttggggttgagagccggaccacccgtgaaggcgcgatcggtgaagacgctgtgcgaaccaccttcgaacacggcgagcagctttcgcggtgtggcgatggcgttgaagaccttcaaccggtcggcagcgggcgagtagtatccgggaatctgaatgacgtcgttcgtcgccgtcacatgaagggttggaacggtgatcctgctcagcaccgaggcaagatcggactcgccatagaatggaggggccgagatgacgatggcggctccaaagcgcgggtcccgggcctccacccatctcccttcgcgcatcacgcgggcgccaacggcaacaagagcggtgttcgctccatatgaatgccccgccgctacgacgcgccggcgatcgacgtgggcgccatagggactcgacagcatgcgatccagggcgaagcgcaggtccaaggctcgcgccagcgcctcgctctcatgggcggctcgctgcaagcggtccacgacggcgaggggattgcccgcccagagcgacgaatcgctgcccgcatgctggacatgcaagctggcaatgccgcgggccgaccaatatcgccccagatagctgtagccgcggcgagagccaccgaggccgtgggagaacacgatgagcggcacacgcgatcccggcgcggcatccgtcggccagtgcaggcgcgccggaacgggccgcgaacgcgcgggatcggcccagtcgaaatcgatgaaagcgggcggagcggactgcgcttgcgctggatgtgcggtgagcgccgctgtaaccgcggctgcgagcagcatggtgccgaggcgccgtcgcgtcatattttcaggagcgattgcttcgccggcgctgcgcgcagatcgaacatgccgagagggagtgtcgccgcccgaccggttcaccatgaatgcaccttgctcaaagtctcaccgagtgtaagtttaaattgcacttagtgtaattttgcaaactggtcgatttcatggcagaaacgggcgatgaaaaattcgccccgaaaggaggaaggcctgcgcgaacggaagcggcgcgaaacgcagcatcgtatcgccgagcaaggcctgaaattgttcctgaccaagggctacgacgccaccacgctggacgcgatcgcggaggcggcggggatctcgcggcggacgttcttctactacttcaagtccaaggaagagatcctcctggcctggcaggacggcgggttcagcgagacgctgcgtgccgccgtgctggagcaaacgaccaggcagtcgcctctcgatgccgtgaagagcgccttgctggacctgacggcccgctttcaggtcgactacaagcagaccaaggtgatcgaacgcgtgatgtctgcgaacgaggcgcttcgcatccggcagcaggcgaaatacgtcgagaaggaagaagccgtattcgaggcgctgcgccagatgtgggcgcagccccatcgccaggctgcgctgcgcgtggtcgctatgatgtcggttggagcgctgcgcctggcgatcgacaattggaatcgcgaccagggcaagcgacctctggccacccacgtgaaggaggcttttgcgtgcctggacaaggaaatcggaggaggggcgtcgcgcaaggctgccggtcgatccggcgagtgagctagtgccgggccgggtggcgggatcccaccttggtccatgcggggcctcgtgctcgaaccgcaagccgccttacgccgacagatgctctccaggattgattctccatcgagagatgcacggcaggaagcggaaacatttgcaatggacaataaatgggtcgaactcgcggtggcgtggctgccgttcgtgcttctgatcgggttctggttctggttctcgcgacgaaacggcatgcaggcgcgcggatcgtccggtgcgaccttgatcgagctttacgagcagcaggtggccgagacccggcggatgaacggcttgctggagcggatcgcggtctcgatggagaagcacgatccgccccgcggcagctaagcctgcatgggatttctggcaccgatcagggccggcgcgatgtcactgatctgctcgaacacatggtcgggccgaagcgcttgcagcgccgcgggtgccgcataaccccagcacactgcaccgcaagcgatcccgacggcccgcgcggcgtcgatgtcacgaacctcgtcgccgatcgaaatcacccgggcaggcgcgacgccggcgcggcggatgaccctgcggaatttcgcgggcttgccgaacaacgaagccgcgcagtcgaaatgtgaaaacagcgccgcggcgtctccgagcttctcgcgcgcgttggcttcgctgtcggaggtcacgagcgccatctgcacgccgttgtcggcgagcatccgcagcatcgcctcgacgcccgcaaacagcgaaatctcgccagctgcctccgccttcagccgccgcgcatgccgcgcaatcgccggcagcttccacaagggcaccttgagccgggaaaggatttcgcggctcgaggcatgccgcagctcctcgatgtcctcttgcgcgacgcggcgaaaattgaagtgatcggcgacgtcgttgatggtgcgcaggaaccacgggaagctatcggcgagggtgccgtcgaggtcgaagatggcgagggagtagggcgggttggccttgttcattccatcctatgcgcgccgatggctcgccctatttcgctacctactccgccgcctcgctcgccgcacgccttcgcttcggcttccgcgctttctccagcaccggcgccaggaacttccccgtatagctgcgcggcgccttcgcgatgtcctcgggcgggccccacgccacgatctcgccgccgccgtcgccgccttcggggccgaggtcgatgacccagtcggcggtcttgatgacttcgagattgtgctcgatgacgacgacggtgttgccttgcgccaccaactcgtgcagcacctccaggagcttcttgacgtcgtggaagtgcaggccggtggtgggctcgtccaggatgtagagcgtgcggccggtggcgcgcttggacagctccttggcgagcttgacgcgctgggcttcgccgcccgagagcgtcgtcgcctgctggccgacatggatgtagtcgaggccgacgcggtgcagcgtgttgaaggtctcgcgcacgcgcggcactgccttgaagaactcggcggcttcctcgaccgtcatgtcgagcacgtcggcgatgctcttgcccttgaacagcacttccagcgtctcgcggttgtagcgcttgcccttgcagacgtcgcaggtgacgtagacgtcgggcaggaagtgcatctcgatcttgatgacgccgtcgccctggcacgcctcgcagcggccgcccttgacgttgaaggagaagcgacccggctcgtagccgcgcgctttcgcctccggcaggccggcgaaccattcgcggatcggcgtgaacgcgccggtataggtcgccggattcgagcgcggggtgcggccgatcggcgactggtcgatgtcgatgatcttgtcgatgtgctcgaggccttcgatgcgatcgtgcggcgcggcgccttcgctggcgttgttgagcttgcgggcgatggcgcgatagagcgtgtcgatcagcagcgtcgacttgccgccgccggagacgccggtgacgcaggtgaacaggccgagcgggatctcggcggtgacgttcttgaggttattgccacgcgcgttcaccaccttgatggtgcggcgatggttcggcgggcgccgctccggcacctcgacctcgagttcgccggtgagatacttgccagtcagcgatttcgggttgcgcatgatctcggcgggcgtgccttcggcgacgatgttgccgccatgcatgccggcgccggggccgatgtcgagcacgtagtcggcgaggcggatggcgtcctcgtcatgctcgaccacgaccacggtgttgccgaggtcgcgcagccgcttcagcgtatcgagcaggcgcgcgttgtcgcgctgatgcaggccgatcgaaggctcgtccaggacgtagagcacgcccgtcagacccgagccgatctgcgaggccaggcggatgcgctggctctcgccgcccgacagcgtgccggaggagcgggacagcgtgagatagttgaggccgacgtcgagcaggaaggtgaggcgctcgcggatctctttcagaatgcggccggcgatctcgttctgctgcttgttcagcgtatcaggcacgccttcgaaccactcgccggccttcttgaccgacagctccgagatttcgccgatatgcttgcccccgatcttgacgcaaagtgcctccggcttgagccggaagcccttgcagccttcgcagggtacgtcgtggaaatatttcgccagctcctcgcgggcccactcgctctcggtctcgcgatagcggcggttgatgttggtgatgacaccctcgaacggcttcttggtgtcgtaggagcgaacgccgtcttcgtaggagaactttatctcgtcctcgccggagccgtagagaagtgcgtctctcgtcttcttcggcagatccttccacttggtgtcgagcgtgaacttgtaatgcttgccgagcgcggtcagcgtctgcacgtaatagggtgatgacgatttggcccagggcgcgatcgcgcccttgcgcagcgtcagatccttctcgggaatgacgaggtcctcgtcgacatgctgctcgacaccgaggccgccacaggccggacaggcgccatagggattgttgaacgagaacaggcgcggctcgatctcggggatggtgaagcccgagaccgggcaagcgaatttctccgagaacaggatgcgctcggggccgctcttgtcgtggatcttcgccgtcttctttttctcttccgcgggcgcggtcgcgggtgcatcggcgaactcgatgacggctaggccttcggcgagcttcagcgcggtctcaaagctttccgcgaggcgctgaccgatatctgcgcgcacgacgatgcggtccaccacgacgtcgatgtcgtgcgggaatttcttgtcgagcgccggcgcctcgctaagctcatggaaggtgccgtcgatcttgacgcgctgaaaccccttcttgagccattcggcgagttccttgcggtactcgcccttgcggccgcgcacgaccggagcgagcagatagaggcgggtgccttccggcagcgccagtacgcggtcgaccatctgcgagacagtctggctctcgatcggcaggcccgtggccggcgaatagggtatgccgacgcgcgcccagagcaggcgcatgtaatcgtagatctcggtgacggtaccgacggtggagcgtgggttcttcgaggtggtcttctgttcgatcgagatcgccggcgacaggccgtcgatctggtcgacgtccggcttctgcatcatctccaggaactggcgggcataggccgacagcgattcgacgtaacggcgctggccctcggcgtagatggtgtcgaaggcgagggaggatttaccggagcccgacaggcccgtgaacaccacgagcttgtcgcggggaatctctacgtcgatattcttgaggttgtgctcgcgcgcgccgcggatcgtaattgcgcgcaggctggagcccgcgttctgttgttggcgcttcgccttgatcacttcgtccatcccgctggtcctcaaggaagcccaaagacgcgcaatcgcgccaagggaaaggcgcgcttcgcccggaaccggatcggcgccgatgggtatgtcagcgaacgtaggaagaacgacagaggatttccagtgcgacttgcgaatcgtcaacggattgttggcgcgctggcggcatctggcagcagggactttcggagctctaacgggcaaaacaaaaaaggccggcgcaaggccggcctttcgtgacgatgtgacgtcggtcgtgatcagtacttcgcgacgaccgggccgccgaagtgatagttcacgccgacctgcacggtgtgaaggttgagcgtgccgctgggaacggtacccgagaagtaggtctcgccgccgaggctgcgatagaggtactcgcccttgaccgaccactgcggagcaaagaacgcctcgacacccgcgccaacggtccagccggagtgaaacttgctgtcggaaatcgaggcagcgcccagggtggcggtgaccttgttgtcgatccaggcgtaaccgccggtgccgtacagcagcacgttgttgacggcccagccgatgcgaccgcgcacggtgcccatcgcgtcggtcctcgaggacaccgaagcggggacgccgccgacgccggcgacgaaaacggtgccagccgccgaggcgctgacgtctgcccaggcgccatcggcctcgaggccgaacacgacgttgccggcctgccagttgtagccagcggtgccgccgacgaagccgccctgcatcttcgggtcgcccgaagaggcttcccaggcgccgccgccgacgataccgagatagaagcccgtccagttgtagacggcagcggccggaaccatcggagccttggtataggggcgagccgcgagatcagcagccgaagcaggagctgccagggcgaacaagcaggccgaagccaacaaaacctttttcattttcaacttaatcccagtaccagtttctgttgttgccttccgtgaccggaagggagcggactcaacggcccaactggcgctgcatttacaccatcaaagctgcaagttgtgtctccgaaaagccacaacgtcacaaaaggtgatggttactgacccattaccccgagcgagctgcatccaaacgacaaaggccggcgcgaggccggccttcgatcgtcacgcgcgattcgcgctatcagtacctcggagcgggcgcgccccagttgaagtgatagttcacgccagccttgaccgtgtgaacggtgtcggtccactcggagcggttcgcggcaacagccggagcggtgtactgcagcgtgcttgtgccgaaatcgatgtagttgtactcgaccttggcggaccagttcggggcgaacatgtattccgcgccggcgccgacggtccagccccaacgccagtcattccgcacgacactgccgacgagaggaacatcatagcgatgctgcaggtcgccaacggcggcaccgccactgacaaagaacagagcgggaccggtcgaatagccgagacggcccttgatatcgccgaagctgcggatcttcgtgaagtaggtgtcgcctaggccggcattgatttccgccgaacggccgctgatatcagaccagtgatagtcgccctcgatgccgaaaacgaccgggcccgactgccaattatagccgaacacgccaccgacgaaaccgccgctgatgtcgtagttctgagttcctgcgaagcccgggccgttcggaaggaggaagaacgtctcgtcgctgtcgccccagccgccaccgccctgaataccagcatagaaaccggtccaggtgtagatcggcgcgggcgcagccaccggcgctttcgtgtacggacgagcggcgagatccgccgcgtttgccggagcagagaggcccagcgcagcggccccaaatgcaattactaaggtctttctcatttcctaaagccctccaaagttgtccgcttcttgcgagatccccgaagcggttaagcgcgatgcccataacgtccaagtccgagtcaaccgtagcgcgatttggtgatcgagtccgtctccgaaatgcaacagtccctcacgatcgtgagccagctaagtagatgatgttcattaagtttcgtgctttcacgggaaccgcaaaaagttccatcgggttccccgcccgcctcaaatttttcggcagagttccattccaggttgttccatcgattttctggaacaaatctagaacaggcgaggaattggtgctatatgtggggataacctgcggtgcgacgggccgatccggggccgcgagcgtatagggtcgcctcaacgaggcgcagaggaacgcgggcagcgggactcgccctattgaaattcagtggcattcggagtggagagcggcgatggcgggaagcgtcaacaaggtcattctggttggaaatctcggcaaggatcctgaaatccgccggacccaggacgggcggccgatcgcaaatctgagcatcgccacctcggagacgtggcgtgacaagaacaccggcgagcgcaaggagaagaccgagtggcatcgcgtcgtgatcttcaatgaagggctttgcaaggtcgccgagcagtatctgaagaagggcgcgaaggtctacatcgagggcgcgctgcagacccgcaagtggaccgaccagagtggcgtggagaagtattctaccgaagtcgtgctccagggcttcaactcgaccctgacaatgctcgacggccgcggcggaggagggggcggcagcttcggcgatgagcccggcggcgatttcggctcctccggtcccgtcagcagtgcgccgcgccggccggttgcagccggcggcggtcgcaacagcgacatggacgatgatatcccgttctgagaacgcggaccgcacagccaaggcgcaccgtctggtcggctgcttagcgtgtcgtggcagcaattcgtgttgatcggcggcgggctcgggttttccgggcccgcttcatgtttgaagcgagcttgagttgcgtccggcaagcaggctgacggttcgtcgcgccattgagcaggggaggcgattccgggcctctcgggagcggggttcgtaagggcctaagttgttggaaaaataggcggaaaaatcgcttgcagggacatgcgcgagggtggttatcacaggcccgatgcgctatatgattcccagataaacctcaccggatttccccttggctgacgacgacgacaagcccggcgaccagccggcgcaaccctcggatattcgccccgtctccatcttcgaggagatgaagaagtcctatctcgactacgccatgagcgtgatcgtggcgcgggcgctgcccgatgcgcgcgacggtctgaagccggtgcaccgccgcatcctgtactcgatgaacgagcaggggcacacacccgacaagaagtacgtcaagtccgcccgcgtggtcggcgacgtcatcggtaagtaccacccgcacggcgaccagtcgatctacgacgccatggtccgcatggcgcaggacttctcgatgcgggtgccgctgatcgacggccagggcaatttcggctcggtcgacggcgatccggcggccgcctatcgttacaccgaagcgcgcctgacgaaggcggcgctggctctgctggccgacatcgacaaggataccgtcgacttccagccgaactacgacaacaacgagaccgagccgtcggtcttgccggccaagttcccgaaccttctggtaaacggcgcgggcggcatcgcggtcggcatggcgaccaatatcccgccgcacaacctcggcgaggtcatcgacgcctgcgtcgctctgatcgacaaccctgcgctcaccattgacgaactcatcaacatcgtgccgggacctgacttcccgaccggcggcgtcattctcggccgcgcgggcatccgcgccgcctatcacctcggtcgcggctcggtcgtcatgcgcggcaaggtcgcgatcgagaccatccgcaaggagcgcgaggcgctcatcatcaccgagattccgtaccaggtgaacaaggcgacgatggtcgagcgcatcgccgagctggtgaaagaaaagaagatcgagggcatcggcgacctgcgcgatgaatccgaccgcgaaggctaccgcgtcgtcgtcgagttgaagcgcgacgccgtgccggatgtggtgctgaaccagctgtaccgattcacgccgctgcagacgagcttcggcgtcaacatggtggcgctcgacagcggccgtccgcggatcatgcatctgaaggacctgctgacgatcttcgtagacttccgagagcgagtcgtcacgcggcgcaccaagtacctgctcgccaaggcgcgcgatcgggcgcatatcctggtcggtctcgcgatcgcggtcgccaatatcgacgagatgatccgcgtcatccggagctcgcccgacccgaccgccgcccgcgacactctgatgtcgcgcgactggccggcccgagacgtcgaggacatgctgacgctgatcgacgatccgcgccaccgcatcagcgcggacggcacgatccggctgtcgatggagcaggcgagggccattctcgacctgcgcctgcagcgtctcaccgcgctcggccgtgatgaaatccgggaggagctcgacaagctcgccggagagatcgccgattatctcgacatccttcggtcgcgcgaacgcgtgctgggcatcatcaagaccgagctcgccgaggtgaaggcggagttcgccacgccgcgccgcaccgtgatcatggagcaggaaggcgaggtcgaggacgaggacctgatccagcgcgaggacatggtcgtcaccgtgtcgcacgccggctacgtcaagcgcgtgccgctgtcggcctaccgggcacagcgtcgcggcggcaagggccgctccggcatgcagacccgcgacgaggatttcgtgtcgcgcctgttcgtggcctccacgcacacgccggtgctgttcttctcctcacgtgggcaggtctacaaggaaaaggtctggcgcctgccgatggcggcaccgaacgcgcgcggcaaggcgctgatcaacatcctcccgctcgagcagggcgaacggatcaccaccatcatgcccttgcccgaggacgaatcgacctgggctcagctcgacgtgatgttcgccacgacaggcggcaacgtcaggcgcaacaagctgtccgatttcgtcgacgtccgccgctccggcatcatcgcgatgaagctcgacgacaacgaggcgatcgtcgacgtgcagatctgtaccgagcgcgacgacgtgctgctgacggcggccggcggccagtgcatccgcttccccgttaccgacgtgcgcgtgttcaccgggcgcacctcgatgggcgtgcgcggcgtcgcgctcggcgagggcgacaaggtgatttcgctggcgatcctccgtcatgtcgagaccacgtcggatgagcgctcggcgtacctgaagatgcgacgtgcggtggcgggcgaggctgcggtggaagaggctccggccgatgccgaggccgaggagacctcaggcagcttccagctgtcgcaggagcgttatgccgagatgtcggcgcaggagcaggtcgtgctgacggtttccgtcaacggctatggcaagcggacctcgtcctacgagtaccgcaccacgggccgcggcggcaaaggcatcgttgccatgagcgtcaacaatcgcaacggcaacctggttgcgtccttccccgtggaagaggccgatcagatcatgctggttacggacaaggggcaactgatccgctgcccggtcgaaggcatccgcatcgccggccgctcgacccaaggcgtcatcgtgtttgacaccgccgaggacgagcacgtggtgtcggttgagcacatcaccgaagaggcggagagcaacggcgcgaacggggagtagcgttcgcccgcagctcggattgcgctccgctcaagccgggctaagcaccgctcagcggatgcggcgtggtcagacccggctacggggtgcgatccgcggtgacgagacgggcttcgcggatgttggccttggtgccggcgcgacgcaggcacgaggcctcgaagttcggccatgcctgatgcgagcagtccctgccaatggcgcggacatcgagccggtcgcccttggccagcggctgcggcacgctggcttcgaccttcggggcaaagccgggcaggagggtgagagccgcggcgacacacgcagacagagcgatcgctgaaagagtcttgagcattgacggtcccctgtgatgcggccgctcacgcccggtgtgcggcccgtcattcgttagctggattagtaaccatggccagtttccggacgtcttcgccgatgcgggaaatggtttcgtttctgcgccgttttgtttcgtggctaccccgaggacgaaacaatccggccgatccgaccagggtttgccgactatccgacagggaacccggccggcttgccggggcggcccgggcgcggtaggacggatgccatgtcgcgcatcgccttttacccaggttccttcgaccccatcaccaacggccatctggacgtggtccgtcacagtgtgccgctgtgcgacaagctcgttgtcgcgatcggggtccaccccggcaagaagccgctgttctcgaccgaggagcggctgaagatgcttcatgacgtctgtgggccagtggcggcccaggccggctgcgtgctcgaagccgtcacatttgacgatctgtcggtcaccgcggcgcgcaagcatggcgcaaccatcatgatccgtggcctgcgcgatggcaccgacctggattacgagatgcagctcgccggcatgaacgaggcgatggcgcccgaggtgcacactgtcttcctgcccgcttctcccgcggttcgcccgatcaccgccactttggtgcgccagatcgctggtatgggcggagacgtctcggccttcgtcccgccgctggttgctgcacagctcaaggccaaattcgcctgatgtggcgctattcctgttgtctctgatccggagttatcatgatccgaattctcgcagtccttgccgcgcttgtattcgcggtgccggcggtggcgcagcaattgccggcaaatctcgacaaggccaatgccatcgtcatcgacagcaccaagggccgcatcgtcatcaagctcaggaccgacatcgcccctcagcacgccgaacgcatcaagcagctcgcgcgcgagggattctacaacaacgttccgtttcaccgcgtcatggacggcttcatggcgcagacgggtgatggtcagaacggcaacggcaccggcggctcgaaatacccgaacctgaagcaggaattctccaaggttcatttcgcccgcggcatcgtcggaatggcgcggcgcggggacagcgtcgacagcgccaattcgcagttcttcatcatgttcgccgacggcggcagcctcgatggccagtacacggtcatcggtgaggtcgtgcagggcatggacgtcgttgacaagctgaagaaggcacctcccggctcacccggcggcagcgtcaccgatccagacaagatggt

SEQ ID NO: 96 - DNA, 29986 bp, Bradyrhizobium colbertium
tcgaacccctgtttcagccttgagagggccgcgtcctaaccgctagacgaagggagcgtgaggggtaccgaatagcctcgaaatttgtctgccgcaaggaccccgatgggccttttacggctcattggcaaatttcagctttccggccggcttcagcgtgtgggcgtcgaacgtgcggatctcggtgacgccaccgaggtccagcgtgaccacgagccggtcgccggcgacaccggtcgaaacgatcctggcgcccttcggcagggtggcggtgacgtcgccgccggcctccaccgcccttccctccgacttgaaaaggcggtagcccaccgcgatcagcacggcgcagaacgccagcgccgtggtcagccccgcgatcagcatcatccgcctcacccgcgcgaatagcgcggcctgttcgggggtcggctcgggaacatcggtatcagacgtcgtcatggaaactcttggccctaaggatcttggctctgcgcaaaggttggaggtcgtggtcgtcggcgatgagggctcggcccggctcgaccgcgtgctggcggcgcgcctcaccgagctgtcgcgatcgaggctgaaagccctgatcctggcgggcgccgtccacctgaaggcctccgcggtccgcgaccccgcttatcacgtcagtccgggcgatacgatcataatcgacgtgccgcaggcggcacccgccgagcccaggggcgaggatatcgccctcgacatcgtattcgaggacgatgacatcgtcgtcctcaacaagcccaaggggctggtggtgcatcccgcggccggccacgagaccggcacgctggtgaatgctttgatcgcccattgcggcgcctcgctgtctggcatcggcggggtgcgccggcccggcatcgtgcaccggctcgacaaggacacgacggggctgatggtggtggccaagaacgacctcgcccatgcctcgctgtcggcgcagtttgccgaccacggccgtaccggcgagatgcggcgcggctacatggcctttgcctggggggtgccgaaccggcatcgcggcacggtggacgcgccgatcgaccgccatccgcatgcgcgcgagaagatggcggtgcgccagggcggccgcgaggcggtcacgcattgggagatcctggagagctttgccgggcgggacggcaagccggtggcgagcctcctcgcctgcgagctcgagaccgggcgcacccaccagatccgagtccatctcgcccatatcgggcacccgctgatgggggatgccgtctacggcccgcatttcaagaccaaggccaaccagcttggccccgaatcgcaggcggctttggccgcgctgggacggcaggccttgcacgcctatctcctggtattggagcaccccaggaccggagaacttctgcactgggaggcgccgctgccggaggatttgcttctccttcagcgtgccctccaagcggcgcaatgacgcaggacggttcagaaagactttacattacaaaaagttatagcggccacacggcctcgtgacgtcagcaatccttcccttttcgacccccgatagggtatattgcgcttgcgttgaatgaccaacgcggaacatcgcagcccgaccggctttgacacagcggtcgtctgcctggcccgccgctatcgggggcctgaaccttttggagggcgcactatggcccgtaccgctgctttgccggtcctcaatggagaatccggcctttctcgctacctcgccgagatccgcaagtttccgatgctggaaccccagcaggaatacatgctcgccaagcgttggcgcgagcatgacgatcgtgacgcggcgcaccaactcgtcaccagccacctccgtctcgtggccaagatcgccatgggctatcgcggctacggcttgccgatctccgaggtcgtctcggaaggcaatgtcggcctgatgcaggcggtgaagcgcttcgagcccgacaagggcttccgtctcgcgacatacgccatgtggtggatcaaggcgtcgattcaagagtacatcctgcgttcctggtcgctcgtgaagatgggtaccaccgcgaaccagaagaagctgttcttcaacctgcgcaaggcgaagagcaagatcaacgcgctggatgagggcgatctccgccccgaccaggtgaagatgatcgcaaagcgcctcggcgtcaccgatcaggacgtgatcgacatgaaccgccgcctcggtggtgacgcgtcgctaaacgctccgatccgcgacgacggcgaggccggcgaatggcaggactggctggtcgacaacacgcccaaccaggaagccatgatggcggagcacgaggagtatgatcaccgccgtgatgcgctgaatggcgccatgggcgtgctcaacccgcgcgaacgccgcatcttcgaggcgcgccgcctcgccgacgagccgatgacgctggaggaccttgccgccgagttcggcgtgtcgcgcgagcgcgtccgccagatcgaggtccgcgccttcgagaaggtgcagtccgcggtcaagggcacgatcgcaaggcaggaacaggccgcgctggaagccgcgcactgagcgaggtgtttcggcaccagagattggcggatcgaaggagagaagaagccggcggcagcgccggcttttttgtttgtctgatgcgcttctacggctggaccgcacgggcggtgtgacccgctcccgtcatttcggggagcgcctcttggtgcgaacccggaatccatcaggccgcagctggtgcaggaatggatcctgggtcacgacgtcgtcgcgcccggaatcgcggtgggcctattccccccacatccgcgccagcgttgcgagccagcagccttcgcaatagcgcgcgtccttgtagtcgacccagttgtgcgcatagacgcgctcgagcgggatgtcgtagcgcgcgcgcaggatcttcacgaggatcttccacgccgcgacctgtgcttcggtcgggcccgtcgccacgtcgggatagttgccggcgaactcgacaccgatcgaattgtcgcgcaccacctggcgataggtcggcttgttgtcgatgtatttgttatcgttgcggttggcgccgtcgccgtgggtcggcacgtggttttcggccaccgcccaatagaccgtgccgtcggtctcgacccagaccgtgacgccgcgccgcgtcggattcttcgcctgcgcttgcgcgcccccgcgcgccgagccggcaggtccctcggtctggtgcacgatgatattgcgccaggggtgtgcgttacggacgtcgccccatggcgccagccagacgatgttaaggccggggatgtcaggcgtgcccgaggcgcgcgcgagctttgcgagctcggcctccaccgcggcggcgggggcgacgagaagcgcagcgaaaacggccgcagccaggcgagacatcatgcgggtccaatatgacccgagcctagcaggcttcatgcgaatttgcgcagtgcctcgaccgcctcgggcgaaagcggcggcggggcgggatcatagacagcgaagtcgttcttaccgttcttcttggcggcatagagagcatggtcggcgttggccatcaggcggtccggggattccccgatgctgcaatcccactgcgcgacaccgatcgagatcgcgatcggaatgtcgctgccggtgcagccggcagcatcctgacggcacgcctcgagcacgcgccgggcgatcagcgcgccttcgcgcaaggaggacgacggcagcacgacgcagaactcgtcgccgccggtgcgggcgagcatatcgccgggccgcaggcgcgtctgcgccatcagggtgaagtgcttgagacacgcgtcgcccgcagcgtggccgtgggtgtcattgatggccttgaagccgtcgagatcgattaccaggagcgagaacgggacgccgctgcgctcggagcgggcgcattcctcggtcaggcgctgcagcagatgccgccggttggcgacgccggtgagatcgtcgagcagcgcgaggtcggcaacctcgttgcgcagccgctcgatcgccatcaggagacaggcgaaattccaggccatcgccaggaacaccagcagcaggatcatcaccgactgcaaaccgttgaagttgatcgcggtgacggcgccgccatagccgagcagcgccgcgccggagcggacgaggtgaatggacagaagcagcatcccgacgatcgcagcgagacgagcgcccggattttcccggccattctgcctgctgagaagcagcggcagagtcagcacgaccggggtcgattgccccagcgagtaggtcaacacccgcatcggcatgttgtcgacggcaatcaggaagaaggcgagactggcgctgcagagaagcgaattggcgatcgcggccggccacgacaccgggcgctgatagaaccgcgccacacccatgcaggcgagccaggacgagaagatcatcagaccgccgccgacgatcagcggaaagcgcgggtccatcacctcgcgcagcatcgagattcccgcacccgatgccgccagcaccgccgccgccgtccagtaccgcgccgcctcgaatttgggataggcgcgcgccacataggcccagattaggcccagcgccaggaagttgatgacaatgacggtccagagtgtcggcacgctcagcatggcgactgcgggacacgcatggtcccgccctcttcgttcggcaactgcccgtacatacccgcccccatgttcttgtggacgatcatgcgcgcggcgcgcttaatggagtctcaccgcaatcgtgcaaagccgagccttggttttggattgatgaatccggcgacccggccgacatcgttaagcaaggcttgccgcggacgagctggttgcgaggagaaagcgttgcgaagcggattcgcgcggcaaaatcatccgaaaatgcatcagagctgtggataagacgatgacgaagacatgacagcgcggggcagccggctgcgaatctgctgagtttgtcatcgaggatgttgcgaggctggccctccgccgagcatccctcgtgtcgcgttccaccattaacccctaagaggatactatggctaagaaagcgaagaaggcggcgaagaagaaggcgaaaaaggccaagaaggcgaagaagaagtaacgaagcttctgtttctttgcccgggtggggtgtcgctccgcccgggcgtcgggtgggatcgaacgggtttgaaatggcgggcagcaggcccgtttttttattgcctcgcttgttggcgccgatgctgctccctcgccgcctttctgacgaggactagtgctccgcaagggcgagcttggcgccgagcgcggcaaatcctgcggcgaagctgcgccgtagccacgccatgacgcggggacgggagataacgtgctcgcgcaccgaggcggcgcagagtccgtagaggacgaacaccgcaaaggtcatgaccatgaaggcgccgctcaattccagcatgcgcgccagcacatgggcctcgtccgcggcgatgaactgcggcaggaaggcgaggaagaagatcgacagcttcggattgagtatgttgatcaggactccggtgacgatgacgcggccactcgatcgctcgcgaatctcaccgccaaccgccagagctcccgtctcgcgcagcgcctgccaggacatgtagagcagatatgcgacgccgcaccatttcagcacggcgaaggcgagcgcgctggtgtggagcaccgcggcaaggccgagtatcgccgccgccatgtgcggcacgatgccgagcgtgcagccgaaggcggcggcgacgctcgcccgtgagccgcgagtcagtgcggcggccagcgtatagagcacgccggtgccgggtgaagcgacgacgatgagcgaagtgagcaggaaggacaaggtcatgcgcgaccttatcacctcatccggccgcgagaaagcgtgccccctcaaggctgcggtcaggacagctgagcgatctcggcttctcgcaagacgtcgagcggcgcccagggcttggcccagaacttggcgccatcgggcaagggctgcttcagcgggcggccggaggtgacgacgacgtcgagcttcggattgcggtgcttggcgacatgcgcgagctcgacgccgttcatgcggccggcaagctggacgtcggtcagcatcagacagagtgccccggcgctcttgtcgaggacgcgctcggcggcctcggcgctttcgcactggatcacctggtagccgctctcttcaaggaggacgcaaagcatctcccgctgcatgacgtcgtcttcaacgatcagcgctgtcgcgcgaaatggctctgcttgtcccatcggcggctcccaatgcatgcctccataacgcatgttaaaaatcgagagcggctgcggttcggtttcatttcaaaaaaaagtaactcatagttccattatcaggcacttgacgggggaaaccatgacgacgattcgcggcgccgccgcaatcacgggagccgcgagcgggatcggccgggcactcgccatcgagctggcgcagcgcggctgcgatctggcgctcgctgaccgcgacgaggcgggattaaaggcgctggcggcggagatcggaacgacgcgcaaggtcagcgtgcatcgggtagacgtcagcgagcccgccgacatcgcacaattcgcgagcgaggcgaccacggcgcatcccgccctcggcatcgtcgtcaacaatgctggcgtggcgctgatgggctcgttcgaggagatcgaccaggctcagatggactggctgttcgacatcaatttctggggcgtggtgcacggcacgcgcgccttcctgcctcacctgaagacacaggcggaggggcacatcgtcaatctctcctcgatcttcggcatgatcgcgccaccgggacaatcggcctatgcggcggcgaagttcgcggtgcgcggcttttccgagagcgtgcggcacgagctagcgatggcgggaagcccgatcaagctgtcggtggtccaccccggcggcgtcgccacagcaattgcgcgcaatgcacgcaccggcatcggtgtcaccgacaatgcccgccgggcgcagtcgatcgagcggttcgagaatgcggcgaagacctcgccgaaggatgccgcgctgcgcatcatcaggggcatcgaaagaaacgagccgcgcatcctgatcggcaacgacgctcgcttcatggacctgctgcagcgcttccgcccgggaacgtactgggccccgctgcagcggcggctggagaagatggctaaggggacgtagggccgttgcgcttcaccctccaggggagggtgaagtcactgccccatcagccggtcggcgaaatagccgatcgtcttgcgatagaccacagccctgttccactcgcgcatcgcctcgaaattcggcgtgccctcgccgtagggctgacccatcttgaagccgctggtgtggagcaggttcgcggtcgaggcgagcacgtcggggatgctgtggcggaggtcgacatggccgtcgccgtcaaaatcgacgccatacttgatgtaggacgacggcaggaactgagtctggccgatctcaccggcataggccccgatgaggtcgcgcagctgcaggtcgccacgctgcacgatcttgagcgcggcgagcagttcgccctggaacaggtcggtgcggcggcaatcatgcgcgagcgtcgccagcgtgcggatcacgggcagcttgccggtgtcgcccttgccgaagtcgctctccaggccccagatggcgacgaggatgtaacggggtacgccgaacttctgctcgatgcgggagagcagcgcggcgtgacgctgcagcatcgcacggcccccattgatacggccggcaccgacgcgggtcgagacatactgctcgaaagtcttgttgaaggtgtagcgctggcgccggtcgaaggcgagcaccgcaggatcaaccgtcacgccactgagcgccgcgctcgtcacgcctgccgagacgccggctgcctgcgcttcctgcgccatgctggcaatgaagctgttgaagtcgccgccgcagcgggcggcctgcgccggcccgccggccagaacaacgaaggcggccgcgagaagcagtctcgacatgtggagcaatccccagaatccttgcgcgaagcagcgcggatcatgcccgggaacgaaccgagcgtcaaagcgcaaggcttgaagcgcagggaaagcctgggaaagcgcaaggcttgatccgcatcaaactgtcttacgccgtgctttctagactgaggccaacaggagaaccacacatgaccggaattaccttcactgccgagcagattcgcaatgccccagccccggtgcggcaatggatcgagcaagaggtgatcgccgcgctcggccttgcgtcgcgcccgccggcggccaccccgccgcagacggcgcatctggtcgcctgcagcgtggaagacatggccggcgtgctcgagcacatccgcggcgtgcttccggcggtgaacgtactgttcgagctcggccggcccggcatcaacatcggccgtcccgcagtgatgacgttccgcctgttggacatcctgcatcacacgcgcctcgcggacgtcggccaggtcatcacctgcctcgagatgatcaaccaggcgctgaccgaggtgaagaaggatgcatcggtgcggttctgcggcttcgacaacgaaggccactgcctgatcgcaccgcaaacgcaggagagcatcgcaacgctctggcagaccatgatggagcgccagcaggcggcccaggcgagcgaggcaggcaaccgggtggcaccagcggcgtgagaccagcggtttcggcaggccttccgctcgtcattcccgggagcgcaacgcgcgagcccgcaatcgatcgggccgcgaagacgatggatgagtgaattccgggctcgcgacttcatcgcgccccgggtcgacggatgagagagttggcgccaaggtaatatttgcttgcgccgtgcgatcggccattgcactgaccagcatagaacgatcacccatgtccaaccatcaacctccccaagcgccgcggcccgccctcctccgcattccgctgtttcgcctgctcgccatcaacctcgcgatcggcgcctgcgccgccgcgctgctggtcggcgggctgctctggctcaaccccggacatctgcgcgagctgatcttcgccgacagtgcaccgggcgttgcgctcatcctgctgctcgcctccttcctcatcacgttcggctcggccgcgatgggcagtgcgatcatggctcagggacgcaacgagaacggcgacaaaggcggcggacatggatcgcggctcgccgttcaggaagtggcgcagcgtccgcacacgcattgatattggcgcgcgggatcttcgaaatcgcctgcgcaggcacaccgtcccgcccgcagatgggaaggcgtgcaggccggtgcgctttcctacaagacgcgtcgtcctgcctgcattgcgcgcgcgggcagatgaacaaagtggttcgacagtccagaacaatcgtttgggcctgcagttgcacttccatcgcattgacgcagatctgatgcgctggctgcgacatcggcgccaccacgatttgccttgccatcgcacaggtcagcctatagccttctattttaggttgttgccctgccagccccgggcgacgctgaagaccaagataacggcgggcttcggcccgccgtttatcgaggcgagggccctctcgaaccgcgcacggcggatcgcaacaagcctccgccctttctcagcgccagatttcatccctgagccgaatcaagcccagcagcgttctgtcacggcaaaaggtcgatcgtcgccaaagtcaattgactgccgcacgactatcgaccacaagccgcccatggccaagaaacccggaaccaatcccaaaggcgaattcgccttcttcaacgtcgtctatgaggacgattcccagcgctccaaccgccgcgtccccgccgagttgctcggcggcctcgacggcgacgaacccgcccgcggcttcatcatggagcaggaccgcgagatcgccgaaaagagcggccgtccgccgctggagatcaagcggctcgagcgggtggggacgaagaagaagtagatcctcggcttctccacggccttgcgagcgcagcgaagcaagctgaggtctctccgcggaaaaaatctggatgggtttgcaacgctcgcaatgacactgacaaaaacggcgggccaaggcccgccgctttgctttggatcgctgtctacgatcaattatccaagaagctccgcagcttccgcgaccgcgacggatgcttcagcttccgcagcgccttggcttcgatctggcggatgcgctcgcgcgtcacgctgaactgctggccgacttcttccagcgtgtggtcggtgttcatgccgatgccgaagcgcatgcgcaggacgcgttcctcgcgcggcgtgagcgaggcgagcacgcgcgtggtggtctcgcgcaggttggactggatcgcggcgtcgatcggcaggatcgcgttcttgtcctcgatgaaatcgccgagatgtgaatcctcctcgtcaccgacgggggtctccagcgagagcggttccttggcgatcttgagaaccttgcggaccttctccagaggcatgccgagcttctcggcgagctcttcgggggtcggctcgcggccgatctcgttgagcatctggcggctcgtgcgcacgatcttgttgatcgtctcgatcatgtgcacggggatgcggatggtgcgggcctggtccgcgatgctgcgggtgatcgcctgccggatccaccacgtggcgtaggtcgagaacttgtagccgcggcggtactcgaacttgtcgaccgccttcatcaggccgatgttgccttcctggatcaggtcgaggaactgcaggccgcgattggtgtacttcttggcgatcgagatcaccaggcggaggttggcttccaccatctccttcttggcctggcgtgcctcgcgctcgcccttctgcacggagtgcacgatcttgcggaactcgacgatctcgaggccggtcagcgccgcgagctgatgcacctcgtggcggagctccttgatgcggtccttctcgtgatggacgaaattcttccagcccttggccgacagcttcgagacgcggttgagccagcgcggatcgagctccgagccggtgtagttgcgcaggaagtcttcgcgcgcgacgccgtggctgtcggcaaggcgcatcaggcggccctcgtgcgagacgaggcgcttgttgatgtcgtagagctgctcgacgagactgtcgatacgggcctggttgaggcgcagcgacttcacctcgacgatgatctcatccttgagcttgcggtacttgcgctcctgcggcggcgacagcgagggcccatgcgaggagctgtcgagctggttctggatgtcctgctcctgaagcttgcgcagcttcttgtagctgtcggcgatcctgtcgaagatctcgaccaccttcggcttgagctcggcctcgatcgcggccagcgacatctggttctcgaactcgtcgtcgtccatgtcggattcggccgcagcctcgccgggatccttctcctcgactgcatccgcgccgccggcgggcgccgcgcggaacggggtcggcgacggcggcgcagccgggggggcgacatgcgcaggcgccccggcggtcggggccgcgtcgccatcggcagaggcttcgccgttcggacccgcgatcatcgcggtgttcatgccgcccttggcgtcgggaccggcataggtcgcttcgagatcgatgatgtcgcggaggaagatcttgccttcgttgagctcgtcgcgccagatgatgatggcctggaaggtcagcgggctctcgcagagcccagcgatcatcgcctcgcggccggcctcgatgcgcttggcgatcgcgatttcgccttcgcgggacagcagctcgaccgtgcccatctcgcgcagatacatgcgcaccgggtcgtcggtgcgctcgcccggctcgctcttcttgacctcggtgacggccttctgggtgacctcgacgagctcgttgtcggtgtcgtcgtcgccctcgtccttctcctcctcgccttcgctgtcgtcggcttcggtgacgttgatgcccatgtccgagagcatcgacatgatgtcctcgatctgttcgggcgaggtctggtcggacggcaagacttcgttgagctgatcgaaggtcacgaagccgcgcttcttggcctgcttgatcatcttcttcacggcggcgtcggacaggtcgagcaagggcgagggcgcgtcctgggagtccttctccggcgcatccgctgccttgtcgtctttttccttgtccttcgcctgcagcgtctttgccttggtggccatccattgctcctaaacgcgcttcatgcgagacgcccgccgcgtccgcgtgaattcacatgaacctgttgctcgacgctctcgcttcggcagctctcgacacggaaagggcggcgcacaaacctctcgccacccccaactctctctcgccggaattgcctaacgcttcgtcagcctctttgacgcggcggatgcaggtgtagtgccaacagcgattgcgcggattcattcctgacgcgtctgttctgcctgcggccgcctccgggccaaagtgctacaagaccgttaagcctcgattaaccctgtttttgccgccaaacccaagatttggcgagtcttttagcggttccggccgcggccgtccgcatgattctttcacatgctcttctggagccggcccgacagctcgccaaaaccctcgatcagggcctcggtgccgtcgacttcgctgatccgagccttcacgtcacgcagccatgccaaattggcctcgctggggtcctcgcccaaggccagctcggcgtctttcagctctctaagtagtgaatgccattgccgatgcaaggcaaccagctgatgccaggtggcgagaacgtcgtcccgcgctgcgccctcgcgggccccccataccgccgcggtggtgatcccattctcaaccctttgaagaacctgcgaaaatccgcccttctcgatatcgctgcgcatcttttcagcctgctcgccggggtcggacgagtggtgatggtcgttggcgaaggcggcgatgatgccggccctgagcttgtgggcctccgggtgggccagctccagggcggcgacctcctcgagatgctcgtgcagcagccaggggtggttgatcaggcattgcaggatcagggcttcccggcgggagatggcgctgcgctggccgcgcatgatcgggcttgccgctagctggggacttgccgcctggtaggggccagagggcagagggatggaaccggagacgccgcgacgccctccgccgaatccctgaccgccgaatcgattcgcccctcccctcggctggaaggaccggccgccaccctggcgaaaattgccccgcccgccgaagccgctgcgccccccttcgggggcaaaggtgcgctggagccgctcgacgaactcgtcgcggtagtagcgccgcaccacctcgtcgcgaatgccgttggtgagctccctgatccgcgcctccagcgcggcccgccgctcgggggttgcgaaattgccgccttcgagctcgcgcgaccagatcatgtcggcgagcggacgcgccgcggcgatcacctcttcgatcgcgccgcgcccacccgagcgaacgaggtcgtcggggtcctgcccctccggcagcagcgcaaagcgcaggctcttgccaggtgcgaggaaaggcagcgcgagatcggcagcgcggtacgccgccttctgtccggcgcggtcgccgtcgaagcagaggatcggctcatcagccatcttccacagcagcgccagctggctttcggtgagcgcggtgccgagcggcgccacgctgcctgcaaagcccgcggtgaccatcgcgatgacgtcgacatagccttcgaccacgatcaaggggctgccatcatgcgtggctttgcgcgcagtctggtggttgtagagattgtcgcccttgtggaagagcggcgtctccggcgagttcagatacttggccggaacgtccttctccagcgcgcgcccgccgaaggcgatgacgcggccgcgcagatccgtgatcggaaacatcacacgatcgcgaaagcggtcgtacggcaccgggatgtcgttgccagcgacgagcaatcccgtctcgaccatgtcgtcgacggagatgccgagcttgccgagatgctccttcagtgcaaagcgatcagacggggcgtagccgaggcggaactgcaattgcgtcgccggcgagatggcgcggtcggcgagatagccgcgcgctttggcgcccacgcgcgaggccagcgtctccgcaaagaacttggccgcgagatccaagacgtcatgcagcgacttgcgccgctgctcgtaccgcgccgcatccggtgtcaccgccggcagcggcaggcccgccatgcctgcgagccgctccacggcctccgcgaacggcacgccgtcggtctccatcacgaaggttatgatgtcgccgtgcttgccggaggagaagtcgtgataaaagcccttctggtcgttgacgtagaaggacggcgtcttctcctgctggaacggcgacagccccctccactctctgcctgccttcttcaacttgacgcgcttgcccacgacttcggacaccgaaagccgggcacgaagctcgtcgaggaactggggcgtgaagcgcatgggctgtgtctagcgcgaaaccgggtgagtcgggcgaaggatcagggatataggtgcggcccggccaaaggctaggtttaggcgggttatccgggttattcgacctatgcacagggctctcttcggcgcccgaggcaatcattctcaccgtccccctgaggcggcgcttcttcgacggcaccgaaggatggcgggattggcaccctggaatgacgggaaaggcttgaaccgcgcccggttccaagcttccatatccctcatgttcaggacctttcgaggcggccagagtgggggctggcgcgtgacctcgatttcatcagtgacgggcgagcccctgcccttcatgccggcgctgtcggtgaccgacagcgaggccgtttcattgccgctggtgccctcgcgcaacgcctggaggctggtcggcgtccccagcagcttgcgctacaccgagcgcgcggagaagcagcagctcgtggcggtgcaggccgggctcggccgaccggaggcgaccagcgcggcgctgatcccgatccgcaaatcggccgcctggtgggaactgacgcaggaagagcgtcgcaggatcttcgaggacaagtcgcaccatatcgcgagcagcatgcgcttcctgcctgcgatcgcgcggcagctctatcactgccgcgacctcggcggccctttcgactttctgacctggttcgaattcgccccggcgcacgcctcgctattcgaggagctggtggcaatgctgcggcggacggaagagtggacttacgtcgagcgcgaggtcgacgtgcgcgcggtgaaggaagtgctgtcggcctaatgctccaagaaccgcccggactcgatgatcggcagagcggtgacgggccagttgtagacgtaggtccaggccctctcggtagcgccgtcggcacgcgtcacgtcgaccagctgccgcagatattcggtcggctccggaaagccctcgccgcaggcttcatacatgtcgagctcgcgtagcagctcgtccggcacgcgcaggcggaagagctcgccgtgaacgacgtccgacggcgcatcagagagcagcaatcccggataatgcttgaccagaacgagccggccgcggcaggtcgcttctcccagaaagtccgcgtgtcccgccagcagccgcgccatcggatggtcgaagccgcgcatcagcgtgccatagacaaaaaggcgatcggaagtcatggactctctggcgttgctgcgtcggcacgatgccgctaattcgtttacacacgttgttagtccataggcaatcaggatggctttggaggcggccgaggcagccgatcaactgctcggcgagggcgacattccgcccgtgcatgaggtgaatgcggaggggacatcgcccttcctgctcacatcggatcattacggacgggtgctgccgcgcgcgctcggcgatctcggcgtcgcggaaagcgagctcgtcaggcacatcgcctgggacatcggcatcgccggcgtcgccgagcggctcgccagaatgttggatgcgcatttaatcgcgcagcgctattcgcgcctcgtgatcgactgcaaccgtccgcccggcgttgcaagctcgattcccgtgatctccgaggcgaccgcgatcccgcgcaacgaagggatctcggagcaggagcgcgaggcaaggcggcgcgagattttcgagccttaccatcgccgcatcggtgcggcgatcagccgccgcatccacgacaagcggccgaccgtgctgatatcgctgcacagcttcacgccggtttatgccggcatcgcgcggccctggcatatcggcacgctctatcaccgcgaccccgtgctgccacgactgctgttgaaacatctgcgcgccgagggtgacatcgtcgtcggcgacaacgagccttatgcggtgagcgatctcaccgactacaccatccccgtgcacggcgaagcccgcggtctggtcaacaccggcatcgagatccgccaggatctaatcacggaccagtccgcccagcagcaatggtccgagcggctggcgcgtatccttgcggagatcgaggcggagctaccgctgtaacctcacttcgcccgcgtcagcgccaaccagatgccgccgccgatcatgaagccgccggagatgcgcgacagcattcgcgtgcggcgcgccgagaagaactttcgcgcgcggccggcggcgagggcgtagagcgcatccgtcactacagcggtgaccatgaaggtcgcacccagtagcgcgacttgcggaaagtgcggctggttcatgtccatgaattgcgggatgaaggcgccgaagaacaccagaaccttcgggttcgacagcaggaccaggaaaccttgcaggaagaagccgccacgcgggggcggaggcggcgcgtcgacatcgacgccttcgaccggtgcccagatcagcttgatgccgagccagatcagataggccgcgccggcaaagcgcacccagtcgaaccagtagcccatggtcgccatcaacgaggtcaggccgatcgcgacgatgccgatgacgatggcaagcccggcttgcgcgccggcaacattgatgagcgcagcccgcgtgccgtggcgcaggccgttggcgatgacgagggtgacgatcggccccggcagcagcgccagcgcaatgcaggcggcgacgaaggcgaaataggcttgcatggacatcataggaggactcgctgcggttcgggcgcattaatgcatggcggagacgggaacggaagccggtgccggatgcgttgctccaaagaagcggccgcttgacacgcaaccttttagttgcctattgtcgatgcatggatgaggtctttaaagcgctcgccgacgcgtcgcgacggtcgctgctcgacaggcttcacgccaggaacggccaaacgctgaacgagctctgcgaagggctcgacatgacgcgtcaggccgtgaccaagcaccttgtgattctcgaggaggccaatctggtcaccaccatcaggcatggccgcgagaagctgcattacctcaacccggtgcccatccatcagatcggcgaacgctggatcaggaaattcgagcgcggcaagctctccgcactcagcgagctgaaacggcagctggagaaacgcgatgagtaggcccgctcaaccaaggatcgatgcacgatgaatctcgaccagttcaagcctctcaccgtctacacgatctacatcgcctcgacgccggagaaggtatgggaggcgctgacctcggccgagttcagccgcgaatatttttccggcttcgcggtggagatggagccgaagctcggcggcaccttcatcgtgcgcgaacccgacggttcggagcacatctccggcgaggtgttcgaatacgatccgcccaggaagctgacggtgacgtggaacgtgaactggcccggcctcgtcgaaaaactcggcatcaccgtcgtcacctatgagatcgagcccgccggcgaagccgtccgcctcactctgagccagcgccacgaccgcccgctcagcgaagacatcctttccggcggccgcaccggctggccggcgatcctgtcggggctgaagagcctgctggagaccggcaaggcgccgaagatcgagatgtccccgccggtgaggttgctggaagcgctaaaggcgatggggatcaagatgccgtaggatgccgtgtcatccgggggcgcacgtcgcgcaagccatgatgcgcaattgcgcatctgagcatcgcggcagagttggcggaccgatggattccgggtcgccctccgggcgttccggaatgacgatcaggcgggcagcggcgccaccagccgccgatacagatgccaggtcgcatgcccgagcaccggcaacgtcacgatcagcccgaggaagtaaggcaacgccgagacgatcagcagcatcacgatcacggcggcccacgagatcatcggcaccgggctcgtgacaacggcgcgcacgctggtcaccatggccgtgacgaaatcgacgtcgcggtcgagcagcagcgggaacgacaccacggtcagcgagaaaaggatcagcgacagcacggcgcccacggcattaccgatgccgagaaacagcaggccctcgttggtcgtcagcaccaccgtcatgaattcctgaaggctcgagaacgaggcattgaggccgagcagcagcgcgatcaggagccgcacctggtacatccagaccacgaatacgaacagtgtgacgaaggccatccagccgatctcgctgcgcgaacggatggccgaccagatcgcagcgaatgagaccggctcgccgcgctcgcggcggcggctgacttcgtagaggccgatcgccacaaacggtccgatcaacgcaaagcccgcagccagaggatagaccagatagaccattccaaaggcggtgaggcagagcaggatggcgatgccgccggcggcatagaggccgccgaaacaaacaccataaatcggcaacgcctggaaatcgcgcagcccttcgaccagcgcctccgcgatgtcggtcgccgccaggggacggaccaccggatcgaccttgcccgagatggacatcaatttcctccgcagatcgcgcgatctttcgccgcgcgcatgccgtaatattagcgcggccgcgcggaggcgcaacttgatgccggcgggttcaagagagcggcgacataggaatgatcgcgaggcgaaatctttagtcttcggtgcgatattggcgccgacgactatggacgtgcagacgatcgtgcctcaaatcataccttcgagcatcctcgcccgagagcggatcgcccaccgatgagcctgcgtacccggttactgatcctcgtcatcgccgccatgctcgtgccggcgatcctggtcgggctccgttttgtgcagaaccgggccagtgagatcgacgcggcgctggccaatctggtcgcatccgccgacgatatcgcgagcgatctggacgagaagatccagggcacggcccaacttcactacgggctcgcccgtgcccgcgacctcgacacgcgcgacaaggcggcgtgctcggcgtttctgtccgacgtccgcgaagaatatccgcagttcacgggcatcctgaccatcgatcccgacggcaagctgttctgtgactcgctgcggaccgaccgcacgctcgacctgaacgaccgcggctatttcaagcaggtgaagaatcttcaagggggtgtcgcagtggagccggtgttcggtcggctcaccggattgtcggtgctgcagatcgcctatcccgtccgatcggaggcgggcgcgctgaagttcgtgctgctcgcgtcattcaacctgaacaagttcgcagaatttcacgacaagcggctgctcgccgaacaggacatccttctgatcgacgccaagggtacggtgctggtcgcccccaagggcggcagctggagcgagcccgtcggcggatccatcgcgggctctgacctattccgctttgcggcagcggccgatcgcgagccgtttcacgaggcgagcgaccgcgaaggccgtacgcagatctggtccgttgcccgctcaccttcgatccgcaaggccggtctctacatcctggtcggacgatccaaggacgggctggtcgcggcggcaaaccgccgactctacgaggacgtggcgattctcgcagtagcctcgctgctgctcctggccggcttgtggattctcaccaccctaagcatcggccgccaggtcgggcggctcgcggccatggcgaggagcctcgggcgcggcgatctcagcgcgcgcatcccggagccccacccgggcggggagctcggcggattgatgacgctgcttaatagcacggccgaatcgctcgagcagcagcgcaccgccatcgcggatctcagccacaagctcagccagtcccagaagatggaggccatgggccagctcacgggcggcgtggcgcacgatttcaacaatctcctgaccgtcattctcggcaacgcggagcaccttgccgacaggctggcgggaaacaaggaattgcaagggatcgccggtgacatcgcaaccgccgccgagcgcggagccgacctgaccaagagcctgctcgccttcgcgcgaaagcagcctctgaggccgcgagatatcgacatcgccgaggaagttctcggcatggagcagcttctgcgtcggaccctgggcgagcatatcgagtgccgcttcgcgttcgaccaagatctgtggccggtcagcgtcgatcccggccagctgacgacggccctgctcaacctcgtgctcaacgcgcgcgacgcaatgccggaaggcggcaagctgaccgtcgagcttcgcaacagctcgctcggcgaatccgatctcgacgtcaacggtgaaccgcggcccggcgactacgtcatggtagctgtcaccgataccggcagcggcatgaactccgaagtggcgagccgcgcgttcgagccgttcttcacaaccaaggaagtcggcaaagggaccggtctcggcctgagcatggtctacggatttgcacaacaatccggcggacttgtgcaaatgcagtccgaaccgggacaaggcagcgtcgtcaggctcttcttcccgcgtgtcgccgcagcacagaacgagaatccgacgccgaccgagccgttcaacacgtcagacggacgcgaaacgattcttctcgtcgaggacgacgagatggtgcgtgcctatgttgaaagcgagctcaagacgctgggctatcgcgtcatcgcgacgtcgaacgggtccgcagcgctggctgtgctgcgccagccagacgagatccatctgctgttcaccgacgtcgtgatgcccggcggcatgttcggaccggagctggcgaggcaggcaaccggcctgcggcctggtctcaaggttctcttcacctccggctacagccaagatcccgttaggacacccgacggaatcggcgacgccctcatcttgaacaagccgttccggcgcaaggatcttgctgcaatgctgcgggccgctctttcggagccgtctcggtagatcaggacccgattgcgagctggagcgccacggcgagattggccgcgaacagagcagcgtcgacaacgaagatccggagcatcgggcctttcagcaccggccagtacgccacgccgacgcggccgccgcgcatcagcacggggacgttgtacgcgaactggctgaaatggcaggcggcgaagaacaggaacagcgcgagttgagcttcgaccggctggaagaaggacggtcgggcgaccagtaggtagagcgagaggagtccgatcggcagattcattccgccgaggaacgcgacgcttgccgcaagggtgggcgcgatcggattgctgcgttcttcgcgcggcagcaggatcttcagcgtgttggtttgcgcgatgctgaactggatgaaggcccccacgaaccagagcgtgttgagaagcagaacgatatcgatcaggcgcatggttattttccgtagaaggcttcgctacgcaccacgcggcccgcatcgtcgaagtccatgaattcgctggcgcgcgtatcgcccagttgccaccacaccgtcagccgcgcgatcgcctcatcccagctccagctcagtatcttcaggtcggcactctcaacgtggccataggctttccgccagtaggcgcggatgctctcggcgccgatgacggacggacaccccgtcagggtgagagcaagagggctgcgcatctgcgcattctcggcgaaatgcgcgacgaccgcatcgatatcgaccctgcaccaactcgcgcaccatgccgcaacgaagcgttccgcggccgcgcgattcattgcctgtccgctcatgacacggctcctccctggctcgtcgccgggaaagtggcgcatcccgcatctcatgtcaaccatgttgactttagaatcgtcagttgttgtcggcgatcgcctccatcacgcccatccagccggccgcaccggacgctccgacgcgatcgaacgcctcgcgcatcacgttgcgctcgtgatccgacgcgcgctgctcgacgcgccgtcccgcctccgtcaggcgcagcagtttcgagcggtgctgctcaggtgaacgcttcgaggtcaggagcttgcgctccaggagcagattgagcggccggttgaccgcctgcttggaaatgccgaggatctcgatcagcgcgccgatcgcgatgtccggccggcgcgccaccacgtagaggatgcggtgatgcggacgcgacaggccctgcttcgcaagatatgcgtcggcctccagcgtcatcccgcgccagccgtaatacatcagctccagcgccgcatcgagttcgttcagctttgcaagtgaggcgcggtgaagccccgtggcgtgagaggtcttggccatcgtcggaagctagcccctcgcccgcaattcgcgccgcagcaccttgccggtcgccgtcatcggcagcgtctccgtgaactcgacgaagcgggggtattcgtgggctgcaagctgcaccttgacgaactcctggatctcgcgcgagagcgcatcgctgccggcaaagcccgggcgcagaacgatccaggccttgatcgactccgtgcggatcggatcgggaatgccgaccacggccgccatcgccaccgacggatgcttcatcagcgtgtgctcgatctcggacgggccgacgcgatagccggcggtggtgatgacgtcatcctcgcggctgacgtaccagaagtatccgtcctcgtcctgcacaccgagatcgccggtgaggaggaagtcgccggcatatttcttcgccgtcgcctctggattgcgccaatattcaagcatggtgacgggacatggctggcggacgccgatgatgccgcgctgcccccgtggcaattcctcgcccttctcgttgacgatgcggacgtcgaagcccggcgtggccttgcccatcgagccggggcggatcggaaacaggttcgagttgctgccgatcactagattgcactcggtctggccgaacacctcgtgcgcatcgatgccgaaggtctcgcgcacccagccgagcaactcgccgccgagggactcgccgccagtgaagatgctgcgcagcttgacgccggtatgcttcacgccggcctgccgcatcagcttcagcgcggtcggcggcaggaagacattgcgtacgccgagatcggccatcatctgcatcgccgcttgcggctcgaactttcgcgcgcggtggccgaccagcgggatgccgtggtaccagaacgccagcaggccgttgacgaggccgccgatccaggcccagtccgccggcgtccacatgagatcgccgggcttgggtaagaagttgtggcacatctcaacgttcgggagatgaccgagcacgacccgatgcgcatgcagcgcacccttcggattgcccgtggtgcccgaggtgtagatgatcagcgcgggatcgtcgcacgaggtatcgacccgcgggaagtcgggcgaggcggtgttcaacgcgtcccagaaagatttcgtgccgggcggcgcgcggccgccgaccacatagacattcttcaggtcaggcaggcggtcgcggatccttgcgagcttctgccagccgccttcatcggtgacgatggccttggcctgcgaattcgacaggcggaattccagcgcgtcctcgccaaacagcgcaaacagcgggatcgagatcatgccggagcggaacgccgccatatgcgcgatcggcaattccagcgactgcgacaagaagacggcgacgcggtcgccacggtgcagcccatctgccttcagcacgttggcgaagcgacgcgacatctccgccatctcgtcgaaagaggtgcgcgtggtggcgccgttctcgtcggcatagatcagcgcgagccgccccgtgccgtcggcatgacgatcacagcacgcttccgcgatgttgaagcgcgcggggacgtcccagcggaagttgcgatagagctcgtcgtaggttttggcttcgatcagcatagtcgttcccgggcagcgtcgtcccggccgggcttgtcccggccgtccatgttctttttggcggtcagtttaaggccgtgggggcccgggacaagcccgggcatgaggacggagagaatcccctctctctgtcattccaggttcgccctgcgggcgccccgaacgacagtggggtcaccgcacggtcgcgaagaacgtcctgacatcgcggatgaacagctccggctgttcgaatgccgcgaaatggccgcccttttccatctcgctccagtgggtgatgttagggaagttcggctccatccaccgccgcaccggcgtgacgatctccttggggaacacggcgacacccgtcggcaccttcaccaccggcgtcgcgcggcgcttgccaaagctctcccaatagagccgcgcggaggaggttgccgtcgcggtcgcccaatagagcatgacgttgtcgagcagctcgtccctcgtgaggatgttctcggggtgtccgttgcaatcggtccaggcccagtacttttccaggatccaggccgcctgtccgctcggtgaatccgtcaagccgtagccaagcgtctgcggacgcgtcgactgctgcttggagtagccggaatcgagatcggcatagtgcttgaggccggcgagcgcacgcttctcctccgccgtcggctcgccctcgaccttcggtgccacgctgaaggccagcgtgatgtggatgccggcgcaatgctcggcatcctgcgcgccgagcgaactcgtcaccgccgagccccagtcgccgccttgcgcgccgtaacgcgcgtagccgagccgggccatcagcttcgcccaggtcgcggcgatgcgatcgacgccccagccggtggtcttcggcttggccgagaagccgaagccgggcagcgagggacagatcacgtggaacgcattggcgggactgccgccatgcgcggcgggatcgaccagcggcgcgatcaccttctggaactcgacgatcgagcccggccagccatgggtgatgatcagcggcagcgcggacggctccttcgagcgcacatggatgaagtggatgtcgagcccgtcgatctcggtggtgaactgctcgaagcggttcatcttcgcttcgcgcgcgcgccagtcgtagtccttggcccagtagctacacatctcctggatccatcgcagcggcgcaccctggctccagtcgtcgaccagctccgcctccggccaacgcgtacgggcgaggcgtgatttcaggtccgccaggacgtcgtcgctgatggcgatacgaaacggcttgatggcggtcatcggttgcctcccagttcttcttgtcattccggggcgcgcggagcgcgagcccggaatccatatcgcaacggagttcggtggccgatggattctgatgcgcaattgcgcatcacagctcgaggactcgcgtcgtcccggaatgacagctcaactggacagcgcggccttcaccaagccggacgccttgccgaaatccatctggccggcgtatttcgcgcgcagcgcggcgatcacctttcccatgtccttcatgccgctcgcgcccgtctcggcgatcgcatccgtgattgccttcttcacgtcgtcgtccgacatctgttgcggcagatatgtcgagatcaccgcgatctcctcgcgctcttgcgcggccagctcggcacggccgcccttgtcgtagagctcgaccgcctcctggcgctgcttgatcattttctgcagcacggcgaggatctcggcgtccgacagcggaggcttgccgctgccccgggcgtcgatatcggcgttcttgatggtcgagttgaccatgcgaagcgtggacagcttgcgctcgtccttggccttcatggcctccttgaccgcattgttgatgtcgtcgcgcagcatgtcgtgatcccttcgagatagacgcctgatctaggccgttcgcgcccctgagacaacctcgctccctagccattcgatgagcgcccgcacggtcgcttccggctgctcggcttgcggcaggtgcccgcagcgatcgaggatcacgagtctcgcgccggcgatgccttccgccatctccttcgagagcgcattcgggatcgtgttgtcggcatcgcctgtcagtaccaacgtcgggcaggtaatcgtcgacagcgtcgggcgtgagtccacacgcgcgatgatcgcggtctgctgccgcagatagccctcgacgccgacatcgtcgtcctgcgcatgcacgagctcgagaatatcggcatcatcgcgccgcgatggatgcaccagctccggaaagctctcctcacggatggcgcggagctcgccccgcctcgcacgctccatcaggccacggcgacgggcgggcgcctccggcgtgtcgggccgcgcctgggtgttgatcagcgcgagcttcgtcacgcgctcgcccgcctgacgtatgatctcgaacgcgatataaccgcccatggaatggccggcgagggcaaagcgcggcggggcgtcagcgaggatccggccggcgatcgcggccatgctgtcgtcgcggatgtggttggcgaccgtcaccggtccgaaacgccagagtgcggggatcacgggagcatagatccgggccgaggaggccagccccggaaccagcacaatcggggtcgttcggtccattattgcctcgtaagccccaagatttgccggaaattagccggccgagcttaagcgcccaaggaggcctgtcaaatatgcaaaaacgcatgtgaatcggcgcttctccgctttgacggcggcgcctgcgaggactatgaagcgggctcatgacacaacatgacaacgataccgcttggccggaccacaaaccgaccgcgctcctcgtgcttgccgatggcacggtgctcgaaggcttcggtctcggcgccgaaggccacgccgtcggcgaggtctgctttaacaccgcgatgaccgggtacgaggagatcctgaccgatccctcctatgccggacagctcatcaccttcaccttcccgcatatcgggaacgtcggcaccaacgacgaggatatcgagacggtgaacatggccgcgacgcccggtgcgcgcggcgtgatcctgcgtacagcgattacagatccgtcgaactaccgcgctaccaagcatctcgacgcttggctgaaggcacgcggcatcatcggcctctccggcatcgacacccgcgcactgaccgcgctgatccgctccaagggcatgcccaacgccgtgattgcgcattccaggaccggcgagttcgatctgcatggcctcaaggaagaggcacgcgaatggccgggcctcgagggcatggacctcgtgccgatggtcacgagcggccagcgcttcacctgggacgagacgccctggctgtgggacaagggttttggccggcaggacaagccggagttcaacgtcgtcgcgatcgactacggcatcaagcgcaacatcctgcgcctgctcgccggcgtcggctgcaaggtgacggtggtgccggcgacgacctcgtccgaggacatcctggcgatgaagccggacggcgtgttcctgtccaacggtccgggcgatcccgccgccactggcaaatatgccgtgccggtgatccaggacgtgatcaagtcgggcacaccgacctttggcatctgcctcggccaccagatgctgggccttgccgtcggcgccaagaccaagaagatgcatcagggccatcacggcgccaatcatcccgtcaaggacgagaccaccggcaaggtcgagatcacctcgatgaaccatggttttgccgtcgacgagacgaccctgccgaagggcgcgacgcagacccacatctcgctgttcgacggctccaattgcggcatccagctcgacggcaagccggtgttctcggtgcagtaccatcccgaggcgtcgcccggcccgcgcgactcgcattatttgttccagcgctttgccgatttgatgcggcaaaagaagagcgcttgagatgacaagctgacccgacggatgaagccgccgggcccggcttcaatcacggacgcatgaacatgaagtccgtgtcgggatcgcagttctcggcgatgaagcgcagctccgcctggatgtcggcgaccgatctcgtctccagatatttcgagatcaccagattcagcaaggcacgacagacggcttcgtgcccgaggccggccgtctccgcctcgtcgacggccgccgaaaaatgtcgctgcgcaacgtcggatgcgtacatggcgctccccttctttcgcttcgatttgcgtgcccgccaatggccgcctgcgccttgatctccgtcaattcggcctgtggactgccgggaggaacaaggggacggccgtcgtcttgaccccaaacggttattacccggagccccaccatgtccgtggtccgcgacaaagccgagccgctcgccatcgtcttcgaggacgatggcctcgtgccgaacaacatccttccgttcctggtctaccagcgcgcggtcaagctcgatccagggcgcccggaggagaccatcgaagacctgttcgaagcaaacggctggggcgggacgtggcgcaacggcgtctacgactatctgcattatcacgcgaccgtgcatgaggcgctcggcgtcgcccgcggcagcgcccgcgtccgcttcggcggcgatcacggccaggagcttcacatcacggccggcgacgtcgcaatcctgccggccggcacaggccaccaatgcgtccaagcgagcgacgacttctgcgtgatcggcgcctatccgccgggcgccaagatggagatcacgcaggcgacggcggagaaccacgccagggcgctgaagacaatcccggaagttgccctgccgccggccgaccctgtgacgggcaaggacggggcattgatgcggctgtggcgatagccgcaagcgtgtgccttaggtgggttggccgaaggcgtaacccaccgtctctttcaccgcggataccaagcggcgggttacacggggcgattgcgcttcgcgcaatccatggctctgtctcttatacacatctgaagctgc

SEQ ID NO: 97 - DNA, 11565 bp, Bradyrhizobium colbertium
gtgggtgcctcatgccgcttacgattgagcctgcagtggcgcgcgcaagcagtccgggagcgcgtccaaagtgactaacagaggccgtcgcaaggcactgcacccgacagggtcctcgcacccgagacttaataattcccattatttgaatttttaaccgaggggtcaagctcgctttaatgagtcgaatttaatggcaaaaagttactcggatccccgggataaacagccgtaccgccacccagcattgcgagcgacgccgctgcctgtctgcttctccgaagggctgcgacggcgcccgaacaacggagcatctcgctggtcgcagccagtcttgcgatcacaacagagttcttccgcaccgcaaaatcgctcagctttcgacttgcctcgcgctcgatccgaagatttgcgctgccaatgatccgttggatcacaaaacggctgcagccacccaatcgcgcgccctcgcattcagaagcagagtacctccgttagtgagggtggcgaagctcttcttcaccttaacaaagcccttcggcctgccggtcacagccggtcagcacgaccacctgaatcgacctcagccagatcaccccggcggcgagacgctgcggatgaagcgcttcagcccctccgaagcgcccctcgtctccagtgagattgcagacgactctcaccatctctcatccgcactttcgacctccaacaaggcatagccggggtctggacggtcttcagaagctacgcgagttcgttgctcgccttcgccaatccatcggtcgtcttcacattcttgcaacgggtttaatcccaacgcttctgcaaagactaccgctctgacgtgtgaaattggtgtcgtgcgcatttgctcctgcttggagcgagcaatatgtcagcgggcatcccgagtttcgcgatttttcggcattgaccgagaactaaaccccgggtccgaaaaatcaacgctgaaactcctcaacttgctgcttcgcagcgtcaggcttggacaagttttcgatcgtttttgcatttcctcgatcctcgcgttcaccccttcaaggctctgagcacattgccaagctgggtgcggaaaccattgaccgggtccaaggtgcagttgcggatgcaggtgccgatggtccacttttctgcgcagacgaaggaattgtctcggccactgcccgtgcagagcaagtagccgcgctaaaaacagtctccgctctctgggagtgaacaaatccgtcagcataacccgccggcattatccagcgtcggccaaccggcccggaaagcctcgccaagccgcgccgtatcaccaccaaaagtaaggaaacacccggtatcgcagccgaggatcgccataatagccgggaccttcatagggtccgtagaaattaccgtccccatacacccaacgcgcgactggcttacgggtaggtggtcggtagcagcgtcccgcctcattgcagatcaccttgacctgcacgagcgccggtttggaatggggcgtagtggtctggactagaagcggcgccgcagccgccccccctgccagcatcatcgaaagaccggcgatcgctccagtaaatttcagcattgtcttgcccttcggatccacccgattctaagttcgacagagactaacagtcttaatggtctcttttccgcaggacaaggccgcctgagacccgcatgttgtcgtccgtcccctgaccaaaccactcggcgatcgatctgctacatcggcacatgtcgcttcgcgctccccgcgagagacaaggccgctgaatgccggtagcttcgaaccaagaagggggtctcacgaagaccttgctaaccaattccgtttcccatgtggcgactggaatttcggggcggattttctggccgttggtgcggtggtatgtagccaaggcccgcttcattgctgatctgaccttcaaaatgaccatccatctcatttcgtgtgttcggcgttgccgacgatcgttcggccctgccctgctcatagccttatcgtttgggcagttggcgcaaagccagggccaggagatcggccgcctgtacgcaaccagaccaccgcccggatacgccttcatcaggatcgccacagtatctgagggcaattcccctcggatacaggtcaactcggcagatctggccattaacgaggccacgggggcgagttcatatcgcgccgttcccggcaaccagcccctgcacctggcggcgaacggctctccgatctcaaaagatgtcgtgccggccccggaaacatttctgaccttggtggtctcgaaagccaaccccgcctggaccgtccaatcgattgacgaggggcagaattcggatgacggcctgaaggccaagctccgcttcttcaacctcgtgcccggctgcgcagccattctgaagattgcggacggccccacaatcttcgagcaaagtccatttgcctccgtccggtctcgggccatcaatcccgtatccgcacggcttgaaggatcctgcggcgagggcagcgccagcctgacgcttcctcaattgcgtgccggggatcactacagcgtgttccttcggaaggagtcccaacggcttcgtctcaccggcggcttggatgagaccgagcctcatcgggagcgctaggcagttcgcgatggtattcgtcagcgactcctttgtttttctcttcctgcctctgttcctaactgtctacgcagttgtttccgcgcgcctgcggaatgccacgatcctcctattcagcctcgtcttctatggttggtggcggttcgattttctccccctcctcattgcgatcgcgtcctggtcctgggctacggggctctggatcgtccgaagctcaggccgcgaacgtcagcttgccctgaccgcggccattgtggccccactcgcaagtctgatctggttcaaatacgccaaccttctcgttgaaaccgcatcggtcttaggtgcaccggtcgagcattggacagctattccattgcccatcggcctctcattcttcgtgttcggcgcgatctcatactcggtggatgtcttccgaaagaccgtcgccgccgagcccagtttcgtgaactacgccacctatcaggcaatgttcggccatctcgtcgcgggtcccgtggtgcgctatcagtccgtggccgagcggctgtcttcacgcaccttccacctttcggagttcaccgagggctggcgccgcttcatgctgggtttcgcgcagaaagttctccttggagatacactcgcgccactcgtcgatgccggctatgcgctgcccaaccccagcgtggccgacgtcgcgttgacggttaccgcctacacgctgcacctttacttcgactttgcagggtacagcagcatggccatcggtctcggactgatggtcggcttgaagtttccggagaatttcgacaatccctatctgagccgatcaattaccgaattctggcgccgctggcacatcagcctgtcgagttggctgcgcgactatttgtacataccgcttggcggcaaccgcgttggcaaggttcgctcctacttcaacctgctgatcaccatggcgctcggcggcctctggcacggcgccagctggacttttctggtctggggcatctggcatggtttggggctgatcgtagcacggctctggaacgtagccggcgcgcctccgatccccacattcatttcccatctgctcactttggccttcgtgatggtcggatggctcttgtttcgcgcccaggactggcaggctgcgcaaacaatgttgtccggtctgctgggctttcatggacttgccctgtcatcgccgatggctgctgctgcaaggccaacggagttgctgacagtctgcattgggctccttgcggtctacgctccgacgctgccgccctctcgtctgcgagcctatatcgcccgtccaccgttcgaattggcgctcctcttgtggctatgcgccttgtggacgatacagagccgcaccgttattccttttctgtatttccagttctagggacgtcatgctcagggttgtcctcgtactcgcagtgatcttctcggggctggtctccgtgctgatcagaggtcatggttctctgggcgaagtgctgaagacgacgacgttgaacgaccttgccgatggtcgcttcgcccagagaatcgacaaggcggttcttggtgcagtaccacgcagcactgacctggacggcctcgtttccggaatcgaatatcgattgctcggcgatgccggaccacaggtccgcgccggttgcggtgattggctcttcaccatggaggaattgcgcgcagagcgtcacgccggagccaacatggcgctccgggcagaactgctgcgggggctggcgcatgcagtcagacaatccggcacgcgtctcatcattgtcccggtgcccgacaaagccgcgcaggtcgaagacaggctctgcggaatcactgcagcgcaatcgcgattgcgagaccaattctggaacgagctcggccgcatggaaggggcggttgtcgtcgatctccgcgataactggccccgtccaggctattggaagacggacacacactgggatcaaaccggcgcccgctttgctgccgagcggatcgcacaagccgtcgcacacacgctcgaacccgcgccagagacggtgaagctgattgaagggaccacgcgacagcgcacgggtgacctcgccagattgtctgggttgaccgatgcgccacgtgtgctcgcgccacagcccgagcaggagcgagaattgaaggcggacatctcgcgatcaggcggattgctcgacgacacgcccgaaccttctatcattctcgctggatcgtccttttcgatgaattcggggttcttcgagtatttccagaactcgctcgctcgagaagtcgcgcaggtcagctggcctggcggagggttcgccggcgcgctgctagaacttctcgagacacgatctggcagcttggagaaagccaaggtcgtgatatgggagtggccaatgcgatcattgaccttccctccaagcgaagccgagaaaaacttcctacgccggatcaggtgatgcagtggcgcaaagtgtaacgcgattgatggtgattactgctgccgcgctcctggcgtccgcaccgctgacgtcggtcgcaactgcgcgcgatgccgtcatcgaaggcaaatccaactggctctttgccggctgggaaagcctcaccgtcgcgcgtcctgacgccgagcgaagctccatcgagctgatttcggaggtcgggcagctcttggctcagaaaaatgtcaagcttatcgtcgccattgtcccgctcaagcccaggtactatgaaagcctgcttcccgatggctcaaagctgtccgacatcgttcggcagcgttacgatcgggaactcaccggactgcgcactgccggcgttgcagcgcccgatcttcgagacgctctcaagaccgtcatcgccgacaagaaggaggtcttctaccgcactgattttcattggacgacgtttgccgccgaagcgtccgcggatctcgtcgccagcgcaatcaccgccgacggccccctccccggcaaagccggaagcggtgcgcagcttggcgaatggatgaacgatcgccaccttggcgaccttgccgccaatttcctgccgccggatcgaaaacgggcgatcggccccgaagcctacgttatccggggccccgccaaaccagccgtcggattgctcgatgaggatccggctccagtcgccgtcgtaggcaacagctttgtgcaaccgtatttcggctttccgcagcggctgtccagcaagatcgacaggccggtggcgctgaagtggaatcccggggatgtcggaccatgggccacactcctgcaattcttgcgctcagccgaattcaggacgtcgccaatcagatacctcgtttggcagttcaacgaagcgcaagtccagaacgggcccgacgccgtcggcgaatgggcttcgcagagtatttccagccgcgtcgagtggcgaatgaaggttagcgatgccttgaaaaatcggtaaaaggcttaattttctctgacgtcaggatttcctcctaaatctgctgcgaaacaccgcagcaattgcgcaacatgtcggacaaaaagcatgatctttgaaggtcttgttgcagtcggacatcaaattctggttccgcaggtttgccccgtccgctaatctgagatgcaagtgttactgcctgtgggggccatggttatcaggggcgcagagcgtctgagacgacgtaagctgcgggctgccctcggcggcctcgcgctttcgcttgtcttggcgtgctcggcacgcgcccaaaccgccgatctggaccgccctctcgacggcgaggcctactcctccgccgcacaagcatataaatcgtttgagcagggcaactaccaggctgccgcaaaccaggctgcagcctcggtttccttgcgacctgacatcctccgcctgcggttgctcttgatcgacgcattagtcgctgcaggcaaccttgcgtcggccgaacaggcaaccatggcggcgctcgcaactttttcctcgaaccaggagctggagtcccggcaatccagtattcgccagcggcttgcacagcaaccggccggcgagggctacaaggcacttgagcggggagacccaaaggccgctgttcgcgccgcccgcaaagccgtggagtatgggccggatgtgatgtcataccggctgcttctgcttgccgcccaactcgccgacgacaaccttgttggtgccgcagagaccgcctcggaggcgatcaaactcgattccggcaattacgttccgctcgtgtggcgggcatatatttcccagaagctcggcaaccggacgctcgccgtcgcagacttcaatgcggcactcgccgttcccgaccttaccgacgccgagaagaagcagatccgattgattgcatccgatgcggccctggcttccggcgacgcccgcgcggttcagatcctgcttcagccatatgccaagacagatccatcggtcgttacgcggattggcgatgccgatgctgctgccgaaggcaaggcgaccctgaagggcgacggcaggctcatgccgatgccggtgcaggattgccgcgacacgccatacggctcggtctgcagtctgcaggcgccgctcgttcagagcatcgccacgcccatcgacaagaaggccgaaggcatggaggcggcaggcaaggcctacgaggccgcccgtgccaagaactacagcgtggcgatcgagcaagccaagaaagcggtggcggataccccggagatcgccagcacccggctgctcctcatcaacctgcagctaaccgccggtcggccggccgaggccgaagccacagcgagccgcgcaatcgcggaaggcgtggttgatgccgagatctacgcacagcgcggattcgcgcgcagccgcatcggccatgacaagggcgcaatggcagattgggagacagcgcttgcgcgtgggcttccaggcgatcaaatccggaacgtccgtctcgcgctggtcgacacggcgctgaaggccaaggatccgcaacgggcgctgcggtcgcttccgcgcgtaggcctagactacgacttcacaattcgccgcgcatatgcctatcaagctttgagccgcaaggaagaggcgctgcgcgacttcaggtcggctgagcgtctatctgtcaccaatgttcagcgcgatggcgctatccaggcacaaatcaacaccctgctggagcttgatcgcaagcccgaggcacgagcgatcttcgacgcggcgattgctcggggccagctcaaatcgatccggggcgcagatgtcgcctatatcggcgttgccgtcggcaacgataaagtggcgctggagctgttcgatcgcgcgaaggcaaacggtgcgttgccgccccgggccaccatcgatgccggctacaccgcgatgcggcagttcctaaatccaaaggcaatcgcctatctcatggagggcatcgacgcgaaggccgacggtcgcatcaacatcgacgatcagaagttgttcgaaacacggcggacggttgccgatctgacgcgcgtatgggggatcaacagctcgatctcctacggcaaggtggggtcagctcccaatcctttcctgacgatcaactcgcccgcaagcacctacacgtcccaatttggatcggagctctactaccggccggaggcgttcggaaaccgtaacggcgccctgttcgaggttttcggccgcctcttcgagacactgtacgacgaggcgggcggacctacccggctacgtacgacgcaaggcatggccggcgcccggtggaagccgttctcggatcacaacctcgtattcgaggtggacaaactgttcaggcttggcaacgccgcccgcgacgatacgctgctgcgagcggcctattcgtacacggtcggaacggacttgcgggcaatagacacgcattggccgacctggtatatctatgcggaggttgatcgcttcttccagaagacacagctcatcggattgttcgaaggacgctttggtcacagcttccgcctggatccgatcagcaggaacctggtgttcttcccccacgcagttgttgccgccagctacgacgattcatttgctgttcgcgacgccttttctgccggcgtcggcagctcgatccgctattggtttggtgaaacgaaatatcttgcgcctccctcttactgggagctgacgctgcagtatcgcttcaggctcgccggcgacaggcgcgccgagggcatcttcgcgcaaacgtccatcaactactaactcgtcgtccgttaagaagccgattgcagcggggagcggtcgctgatggctgcgatgagagtggccaggaagaggcacaaaagagccctgagccaggcgaggatgcggcggaagttgtggccgacgtccgagaggataacgttggccacatcgccggcgcggcctttgaggtagcagcggccgagttgaccatcggtcttcaggtgcccgatgacgggttcgatggcggaggtcgtgatacagtaaagccggcgtctcgcaaaccgcctcgatgcgacaggacaggcgaacagtgcgcctgctctgattatccggccctcagagccagttcagcagcagcttcaaatcgagagcgggtagtgcccgccatacgtttcaagcccattcgccggctcataagctccgctgccttgcttgtcgtgtggcctgcagccaagagcgagcttgcgagcgacgccaattcgaccagcggcacatctaaatggtcacgaatctctttcggagcattccggaaaggcaccagctcctgcagttcggggctcggccatacaattgaccgcccctcttctgatgagcgcgcgaatgatgggtcagccacttctcgagtgatctggaccagctttcccgttgctcgtgcgagaccgtgagcacgcgcgacccggcgcgccaccagctcctcgaagatcgggccttccgagcttatcacgtggtccaccataagctggattgtgcggcggtattcgcgttcgtacagactatgcttgctcaaggtcaccccgagcgaagcgaagtttgtcggatgataagggagtcctacctccagattgccgtgctgcggctcaacctgagctggcaaaagtctgggaggtgcctggagggagctcgtagcgtccggcaaggcagcggccgccgctgttcggacgccccgaggtcgcggctcgctgtccaggtgtctgatgatcgcgaggcgcgccggcgtatcgtcaaaaattcttagaaccaatccgagttctctgagtgtcgggatcagcagctgcagcgcggcggcagctttgcctttctccagatcgaccacccattgccgcccgacgcccgcgcgcagggctaaatggtgttgcgaccaccccagcagagtgcggcggtcgcgaatgaaaagtccgagatctttgggctcgcgaatgtccataaatgctcgtcgtcgaatgacgacaccttagtcggtaaatgacgacatcatagataaaacaactcttttttcaataggagagtgtcgtcaaacgccgatagggcattttctgaacccgcagattggctctccggcaatccgcggtgcggcacatacgaagtggatgtgagctggatcaaacttgagacatagggtaatttacgtcgagtaacgagtagagcaattgagaaaagccagtgtctcttcggacggatgcgacccggcgaacggtcacccgcacgccagcgacagtgatcgcctatcgacagaggtacgtaggcctgtgtcggcttgccgacgtgcagatcaacgacctgctgggcgccgttaggtggtttgccggtgggcataatcgctgggtgaagtcgaccatcaggcagtatcgagctgcgctcctacaagtgatcgaagactcccaacctgaccttccgattgcggctgccgaagaactgtctgcgattctcaaacttggtcccaagccccgccaatccggacctccccggacttcggcgaagaagagaaagtcggttccgaaatccgagttcggtctgctgttacgtcacctgaggaacagaggccgccatcccgacgaccgcctcgcggcacgactgttgaaccataacgttcgactttttctccgcccaagcgagtggcgaacggcgattctccaaggcaacattctgattgtcagaaatggaaaggccacgaacgggagggcattgggcttccatcgacgactggatttgacggactacggtcctgaaggggtgaacgatctttccaagctcctagtggtcctgcagaaacaggcccacacagctgagggcttccgccggctgtggggaaggctagcctcgcgaattgcacgggcgtgcaaggagatcggcataaagcgattggcaccgtacacaacgcgccatatcggcatggcgaacgccaagtcctggatgtcacctgaagaggtggcggcaaccgccggacataaaaccacggcgacagcgagctcccattacgcgaagcgccgcaccgcatggcgcagcaagccgtccggtgttgcccgtcccctgcctgaggacgttgcgaaggtgatcggatcgcggaaggtaagccgcgaagctaacttggagttcatgaagaatcgcgaagaaagaatgcgcgatgggcctgcgggcgatacgcccacccctcctttttgacgtgatggcgtcgcattgacgtgactgcaccgcacgcctgtgacctccatccctcgcacgggggcacgccggatcgcaaccggtaagtaaggcggcaaagcatgcaagacagctgtctgacaagtcagcaaactatcgctccgaccaacgggccgtcgccatgagcgggcttcgcgaagctcgacgggcagggacacaacgacaaagcaggctctctaaagctacgttgtcagatgccggcgcgctgtacgcgtccggtgacggcccctggttagg

SEQ ID NO: 98 - DNA, 14884 bp, Bradyrhizobium colbertium
atctacaccacccggcgcgaactgttttactggctggccatcttgttgacgttcgccctcggcacggccgccggagacctcgccgctgaaggcctgaacctgggctatctgcaggccgggctggtgtacggcgcagtcatcgccgttattgcattcggctatttcgggctgaagatgaactccatcctcgcattctggctcgcttatattgtgacgcgcccgatgggcgcatccttcggcgatctcctgtcgcaaccgatcggaaatggcggcttgggacttggcaccgtgatcacgagcgcggtgttcctgaccgttattgccggcgtgatagtctatatgacgctcagccacgagggcgaggaggccgttccggtcgagcggcgcgtttgacgacgcgccggcattgtaggatcgtacctgatcgcgaggcggctgctcatgcgatgggagatgcaggcgatgcgtgttcttgtaatcgaggacgacgccgagacggggtcctatctcaggcggggcttgcgggaacagggtcacgtggtggacatcgcgacaaatggtcgtgacgggttgttcatggcgaccagcgaggcctacgatatcctgatcgtcgaccggatgcttccccatctcgacggcctctcggtggtcaagacggcccgtgcgacgggactcaagaccccagtgctctttctgacaacgatgtctggcgtcggtgatcgcgtcgaaggcctcgaggccggcgcggacgactacctcatcaagccgttcgcgtttgccgagctgtcggctcggatcaatgccctggcccgacggccgccaatggcccaagtcgagaccgtgttgaaagtcgcggacctggagatggacctgatcagccgagaagtgcgccgcgccggtctggacatcgacttacaaccccgcgaattccgtctgttggagtatttgatgcgcaatgccggtcgggtcgtaacgcgcacgatgctcttggagagtgtctgggatttccatttcgatccgaaaacgaacatcgtagaaactcacattagccggctgcggtcaaaaatcgatcgcggtttcgacactgagctgatcgagacggttcgcggttcaggatacattctccgtgcccgcccctagactttttagaagcacggggttccgcttcgctctgcttcacacggtcgtcttcgtactgtccgtctctgtcatcgcctgggttgccgaaatcacggtgacgtccgctcttgagcatcaggcgcgggaccgcatggacgcggagtcttcgtcgctgctggccgaatatcggcgccacggcatggagggcttgcgctctacgatcgaggagcgatcttcggccgccaagcggcgtctgcattatgccattgtcaatgccgaaggccacgtcctgatcggtgaaagctatctggctgaatttgccgcaacgtcgaccgcacgaccgaagatcgtgcctcggtcccatggcgaagacgcaaccgaccagatcctggtggagtcgactgcattggcaaacggcttgacgctcgtcgttgccgacaatctcgaaagcgtcgaggacgtcgaagatgtggtcctgaatgggtttttcatcgcgctcggccttgcactcgtgctcggtctggcggctgggatcctcttcacccgctcgctgctcaagcgggttgaccacgtcagccggactgcggaagcaatcattgccggcgacttgtctcagcgcatcgccctgacgggctcgggcgacgacttcgatcggctttccgcgaccttgaacacgatgctcgatcgcatcgcggatttgcttgagagcctgcgacaggtctccagcgatattgcccacgatctccggacaccgctcactcacctgcgccagcgcctcgagtccgccaaagcgcgggcgtgctcgccagtcgattatcaacgtgccatcgatcaggccatcgagaacgcagaccagctcctcgagacattttcggcactcttgagaatcgcgcaaatcgaggccggggctcgacgcgcgtcgttccgtttggtcgatctggaggaggtcatgcggacggttgcggatgcttacgagccgacaatcgaggacggcggccgagctttggagttgcaacttgccgacgagcttccgatcaatggcgaccgcgagcttctgatccaactcttttccaacctgatggaaaacgcgctgcggcatacaccgacgaagacgcgcatcgtcttgcgcggatttcactcgcgcggcacagtcatcgcggaggtgagcgacgacggtcccggcatcccggaacccgagcgagatcgcgtgttccggcgattttaccgcctggagcggagccgcaccacggcgggaaacggccttggacttagtctggttgctgccgttaccgatctccatcaagccgtgattgaactgtccgacaacaaaccaggtctcaagatcacgctgcgatttccggatgcgagctctggaacgggtgccggacgcgagaacggcttggccgtatcttgcgtctctcacagtgaataagcgaggtcgacgcgcctgacgcgaccttcggccagattgcgaaggaggctggcgaaaagtcgccggtcgagccagtacggattctgtttgcatcgatcgttggcgagcgcacgaaaacgtcgaagctggcggtaatggcctccactcagacatcccgccgtgtcgcagaaaggtaacgccctcgcagtgaaggtactgcaggtgcacttcgctgcgaaggtaggtcacgaaggagtgggccgcgctgggtttcgatgggcatttggcaaggacagcctgacgtatggagccgatgtgatgtggattccacggcggatcggcggcgatctgagcggctacggcgctaggcggggtgcgacgaccacagcaatcgagagcaagcgtgcgcccatccctggtctcctgcttgacaccaggcctctttctccgcgcatcctacaagacgagttcgtgcacgcccatccaccccgtgtagagcccgacgaggacgatcaaggctgcagacacatagggggccccgtgggcgaagcggctgaagccgcgccagttccgctcgacgtgtcgcaggctgagggccgcaaggacgccggccgataccatggtgattgccaggccgatgccgaagcatagcaccaggaggaagccgagagtgaactgcttcaactggatgcagagcagcagaacggtgatcgcggccggacagggaatcagcccgccggtaagaccgaagagaaggatctgcgcggtcgtagccgtgcggcccgcgaagcgcgtccggatgtcggccgcatgggcgcgcgcgtgagcgtcgtcctcgtcgcccagatcgatgtggtcgtgatcgtgttcatcgaacagaacctcggcggtgtcgccggcgagtgcgacgcgcgccttgaacgcgtgcggctccggaatttcatcaaggctctctaagtatccgtacttggcgacgaacccgaacgattgctcggcgccgtcctcacggatcgtcgtcacccggatgccgccggctggcgggagcgcgccggtgtcgttccgcattcgccagcgcggcggcgcgtcgtcttcgttgatctgcagcgagagcgactgtccggccagcgagacggagtgcggctcgtcgtgatggtggtggtcgtgctcctcgttctgctcgctccgggtgcgccagaccatccagccggctatgccgatgatgatgacggccgacgcgagttgcaggtaggcctcgctgcgttcgccggagagttcttggccgaagtagaggcccgcgagcgcaatcgcccaaacgatcgccgtgtgggagatggtcgcggacagaccaaggagcgcggcctgaagcacggtgcccctgacggcgacgatgaacgccgccataatggttttggaatgaccgggctcgagaccatgcagcgcgccgaggaggatcgcgctaggcacgaacagccatgcgtttgcgctgctctgctggagcagttgagacaggtcaggcatctccggctcacttcaagtacgttcggacgacctcgatcaggtcagctgcgcccttggctttttccggatccttttcgtgcgcgggatcgacgacgtgatggcggatgtgatcctcgagcagttccgtggtcagaccgccgacggcgccccggaccgatgcgacgagcatgagtacgtcggcgcagcccagttccgcctccagagcccgctcgaccgcgtcaagttgtcccttaatgcgccggaagcgggcaaggagctttgacttgtgtgtgatggtgtgcgacatgcaccataagataggggggtatcctatgatagtcaactacgataccgcagtcagtttctgccccttccagattaggaatatcccctccacgaggataggatatagggatgacgaagcagcacgcccatgaaagccacgtccggatcgtcaagcgcctgaagcgcgcggagggtcaccttcgccgcgtcatcgagatgttcgacgacgggcgctcctgcctggacctggcccagcagcttcacgcagtcgagaaggcgatcacagaagcgaagcggacgctgatccacgatcacgtcgacaactgcctcgacgtcgcggccaacggcggctcctcgaagccgaccaagaccgtactcgccgagttcaaggcgatctcgcgctatctatgaccgggagtcgcccgatgtcctctcgaaactccctatgggttctcggtctggccgccatcgtcgcggcgggcgcgttcgcggcctgggagccgggcgcgccggcgctacgcaagacggtgggcgtagccgcagccgggccgccgcagccaccccgcccgcaggcggaggagcgcaaacccatcatccggatggacgaagagcggattgccttggccaaaatcgaacagaccaaggccggaccggccacgattgcgacgaggctgtccgtcccggccgtcatcgcgccggacgccgaccgggtggcccacgtatcggtgaagctgtcgggaacggtcgccgaactccgcaagaacatcggcgacgagatcgcgaagggcgaggttctgggcgcgttggaaagccgggaggtcgccgacgccaagagcgagttcatggcggcccgcctgtccaacgatctgcagcaggatctgacagcccgcgacaagtccctttgggaaggccgggcggtgccagagcagcagtacatcaaatcgcgcaacgctgccgcgcagacggcgatgcgcctcgacatcgcacggcaaaagctgcttgcgctcggtatcgaggaaagcgagatcgcctcgatctctcacgcgcccgagggggcgctgcggctgcagaacatccgggcgccgatttccgggcaagtggtcgaacgcaaggtggagcgcggagccgccgtcggaagagacagcctcgagaccgagctctttgtcatcatcgacctcagcagggtctgggtcgagatgacggtcaactcgtccgacctccccgcggtccgagaagggcaggaggttgcggtctccgtccgaggtggaagcagcgtagggacgggcaaagtcatcttcgtcagcccgttgctggacaaggaaacgcgggcctcgcgcgtcgtcgccaccctggacaatccggatcggctctggcgtcccggatccttcgtgacggcggcgatcgccgtggaatcgcgccaggtccctgtggtggtgccggcgaccgccgtgcagaccgtggatggacggaaggtcgtgttcgtgcggatgtcggagggattcgagaagcgggacgtcgtgctcggcggccgcgacgatgggatggtcgaagtgacgtccggactcgccgccggcgaaacaatcgcgtcatcgaatacctttccactgaaggccgagctctccaagcctggcgacgaggactgagatgatcgcgcgtatcgtcgaattctccgtccggcgccgctggctggttctgctggtagtgctggtcgctgcggcgaccggcctctggtcgctgacaaagctgccgatcgacgccgtgccggacgtgaccaacgtccaggtgcaggtgaacgcggtggcgccggcgctgacgccggtcgagatcgagaagcaggtcacggtcgcgctggagacggcgctggccggcattcctggcctggagtcgacgcgatcgttctcccggaacggctttgctcaggtaaccgtcgtcttcgtggacggcacgaacatctacttcgcgcggcagctcgtcgccgagcgcatcaacgacgccaaatcctcgttgcccccgggggtggaagtgaagatggggccggtctcgaccggcctcggcgagatctattggtgggcggtcgaatacgaaaagcctggcgccacggcgcccgtgcgtgatggcaagccgggctggcagagcgatggcagctatctcacgccggaaggcgagagattgactgacgactttcgacggacggtctacttgcggaccgtgcaggactggatcgtccggccgcagatgaagacggtaccgggcgtggccggcgccgacgcgattggcggattcgtgaagcagtatcaggtgcagccggatccagcgaagctgatcgcgtacggcctttcattcaagcaagtcatcgatgcaatcgaagccaacaatgccagcagaggcgccaactacatcgagcagaacggtgaagggtacgtggtccgcgccgccgggcgcgtcgcgaacgtcgaggacatcagacagatcgtggcctcgacccgcaatggggtgccggtgcggatcaaagacgtcgccgacgtcaccatcgggaaggagctgagaaccggaagcgccagcgtcaacggacgcgaggtggtcctcggaacagcgctgatgctgatcggcgggaacagccgcaccgttgctgccgcggcggactccaagattaaggatatcagtcgggcgctgccgccgggcatacacgcccggacagtgctcaatcgcactcagctcgtcgacgccacgatcctcacggtcgcgactaacctggcggaaggagcgctgctggtgatcgccgtgctgctcctgatgctcggcaatttccgggcggcccttatcactgcgtgcgtcattcccatcaccatgttgctgaccgcgacgggcatgctgcgggggcacatcagcgcgaacctgatgagccttggcgcgctcgacttcggtctgatcgttgacggcgcggtgatcatctgcgagaacagcctcaggcacctcgccgagcggcaggtcgccctgggacggactctgacgcgcgacgaacggctcaggacgatctccgattccgcggtcgagatgatccggccgaccgtctacggccagctcatcatcatcctcgtctacgtcccgctgctcgccttcaccggcgtggagggcaagacgttcgaaccgatggccctgacggtgatgatcgcactggcgatggccttcgtggtctccctgaccttcgtcccggcggcgacggcgatcaccctgacaaagtccgtaagggagaccgagaacttcctcgtccgccgactgaaggaggcttatgagccgatcctgtcgcgaagcatcgcaagtccgggcgtggtcgtcgcgtcggcggctgtgctctgcgccgcctcgctcgccttgttctcacgtctgggacaggaattcacgccgacgctcgacgaaaagaacatcgtcatggaggtgaagcgcgtgccgagcacggccttggcccagtcgcaggccatgcagctcgagatcgaaaaggtgatcagcaagttcccgcaggtcgccttcgtgttctcccgcaccggcacgccggatctggcggccgatccgatgccgccgagcgcgtccgacacctacatcatcgtcaagccgcaaagggaatggcccgacccctcgatgacgaaggacgatctcatccaggccatcgaggtggaggcgaccaagcttcccggcaacaaggtcggcttctcgcaaccgatcgagatgcgctttaacgaattgatcgcgggggtccgtgaggatctcggcgtcaaggtgttcggcgacgacttcgcggacatgcagcgtacggcagcccgcattgcggacgtcctgcggaagatcgatggcgccgaaaacgtgaaggtcgagcagaccaccggactgccgttccttgacatcaagatcgacaaggccgaaatcgcaaggcgcggcctcaatctcgcagacgtccaagacctggtcgagactgctatcggcgggcgcgcagcggggctagtgttcgagggggatcggcgcttccagatcgtggttcggctgaacgacgcgctgcgcggcgacatttccgcgcttgagaacctcccggtgccgttgccgcattcgaatccgatcgcaccggcggcgaccgtacccctgcgtgcggtcgcgtcgttcgagcagaccgaaggggccaaccagatcagccgagagaacggcaaacggcgcgtcgtcgccaccgcagaggtccgcgggcgggatatcggatcgctagtcaccgaagcgcaggaaaaggtcgcggaaggggtgaagctgtccccaggaagctacttggcctggggcggacagttcgagaacttctcggtcgcgcgccagcggctcgccatcgtcgtccccggatgcttcgcgatgatcttcctgctgctctttggggcgctcgggtcggcacgcgatgcgctactggttttcagcgccgtgccgctcgccctgaccggcggaattgccgctttgtggctgcgcggcatgccgttctccatatcggcagctgtcggcttcatcgcattgtccggtgtagccgtgctcaacggtctggtgatgttgacccagatccggtcgctgatcgagcgaggggtggcgcctgtccgggcgatccgcgacggagccctgacacgctttcgccccgtcgtcatgacagctctcgtggcctcgctcggcttcgtgccgatggcgctggcaacagggacgggcgcggaagtgcagaagccgcttgccacggtcgtcatcggcggattgctgacggcgacagtactcacgctcgtggtactaccagcactctacgcaaggttcacgaggcgacagcagatcagttctgttcttgaacgaagtggaatgcctcgggcggctgaatgatcggacaggccaatttcttcggccttggtcccacatcggagggcatcttagtggcctccgcggccgcactcagttcggtagtcacgcgcacaccctctagggcccttcgtgggcaggcgactagtgaattctgccgcgcccgacttccccgcaagcgctcgtgtacgccggcatcggctgcagatccgggaatgctcatgcattttgggcgtgccctgcccttcgtcggccatgagccggcacgtcgcggcacatatgtcgagcatcctgcagatcatctcctcgtcggaggccgtctggagggtcgcagatgtcggcacagcccaagcgcactcggctagatgtgggtcattgaaagcctcccgtcataccggctgttgtccacgtcgatggtgctgatagagcctgcgacgctcaatcctttgccagctttgagcaggttctttgtcgtcgcaagacttgcctgtgccactttcactctggcgagggccggcaggagtggtccttgccctaaatcgtcgatcttgaagcgcggttcgccggccgccaccaatgtcggaaaccgacactccgatgggcgatatttcctgtgcctgcctcgacgatccccgcgccggcgaaataggactcaaaggatacctttggcggtgagacagcagctagggcgatgcgcggcgattgattgccctgaatcactgaggcgcctggcaacggcaaggccggcgactgcatgaattgtccggggctatgggccgatcgctgcatgatgcttttgcaaatggcggtactcgtgccatgtcaaccaaatcacgactacatccaatagcgtgatcagcaagagccagaccgaatgggtatggctaaatctgtagagctgatagagaatgaaggacacaaatacgacaattgccgctgggtaataccacagcttttggcgcagcagtccggcaatgagtaaggctttggttattccgtggctgagcagacatatcgacgcgaaattttgggtgtccagcgagaagctgtgtgccgtctggagcagattgcgcacgacgacgtcgccaggatcttcggtcagctcttcgcggttattgcaaggatggcgctcaaaaggaactgctggctgacgaaatgcgcggtgatgccagcgaatatctccagtagagcgaagacgcccttgatcgtgaggctaatccgaaatgcgagacgaaggttcttttcctgaaatggaatgctcatgaaccggtaagcccaattgcatcgatctacttacctcgaaggcgattgctcactcagcattgaaattcgttcgtctccgtgagcgatggtgtcgcgccgccaacataatatttgtgagcagtatcgcaatgcatccgacgaacaggattggggcgttccagccgccgaatgttatccaatgcggaagaacggacccggcgcccacacaccagatcacaagcgtaccagcgaggctgccatcatcgacgaacaaccgccaaagctggcgcagcacgccagaaagagaactcatttgttggctccggatggcacggtcgcccgccgagcgagttgcgccccgaccagcgatgtcgtgaggagcaacgcgaacatcgggatcagcgcaagatcgcgacccggccattcaaagccgagtccttcgccgacccagaaaattccgaacccggagatcaaaatgccaacggcaaatttgagggcgttctccgggacacgagatagcggccgatgcaagacgataccgagagcgatgaccagaacgcccgcagcggcggctccaacgctcgccggtatcagcgcattgccgggagcaccgactgcaaggacgatgaagaccacttcggtgccttcgagcacgacggccttgaaagtcgtcccgaccgcaatcgggtcgagcatgatggtggccatcggcccggcggagcggagttggatgacttccgaggagaaagcggcgatttcgtcgtggagcgggataatgcctgccgctctgaggattgccttgcgcagccaccgcatcccgaatagcagcaacaagaatccgattaccaactgaagaagctcgattcgtatctgtcccagtaatggcccgagcagggcaatcatcgcggcgagaagcacggtgccggctgccgtgccaacaagtgcagggcgccatccgcgcacaattccgaccgccagcacgatggtcagcgcttccacgaattcgacaagcgaggcgaggaatgccgccaagaaagagggagccgaatgggtccaggtatgtaaggtggcggcgacgggcatggaacgttacgcgtgattgtgagctcggcctctgccgcgcccgaccagcctgctcagcctacgatgcttggctctcaacatatacacgccagctccagcgcaagtcccgacgcggcagttcgaatcagattacggattcgtatagtttcggtaaaatcttggagagcttggggcccgtatgctcggccatggcgaatcaccggtagccggctgaacaccaatgaacaagggaagcgcgcggcttgccttggtttggtcgagcccgccgaatttacatccgggccaaggcggctcccgggggtgcctatcggcttggctcgtcgccgacgatcatcgccttttacgtcacaacccagcccgcgatcgcgcctgttttcatgcgagtcgggctctcccggatgacaagtcgagggattccagttgccacccaaaaaaatttcatgactgaatcagacgccatcatcacctcaaatctctggcgggcttgccgtcgtaccgcgaatatcgcagccctcaccaccctgctcatcgtgacgtctatcgcgtcctattgcggtatcatccagctgttgggcaacgttcatgtcgtagaagacggacaactttaccgctcggcgcaacttaacaagaaccagtttgagcgggtaatcaacgagtactcgataaggtcgatcttaaacctacgaggggataattctggtacatcctggtacgacgacgaaatcgctatctcgcgaagcatgagcgtaacgcactttgattacggcattggagcgcgccgtcttgtcacatcacagcagatccgtgcaattctcaaaatcgttcgcgacgcccccaagccactcctcattcactgccaaggcggcgctgaccgatcgggtctggtggcggctctttacgtcgccgaagtggaaggcaaatcggccgatgaagctgctcaacagctttcgctggtctacgggcattttccctatctcctgagcaagacaaatgcgatggacaagagcttttgggagtatgttgaagcgcatcgctcatcccggtagtcgcgccagcttacggaagcggcaggaccggcccgttgaaactgacgggccgtggtcagcttgctatcgctctttgcggtcttgttgcgttcgtcgaccggggttgttcgtgtcgccgtttctgcatttgtcatcgcattctctgagggtcgagccccagcatgagccgcgtcccattctcattccctcatcgctaccccgatcatcttcggcgctgctgtactcgaagtccgaaagatgggacatcaaaacgcgggcggcatcaccggactggtaatcgcgtcggaagcactcgccggcgcgattgcctcactttcggactgggtattgatgcggttttcgtgtcacacggttcccaggcgctaaatccttttgcctattactgctgggccttcggactcacagcgctgacccttttggcattcgcagcgtgatcgctctgtccactaacgggcaggttacttcgccttgaccaaggaagaggctcgattctgattgtgactagaagaaaatttgatcctgaccttctctccaactttcacagattcagtctcgatgccttcgggcaacgaataggtcgtcccgtcactcaatgtgacggaatccgatctcgtattcacgctgcggacagttccagtagtttcggccgcttgggcattcgtcgccgcgacggctgcgattgccgttgccaagagaaatttacgcatagcgcgtcactccgttgcgtcgcccccgatcaacacacgaaccagaataagacagatttgtgctcgttcacacgaccgaacctcacccgggtagcgatctgagattacaaattcgtatagtcccggcgaaatcccggagagctcgcgttctctatgctcgatcatggcttaccaaccgatggtcggcgggagatatcaatgaagaaggtagctgcgtggctcgcgataggcttggtttcgagtcccatcggagttgcacccatgccgggattggcgcagggagcgacgcccctaccggcactcgagaacccgattaagtcggagaagaacccaccaggcgacattcctgacaatcaagtcttcatcgactatcagtcgccgcttgggttcacgatcaaggttccggaagggtgggcgcggcgtgaagcatccgatagcgttgttttcagcgacaaatacaacaccattgaactcaccgtcgcacagcgcgccggatcgatcgatttgaacaatgtgaagcagaaggaggtcgccgacctggagcgatccggcaaggcggttcgtgtctcaagagtcaagccgacctcactgccatcgagcagcgcgatcgtcgtttcctacgggtcgaattccgagccaaacgcggtgaccaacaaggcggtccgccttgagaacgagcgctacttcttgtggaaggacggcaagctagtcaccttgacgctgtcggctcctttcggagcggacaatgccgatcagtggctgctcatggccaagagcttcaggtggcgctagatgactgttctcgaagccatcgacctctaccgcttcttccatacccgcgagtccgagaccctcgctctgcgcggtgtcagcctgtgggttgatgccggcgagatggtggcgctgatggggccgtcgggcagcggcaaatctaccctgctcgcttgcctcgcgggcctcgatgaacctgacggcggtcacgtcgagctgctcggtgagcgtctgacacggcttcccgaagcggagcgagcgaagcgacgagccgcaagtgttggcgtgttgatgcagtcgggtaacctgttcccaaccctgtccgttggcgacaacgtcaaattgccgatgctgctggcacgcaggaaagatcctgcgtgggcagaaaagctgttgcggagtgtcggcatcgcggagcgacggggggcgcgtcccgggcaattgtcggggggcgaattggcgcgagcgggccttgccgttgccctggcggcccgcccgcgtgtgctcctggcggacgaaccgacgggagaggtcgatgccgccaccgaaggattcattctcgattttctgaacgaacaacggcaggcgggaacaggcattctggtcgcaacgcacagccgaccgctcgccgaccgagccgatcgaattgtccaacttcgggatgggagggtcgtcgatgcctgaccttctcatcgaaggggccgccgtgacgcgtcgcttccagcagggagatatggatgtctatgccctgcggccggcatctttccaggtccgttcgggcgaccgcattgcgctgctgggtccctcgggaagcggaaaatcaaccctccttcaccgtaagcggcatgaggcacccacctagc

SEQ ID NO: 99 - DNA, 5527 bp, Bradyrhizobium colbertium
gcgaatgggacgtagacgtcgcttacgattcggtgaacacggcatcctgaactctgtgctgcgtccatggctcgtcaaggacgaaaatgagaagctcgccaagcgcgccgaagcttgccttatgcgtgtgggggtgccgccggaatggtgggaccgtctggcaagcgatctgccctacggtcatcaaaggcgtgtcgagatcgcccgagcgcttgcgcaagatccgcaagtcctgctgttggatgagccggccgctggtctcaacccgagtgaggctgccgaactgggccggcttatcgtcagtatcgggcaggacggcctagccgtcctcctcgtggagcatgacatgcgcatggtgatgtcgatttcctcccacatcgttgtgttgaacttcggctgcaagctggcggaaggaacgcctgcgcaagtatccgcaaacaaggacgtcattgccgcgtatctcggcaatccccaggaaatagtatgattgaattgctcaagatcgaagacctcatcgcaggatacggcgccatcgatgttctgcatggtctgtcgctttccgttcgaggcggcgagatcatgtcaatcatcggcgcgaatggagcgggaaagtcgaccttgctcaacactatctccggatttgttcgaccaaaggcgggatgcatccgatacgaagggtgctcgatcgtcgggcaagctcccgcactgatcgcgcgagccggcatccgtcatgtgccggaaggacggcgcgtcttcgccgatatgacggttgaagacaatcttcttcttgggggctatggccggccgcacgaacaaaccttgaagcgggtcgaggagatctatcaactctttccaagattggccgagcgccgcaagcaggcagccgggaccatgtcaggtggcgagcaacaaatgctcgccattgggcgtgccctggccgcggatcccaaggttctgatgcttgacgagccttcaatgggtctcgctccgctcatcgggatcgagatattcaggcttatcctccgccttcgggacgcctacggactgggtattcttctcgtcgaacagaatgcccatgctgctctgcgtatcgccgacaaagcctgcgtcctatctctaggtcgcgttgtgaaacgtgatgctggatctgcactcctcaacgatcctggtgtcgtcaaagcgtttcttggagggcatgctgacgttgcctaggagaaccctgttgccgcgatcccacttaagagggcgcaacgagcttcttgtggtgtcacgcgggatgcaacctccgttcgagcccattgggaccttggacccggccgatgtcgcagtgtgcccgaaagccctgcccccctgtcgcgcgcagaacgtagggtgttgctcgggtgcgccactagatcgagcatacatgtttggtatgtctagaggcattcaacgtctgacgagaacaatttctctcgagctggtccccgacgatgccgctgaccgtgggcacgaaactcgttacggttttatcagcgacagcgccattttcatggttttgtggccgcgtacgcagtcgagctccgcgtccgaagtgttttcaaagcgctctgagatcaatccggcataatcgtgcgtgtggacgaacgttgctggcacaaggccgggatcgagttcgctttcatggtcgtaggttcggcaccaatacgattttgccaatgccctcgcggctttcgacgcggcgcatcgcggcggcgaattgcgctagtgggagcgaactatcgatgggcgcccgcaagtttccagcttcgaagagctcaaacatctcttcgtataggatgcggaccttttcgcgtagcgcggcatccgccttagtcttgccccacgccatgtagaatccccaatacagaccgatcacggtgaggttcttcaccaagattatgtttgcgggaatttgagggatgcggccggaggcgaagcccatcggaatcaacctcccaaggggagcgacgcagcgaagggattcgtcgaagacttcgccgcccacaggatcgaatacgacgtcggcgccgcgaccgccggtgatgtccagcacgcgatcccggaaaccgccactgcggtggtcgatggcgtgattggcgccgtaccgcttgaccgcgtcgatcttccgttcgcctccagcggtcgcgataaccgttgcgcccagggcgcgcccgacctcgatggcggccaaaccgctggcgcctgccgcaccgtggactagcagggtctcgcccgattgaaggctcgcccgccacttgaggccggcataagcggtcgcgtagatggtcgggaaaagtgtcgagccttcgaagctcaaggaatcggggatgcggaagacgttggcagcatcaactatcgcttcttcagcgaacccgccggacggaagtccggcgcagactcggtcgccgacgttcagagctgaccggacgtcgggagctatctcactgacgatcccgccgatctcggtgcccgggacgaacggaatagtcggcctgttctgatgcttgccggcgatgaagagcaggttcgcgaaacttacgcccgcggcacgcaccgaaatgcggatggtaccgggctcgatcgccggcgagctgatgtcatcgtagacgaggtcgccgattcccccgaagcgatgtcctatcaccgcgcgcatcgtcaattcttttctacatgcccgtggcggccagctccggatgcaaagcgaccggctccggcctgtgcttccttcgcgcgggcttcgacggaaagttcggtctccaagccgatagcgtccttctccgaaaggttccactgacggatggccgacatacgatcggatcgcatcgcaatttgaggaaacgccgcaatctggcgtgcgagttccaccgccgcgctcagagcctggcccgtaaggacgagccggtcggcgagcccgatcgcaactgcttccgtcccggagatcttccgtgccgtcaggagcatgtcgagcgccctgcctgcaccgatgaggcgcggtaaacgaacggtcgttccgtcgctcatcggaatgccccatcgcctagagagaacggcgaatgtggcggtctcctcggcgacgcggagatcgcatctaagggcgagaccgagacctcccgcgcaggcgtagcccgcgacggcggcgatcacgggcttcgacaaaacgccatggcacgggccgtccggatcgccggcccagggcttgtattcgtaacccgcggcgagctctttcagatcagcgcccgcgcagaaatgcccacccgcacccgtcagaacggcggtggcctgaccctcgctctggtcgaagtcccgcagcgccttcgcgagcgccgcggcggtctcgctgtccaaagcattgcggacaccaggccgattgatggtgatgacggtgatcggcccgtcgttctcgatcaacagcttttgacggtctgccatgcctcgatcaacctccgggataaccgcgtctccagcaacgggcattcgctttcctcgaccggctcgccgcgacgattttccgagggtgccaacacgccttcgatccgtccggcttcttggcctgggtaaagtagaatcgcgccccaggcgaccgtcggtccaattttggcggggggtgaatccatcttcgacgggcattctcgcacatcttcgccactgctcgtcccttcatcgaatgagggaatctcgcgcgatgggcgccaaggccccgtcggttcccgcccttttcgacatctctcgcgccgcatcacgtgttattggatgctaactgatctttccgatagttcgcaacgctgaatcgtggagatagcgctcaaagcttggatgggatcgcagcgctttaggccaccgggatgcggacagtattagccctatggcggcgaacgccgtcatttccagttcagttcggctctctcttggccgaagggcagagagcgcccttagccagcgctccacgtgctcccgctgacgtcgtctaacctgacgcctcatctcttcaggcaaggagcgctcttcgctctcgtaaaccagtaccagctctggataccgcgccgccaagcgtgcttggcccgcaataagagcctcaagctcatcctcaggcgtttgccgaggtgatcccgccaattcgatcaagcggtcaacggtctgattgcaaagggctgagaggatctcggtttttgacctgaaatgtcgatagatcgctgggccgctgacgcccaccgcgcggccgatttcgtcgaccgacacaggttcgaagcctctttccacgaacaaccggcaagcggccatcagaatctgctggtcacgtttcatcaagctcgagcatcccattgactttacgttaacgggcgttaacgtgcgggacgtgaacggccgttaacacgccaaagaagatatcacgaagagggagcggggccatgctcgtgaccgagatcattcgccggggcgctcggcagttcggtgaccgcacggccgtgttgttcggggatcagcggctcacgttcgccgaggtggaccggttctcaaatcggcttgccaacgccatgagagagcacgggctcgagcccggacagcgcatcggtcttctgctcaacaattccctactgagcatcccggttgatttcgcgtgcgcaaaagctcgcctggtacgcgtcccgctcaattctcggcttgcgttggctgagcaccaccaaatgcttgtcaacgctggtgtaattgcactggtgtacagcgatgatcttcggggccgggcgggagatctcgtcaagctccttcccaagcttaaggccttcggtctcggctccgccttcgtcggcctggacctcctggggctggctcatgatgctcccgatgtcgaacctgatgtttgccccacgcccgacgatgttgttctggcgttgtacacatcaggcactaccgggaaattgaaggctgctcaacatacgcaggcaagctgggctgccgtcggcatcaacattctcaccaatttgattcccgttaggacaggcgatgtgatgttgcatgcggcgtctttgattcacgccagcggcaccttcatcttgccttactgggtgcgcggcggaacggcagctgtgttgcccgggttcgcccccgatacctacatacgcgccgtggagacttggcgccccaccgctcttaatctggtcccgaccatgttggggatgttgctcgagcatgagagatgcgagcaagctgattttagctcagtcgaaacggttgtttatggcgcatcgccaatgccgcgggccatcattgaaaagggtctcgccatgtggggaccccggttcgttcaatactatgggcagacagaagctccactctgcatcgcggtgctgaaaaaggaagatcacgtaggggtcgatgcatcgaagcggcttatggcctgcggccaaccgagcgtggactgcgagatacggctagtcgatgaggacggaaatgatgtgccggcgggagaggctggggagattgcgatccgcgcgccctttgcaatgaaggg

SEQ ID NO: 100 - DNA, 4832 bp, Bradyrhizobium colbertium
gtgcgtgacctcggcgtcgcggcccctaggtggtgtggacacttatcgcatccataagacgattgctgcgagagtgatgactgcgcggtaatttcgggcggtcttttcgaagcgggttgcgacgcggcggaactgcttgagttttgagaagcagcattcgacgagatggcgctgggcgtagagatccttgtcgagcgggtgtttgagcgcacgtgacgggttgttggggatgacggcgatcgcccccttggcggcgatggcttggcgcaggtgatcggcgtcataggccgtatcggccatgacgacctcggcgggcaatccctcgatcaatgcggcggcttgcggtgcatcgcccttctgacctgcggtaagcctgaaccgtacaggacatcccaagccgcgaacggccatatggatcttggtgctcaggccgccgcgcgagcggccgatcgcctgatcttcagacccccttttttcgccccggcggcgtgctgatgcgcccggacaatggtggaatcgacgatcagatattcgaagtccggatcatcggacatcgcctcgaagatccgccaccaaacacccttgatgctccatcgactgaagcgccggaacacgctgttccaatccccaaacgcttccggaagatcacgccagggagagcccgtacgcacgatccacagcacaccttccacaaacatccggttgtcgcgcccggtggagcccttctggtcaggtcggcctatgatcagcggcgccatccgttcccacgccgcgtcgctcaaaaccaaccgctccatcacacccaagaccgcctccccaaaagaagtcttgaatctgatttgctcctaaaagggaatccttagagtccacaccacctagcgcacgctgagggcgccgacgagtgctgcgcacgtgaacatgggagaatcgctcccagcagaccgcatgctcgcttcgactgtgttgctcgcaaaaaacagaaggctcgatcgaggtcgaacaggatcacgctcgagcctccaagacatgccttgcatggtcgatgaaggcgcgtaacttcggcaagacctgcgcgcgcgagggaaagtacaagaagaaccccggcgtctcagggcagaaagcctccaacacaggttccagcgcacccagcccaacgaggggggctgcaacggatgtaagggtgtagccaaggcctagtcccattgcggcgctggcgacgactaagcctgagtcgttcacgaccacactgcccgagaccgcgacttctatgtcgccgccatcgccctcgaactcccaccggtagaggtcgccgcgcgctgtgttccggaagttgatgcaatcgtggcctcgaaggtccacaggcgtgttcgggcggccgtgacgggctagatattcgggcgagccgacgaccgtcattcgctctggcggcgtaaggcgcaccgcgaccatgtcggcgtcgacgatctcccccagccgcacgccagcgtcggagccgtccgcgacgatgttcgcgagcctgtcctcgacaaagatctcgacagtcacgtccggatgcgccgctcggaagctgggcaaaagcggttcgatcaacccggaaagggcaatgcgcggcacgttgactcggagatggcccatcggccggtcgcccatggccgatgctgcgtgaaaggcttttgcgatcgactcggcgcctggttttgcctcggccaggaatcggcggccggcctcggtgagggacacgctccgggtcgtgcgcgcgagcagtgccacgccgacccgcgcctcgagctgacgaatcgtctggctgaccgcctgtgaagagacgcccagctcggctgcggccgccgtgaaactctggcgctccgccaccctaaggaacgcaacgacgccgtcgagtaggtctcgccgcactatcaactccagcttggaagttcagcaacgatactatggattatcgcaggaatgaaagcgccgtagcttaccttcatcagaacccaccgggttccttgctcaacgacaggaggatgccatgaccgaagccccgaacagccgccgcaatttcatccgggccacgctcgcagcgggggccaccgccgcggcggcggggatcacctccagcgccgaagctcaggaaaacagttccagctccaagctgttcgccggcaaagccgtcctcgtcaccggcgcggcacgcgggattggccgtgccatggcggaggcttttgccgatgccggcgcgagcgtcgcgctgctcgatattgccgacccgagcgcctatcgaaccgcacagggctaccgcgtcgccaacatggcggaactcgacgcggccgttacgtcggtcggcagactcggcggtcggacgatgaagctcgtcgccgatgttcgggatcatgcccagatggagcgtgcgatggcgcagacggccgacacgttcggcggcctggacgtcgtccttgcgaatgccgggttcgtatcctggcatccgttcgaggacggcaagcccgcgcaatggcgcgaggtgatcgacaccaatgttcacggcgtgtggaacacaatgcatgcctcgatcccccacctccgccgccgaggcggggggaagatcatcgctacgtcttccattggcggccgattcggcgtgcctggcaacggcgcctacacttcgtccaaatgggcggtgatcggcatggtgaagcaagcggccgcggagctcggcaagtacaatatcgcggtgaatgcgatcgcacccgggcccgtcgacacgccgatgtatcggtcgcaaggccagaaggagtcgattggcgcccgaaccgatgccgatcaggatgcgcgggttcgccccgcacttccctacggcggccgcgcggtgcaggagccccgcgaaatcgctgatgctgcgctgttcctggcgagcgacgccgcgcgcgctatcaccggcgtgtcactcgacgtggcgctgggattcaactccagttacacagcatagagtttagaaacgaccgaggacggccctgccccgaggcacgggtcgttcacggccatgccgccctgcctaccaatgtcgtaagtgcgaatcgacgctctaggccaggacattgccatgcatcgtctgcgccgctggtccagtctcgcggcgttctgcgatcccccgtgagctggaccagcaccggcgcggcggtcgctaaaggcgcattgccgatgccctatcgctcgtcgtcttggcagggctggtgggcctgtggaccccatcacttctgcgcgttcaggatcacgatggcggagccgccggacctctgctcgtgcgccaacgcatcgagcgctaaggagaatgccgatcctaggcagagcgtcaccgaggtcgtgctcgccgccggcttcgcctcgtcggttgacttcgccaccgccttccggaagcaggccggcctttaccccgagcgcgtacaggcgcgagatcgagtcatgacgatcatgacgccccagtggatcgcgcttcatacggccggattatgcgcagcggtttttcgcgtcgctgatggtcgcgccgtgatagaggctgcgctcaagcagcggtgtgatatcgcggactgaagagcctagtcagatcgaactgaagtctccgccccggccgaggccggatgcaaaccgtgcggcacctcgatgcgcctcttctctaagtggccgctcgccctcccggccttcgtatttgagcgcatcttcgatagtcatcccccattgccggtaagccgacatacggtctgccttaagacagacttgcggaaaacgagccagttgtgcggccaattgctcagctgctgcgcgagctgatccggcaggcaccagttgatttgccaaaccgaaagttaaagcctcttctgccgcgacgccgcgtccagtgagaatcatgtcaagagcgcgactcatcccaatgagcctaggaaggcgtattgtgcctccatcgatcagcggcacgccccatcgcctgcaaaatacgccgaagatggcggtatcgctcgcgacgcggagatcgcaccagagagcaagctcgaggccccctgcaaccgcatatccctcaacggcggcaatgaccggtttagtgagcagcatccgactcggaccaatcgggccaactccctccggctcatagtccaacccgcccgacaaggacttgaggtcgtatccgccgcaaaacgtcgtgccagttccgcacaacaccgcggcagaactattttcatccgcatcgaacgcggcgaaagcatcacgaagtaggccggccgtctcgtcgtcgatggcatttcggcttttcggccggttgatgatgaccgttgtgaccgggcctttcttctcgaccaaaactttcggatcagaagcttcagttccattattacgggtcatatttttctttcctttccggcccaaaattcgtcccgaagagctcgtcgcagaatttttcccactgcacttttaggtatctcttcaaccacccgaatcgacttcgggaccttgtacccggcgagtcgagcacgcgcgaacgcgatcacgtcttcttccgcgtaagtttcggacctgcgaagtgaaacgaatgccgtgactgcttcaccccacttttcatccgggagacccacgacggccacttctcgcacggatgggtgagtagaaaggacgtcctccacctctcgggggtacacgttgtatcctccgcttacgatcatgtcggaggttcgatccaccaaataaaggtagccctcttcgtcaaagcgtccgacatcccgcgtacgcatccatccgccgggcaactgtccttgagcattcagatcgtccgcatcccaataaccctt

SEQ ID NO: 101 - DNA, 100356 bp, Bradyrhizobium colbertium
  misc_feature (10652)..(10661): n is a, c, g, or t
atgtttccgtataaacacatcatgctctagttagagtgcatacgtccgcgctagttcctgttctggcccgctgaggcaataggataagtaattggaatatcaacactatcgcttttctgtggccccgatgatggattggaccgaccggcattgccgggtgttccaccgtcacctaagccggcgggcgctgctctatacggagatgcttaccaccggggccgtcattcatggcgacggcaagcggctgctcgggttcgatccgtgcgagcatccggtggcgcttcagctcggcggctcggatccgcgtgaccttgccgaagctgctcggatcggcgaggccttcggctacgacgagatcaatctcaatgtcggctgcccatccgatcgcgtgaaggatggccgcttcggtgcctgcctgatggcagagccggagctggtggcgagatgcgtcgctgcaatgaagagcaccgtcgccattccggtcacggtgaagtgccgtatcggaatcgacgatcaggacccggaagccgcgctcgatgcactcgcacatgcggtggtcgcctccggctgcgacacgctgatcgtgcatgcccgcaaggcctggctcaacggattgtctccgaaagaaaaccgcgacattcccccgctcgactacgatcgcgtctatcgtctcaagcgcgcgatgcccaatgtgcctgtcatcatcaacggcggcatctcttgcctcgaagaggcgaaaggacatctcgaccatgtcgatggcgtgatgcttgggcgcgccgcatatcaggagccatggcggctgctgtcagtcgatggcgagatcttcggcgagacggcgccccacgcgtccatgcaggaagcgctcgaggcgatgatgccctatatcgatcagcagctcgcgcgcggcacgcggctgcacgcgatcacgcggcatttcgtcggcgcattccatgccgtgccgggcgcgcgagccttccgtcgtcatctggccgagcagggggtgaagcccggcgctggtctcgaggtgctgcgcgatgcgatcgcgcgtatcggcgcccgcgtcccggtggaggcggcgtaagtcggttagttgacggccgtgcgcgagcggcggggactgcgctggagctccggatagccggtgagcatcaacgtgtcggcgcgcacgccccagctctccaggcgatcgaggaagctcatgccgagcagattggttttcatctgtccgcgtggaacgacgagagcgggcaccgatttttccacgagctgaccgacggagagacgatcgagcgtgaggcgggctgccttggtgcggccgccggcagtttccaggtcgacgtcatattcaagcatctcgagcggcagcccgattgcttttgcggtttcccaggtcagcacgaccgacgtcgcgccggtatcgatcaccattggcgcggtgacgccattgatcttcgcacgcagcgcgaattcgccgccctggccgcgcgggatctgcacggcaggggccggtgccgccgcctgggcacgaaaaatgtgtgaaaccttgtggctggcgcgtgcgatctgaccggcgtcgccataggcgacgacggcacctgccgtgccggcgagcaggacgaaaacgagcaggaagcggatcatcgcgcgcctccgaacacaagccggcgggtcagatgcgtttcggcgatcccccggtcggcgtaagtccggcttccgccatccgcgccggcaagagggccatggtcgcgagccgctccgcgctttccatggcgtgccagcgcgcgatctcgggcaaggttcggccgcagccgaagcatagcttggtcttgggatcgatcatgcagacggcaacgcacggcgtttctttgctcattcggacatagtgatggatcgtcggacatttctgcaagcatctcgttaggagcctgtgccggcgctcatgatgggcttgtgccgcggccggcgtttctcgtccggcagaggggaactctccggctggagcggcggagcatcatccgatagcggcgcaagcgcactcatcacgcgctccggcgggaaggtgacgatcacctcggtgccgatgcgcagtttcgatttcagtgtgaacgtgccgccatgcaggtcgatcagattcttggcgatgggcagaccgaggccagcgccctgttcggccgacttgatcgagttggagccctggccgaacgaggcgagcacaaccggaatctcgtcttcggggatgccggagccggagtccttcaccgagagatattgtccgcccgaggcggtccatcccgccttgagccagatctcgccgccttgaggtgtgaacttgatcgagttggatagcagattgagcacgacctggcggatcgcgcgctcgtcagcccagagcctcggcatgccctgctcgaatacttcgtggatggtgatgccgcggctcgatgcgcgcagcttcatcaaatgatggcagtcggcgacgataccgaccagcgacaccgcttcctcgttgagttcgtagcgaccggcctcgatccgcgacagatcgaggatctcgttgatgaggttgagcaggtgtacgcccgaattgtgaatatcggcggaatattccttgtagaccggcaccgcatgcgccccgaatatttcgctcttcatcacctcggaaaagccgaggatcgcattcagcggcgttcgtagctcatggctcatctgtgccaggaagcgcgacttggcgacgttggcggcttcggcgcggtggcgcgcttcgtccgagatcgccttggcctgttcgagctcgccgatcagcgcgtctttctcggcgcgcgcttccagcgtggcgaaggtcgaggagtgcaggcggtgcgccagcaacacgaagtagccttcggcggcgagggcgagcgcggccaggatgtagttgtccagcgagccggtcatcgccaggctaagtgccattgcgaccgcgaccggcgcggtggcggcaagggcggcgatcggcagattggcggcgagcatgctcgatactgcgatcacgagcagcatcaggaacatcatcagggattccgtgaccatgtcgagcacgggatggatcaggatcgccatccaacacaggccatagagcagatcgatcacgacgaagcgcgtccgccaggcgcgcgtcgcagtcggagaggcgggctcgctcaggaagcgccggcagctccggatcatcgccgcgtggatgcagagcatgccgactgtccaggccgcggccgggatcggctgcatccacagcccgaacagcacgccggtggccaccaccagcagcatgacgacgtaggaggccgacagccgcgtttgcgcgtattgtcgcagcatctcggcgtcgaaagccggacgggttccactggtcgacgttaacttgtcccgtgcctcacgcacccgctgcgccgcagcccttcggctgctcgccgatggagcgctcaccggctcggccggaagctgcacgacctcgggcttttcagcggggttactcatcaagcaacacgattcctgcccacgccggacgcgggccttctgcattgtctatctctggcaagaaatccttaagaggtgacttaaggagctaaagaattaccttaaccgggcgttaatccaccgtcgtccgggtctcagtccgcggaaaggcgccggcgccttcatttgaagaaaacgagcgtgaccaatgcgaacacgggcagcagcaggacggaggtccaggccatgtatccgaagaagcccggcatcgcgacgccgcccgctcgcgcgatcgcgtacaccatgaagttgggcgcgttgccgatgtaggagtttgcgcccatgaacaccgcacctgcggaaatcgccgcaagggtgacggcgccgtttgtcatcagctgcttggcgtcgcctccggcaagctcgaagaagacgagataggttggcgcattgtcgagaaaggatgagagcacgccggtcaaccagaaataggcggcattgttcggcgtcccgtcggcgttggtgaccatgttcacgacggaggcaaacgcgccggatttgcccgcgttgagaattgcaagcacggggatgatggtgatgaagatgccggcgaacagctttgccacctcgactatggggccccaggagaagccgttcgcgtcgtggtcctccttcgaggtgacggcgagagatgcgaacacgacgccgatcatcacggcatcgcgcagaagattctgcagctggaggtgcgtgcccagaacttcaaatccgccgaggtcgagcttggcactcaagaggatcgcagtgatgatcactcccatcaaagcgaagttgaggccgccgctgatccgcaggggattgtccggagttgggtccggtttgacgcggccttccttgcggtaaagataagcatcgatgcaaaagaacaggacaagcagaatccaggcagcgaacgtggtctgggggaacaggtgcgtcgtcgtccagaagaagtccacgccgcgcagaaagcccagaaacagcggcgggtctcctaagggtgaaagcgagccgccgatgttggacacaagaaagatgaagaagatcacgacgtgggcgttgtgccgacggtcgtcgttggcgcggatcaccggccggatcatgaccatcgacgcgccggtcgtgccgatgacgctcgcgatcagagtgcctagcgcgagcagcagcgtattcaggaccggggagccgtggagattgccgcgcaccacgattccgccggcgaccgtgaacagggcaagtagcagcagaatgaacgggacgtattcgagcagcgcggtatgagcgagtgcctggatggttggaagcggaccgtaccagattgcaagcggcagcacgatcagggcggcccacatcgcggcaatcttgccttgatgatgctcccagaagtgaggtgctgctagcggaaatattgcgatggacagcagcatgcccgcaaatggaagcgcccattgcgggccaatgctggcgccatcgagcgatgcggccagagtctgcgaaggtgatgcagtcaggatcaggatagcaacgatgagcgggctggtgatgaggcgggagagccgtcgatagattccacgcctggcgacctcggggtgtccccgtcgacgctccagcgctaggccgacacaggcaacgacgagaatggcggcgatcacgctaagcaagactccccccgaagattatggttttccgttcgcccgcctagctgaagcttcgtcgcggccgaggccgcgacgaagtcgaagctgcgcgaccctggaccgggccgtaaccgagcgtcagcgttgcaggcgtgcgagcaggctcgacgtatcccagcgcttgccgcccattttctcgacctcagaatagaactgatcgaccagcgcggtaacgggcaggttggcgccgttgcggcgggcctcggcgatcgcgatcgagagatccttgcgcatccattcgaccgcgaagccgaaatcgtacttgccctcgttcattgtcttgtagcgattttccatctgccaggattgtgcggcccccttcgagatagtctctatgaccgcggccacgtcgaggccgctcttcttggcgaagtggatcccctcggagagaccctgcaccagaccggcgatgcagatctggttgaccatcttcgtcagctgaccggagccagcgggcccgagcagtttgcacatccgcgcgtaggcgcctgtgatgatcggctcggcgccggaatacgcgtcctccgcgccaccgcacatcacggtcaggacgccgttctcggcgccggcctggccgccggagaccggcgcgtcgacgaatttgaacccggccttggtggcggctgcatccagctctcgcgcaacctcggcggaggcagtggtatggtcgacgaaggtcgcacccttccgcatgccggcgaacgcgccgtcgggtccgatcgtgactgcgcgcaggtcattgtcgttgccgacgcagcacatcacgaagtcctggccctccgcggcggccttcggggtcggtgctgtcttgccgccgaacttgtccgcccattccttcgccttggccgcggtgcggttatagacggtgacctcatggccccctttcttcacgaggtgtccggccatggggaagcccatcacgccgaggccgaggaaagcgactttagccattgtggtaccttgtccgtagtttgggttttacggttcttgccaagcaagggatgcctgggttccgcggtgagggcggactggacgcgcaccataaacccttgaggccagagggcaacggcttcgtttggccgccccctgtgctaggatggcggacccaaggacttcaaaatgagggagcgagagcatgggcggcgtgagtgttggcgtcctcgatcatttcaacatccggacccggaatctggccgagaccgttcgcttctacgaggacgtgctgggcctggaaaaaggcgctcggccgaacttcgccttcccgggcgcctggatgtatagcgagggcaagcccgtggtgcatctcgtcgatatttcccctaccgctgagccacaaaagccggattcaggcgttgtccaccacgtcgcctttgtcagtcgcggctttgacggcatgaaacagcggctggcgtcaaaggggatgaagttcgaggcccgtcaggtgcccggcggtgagctctggcagatattcgtccacgacccaaacggcgtcatgatcgagctgaactacgaggctgccagggagcaggggggagcgcccatcgaaaaggccgacgatatcggccggcagtagccttttgggcgtttccgctctaatggggcatcctcaactctaggagatgcgctttgagcgtgacgcagcaacaggttctcgacagcctcaccagggtcaagtcgccccgcggggtcgcgctcacccatgccaatgtgctgagcgcaatcagcgcggccgacggaaaggtgttcttctcgatcaatgtcgatgccgccgaggcgagggcctgggaatcggtccgggccgaagcggaggccgccgtgcgcgccattccaggcgtcaccaccgtcatggtggcgctgacggccgagcgcaagccgggctccgcgccgccgccacctccgcagccgagccgcggcacgcccggcgtgcagccggcgcatgcccacaagccgccgcagggaggccaatcgccgatggcgcggcaatcggaaatcccgggcgttgccgccgtaattgcggtcgcctccggcaagggcggcgtcggtaagtcgaccaccgcgctgaatctggcgcttggcttgcgcgacctcggcctcaaggtcgggttgcttgatgccgatatctacggcccctcggtgccgcgcctgacgggcctgcgcgacaagccggagctgaacgaggagcgcaagatgattccgctccggcgtttcgggctcgccatcatgtcgatcggcttcctggtcgaggaggagaccgcgatgatctggcgtggtcccatggtgatgtcggcggtgacgcagatgctgcgcgacgtcgagtggggcaagctcgacgtgctggtggtcgacatgccgccgggtaccggcgatgcccagctgacgctggcgcagaacgtgccgctcaagggcgccgtgatcgtctcgaccccgcaggacctgtccttgatcgacgcgcggcgggggcttgccatgttcaagaaagtcaacgtgccggtgctcgggatcgtggagaacatgagctacttccagtgcccgcattgcgggacgcgctcggacattttcggccatggtggggcccggcacgaggctgagaagctcggggtaccgttcctgggcgagatccccctgcacatggcgattcgcgccacctcggatgccggaaatcccgtggttgacagcgagccggacggccctcatgcggcgatctaccgcgccattgcgggccgggtccgggaccagctgaagggcgtcattgccgtggcctgaaccggttgccccgccaacctccggggacatgcgactttcgtagagccccgccatgccattgtcgcgttccgaaaccgggccggccgtgttaaaggcgcaccgcagtcaagccccttcggttcgacgcgagcttaccgcgtcgccggaatgagcggcggcataagagaagttaaggggaaacgccccagcaaggagagacctgaagatgaagcgtcgtgattttctcaaagtgtcggcagcaggcgcggcggcgaccgcagtggcttcaccggcgatcgcgcagtcctcgcccgaggtgaagtggcgcctgacttcgagcttcccgaagtcgctcgacaccatctatggcggcgccgagcaggtggcgaagtacgtcgccgagatgactgacaacaagttccagatccaggtgttcgccgccggcgaaatcgtccccggcctccaggcgctcgatgcgaccacgaacggcacggtcgatatgtgccacaccgtgtcctactactatgtcggcaaagaccccactttcgcgatcttcgcctcggtgccgttcggcctcaatgcgcgccagcagaactcgtggctctatcagggcggcggcaacgagctcgccaacgagttcttcaagaagtcgaacgtgatcggcttcccctgcggcaacaccggaacgcagatgggcggctggttccgcaaggagatcaagaccgttgccgacctgtccggcctcaagatgcgcatcggcggcatcgccggccaggtgctgcagaaagtcggcgtggtgccgcagcagctcgccggcggcgatatctatccggcgctggagaagggcaccatcgacgcggccgagtgggtcggcccctacgatgacgagaagctcggcttcgccaaggtcgccaagtactactattatccgggcttctgggaaggcggtccgaccgttcacgccttcgccaacctggataaattcaatgcgctgccgaagaactaccaggcgatcctcaccaacgcgaccgcccatgccaatacctggatggccgcgcgctacgacatgcagaacccggcggcactgaagcgtctggtcgccggcggcacccagcttcggcccttcaccaacgaggtgctggaagcctgcctcaagtcgaccaacgaattgtgggcagagatctcgggcaagaacgccgagttcaagaaggcgatcgacgccatgcaggcctaccgctccgacgaatatctgtggtggcaggttgccgaatacacctacgacagcttcatgatccgctcgcgcacccgcggctgatctacggctcacatcgcaagaccatgagcccggcctcctcagggaggccgggctttttctttggccgcggtgcgatcggggtggcattcggccccgcgatgttccatgctgccctcaaagcctcggcaagaaggctccacaatcagatccatcagggtaggaaatcatgaagagaagagacttcatcaaggtcacagggcttggtgcggccggtgccgccacgctcgcggctcccgcgatcgcgcagtcgctgccggaaattaaatggcgcatgccgacgagctggccgaaatcgctcgacacgctgtttggcggcgccgagatgatgtgcaagatggttgctgaagcgaccgacaacaaattccagatacagatcttcgcggcaggggaaatcgtcccgggtctccaggtgctcgacgccgtgcagaacggcacctgcgagatcggccacaccgcgtcctactattatttcggcaaggacccgaccttcaccttcggctcagccgtgccgttcggtcccaacatgcgcattaaccaggcctggtacatgctgggcggcgggcgcgacgtgctcaacgagttctacaagagctacaacgtcatatcgctgctcgcgggcaacaccggctgccagatgggcggctggttcaggaaagaggtcaatacgcccgaggacctgaagggcatgaaattccgcatcggcggcttcgccggccgcgtgctccagaagctcggcgtggtgccgcagcagctcgccggcggcgatatctatccggcgctggagaagggcaccatcgacgccgccgaatgggtcggcccctacgacgacgagaagctcggcttctacaagattgcgccgcactactactatcccggctggtgggaaggcgggccgatgctgatggccttcgtcaacctcgacaagtggaacgcactgccgaaatattaccagagcgtgctggagcaggccggccactacgccaacaactacatgatggctcgctacgacaacgccaatccactggcgctgagaaagctgctggcgggcggcaccaagctgcacgccttctcgccgtcgatcatggatgcctgccacaaggccgccaaggagctgcacgccgaagtcgcagcgaccaaccccaacttcaagaaggtgcacgactcgctcgccaagttcacgagcgacggctactcctggttccaggtggccgaggtcggctacgacatcttcatggcgcgccgctcgcagagctgagcgcgttttcggtcggatgcggcgccccggagcaaggctccggggcgttggcgtgcgcatccatgggggggacaaacaagaacttcgaaaacaaccccatgcacagtannnnnnnnnnacggcgcgagaattatcaacagcttggcgggatcgcggcgaagttgatccagaatagccgaattttttgacccgtcgggcaaaacagtggtagacatgcatgatcggcaaatccgaaattgcgtcattggactgagatcgcgatgcgcttcgatcccgacaagaacgtttcggtggtgacttgctcaaggccttctgacggttggtggctgcttctacaatcgatccagctttagcttgtcgctttgcataatctttccaataagccgctgcgcgaccttcctgatcgtgctctggcagcagccatggccgatccaacgccgctcgaggttgattcgaatgcgagggtgttcaactcgcccgcctgcgcagaggtcggcgcgacgcggcgggacggagtgcacctccgtcatcgcagcgagcaagcctcagctcatcatgctttagcgaacaacgccggcggcatcatccttggttggaatgagccaatcgagcgccaggaggcttgcttcgacgatgacaaatgcgacgagaccgccgagccagccgaagaaggccaccgagaaggtcccgatcaagattgcacaaaagatatcggcaagtaccttgcagacgcggaagtcctggttctcgttcggtgggaagtaaggcatcgggcttctcccggcgttgatcctgagccttggactcaaccaagcaaaaataatacgttccgcggaccaattcttcaaccggcggggcgatgacgaccacaccaggtctttgaatcggctgcgtgggcccagccatttcttgggcgatgcgcggcgtggcttacatggacctgacagagcaaaaggccaaccagtgcttttttctctggccgcggcggtccgaatgctggaaaagagcgcggacgcggcgcgagccgtgcgtcaattccggagcatccggcgagcctacgatgcgccttctgatcgtcgaggacaatgtcgagctgtcacggctcgttgccggggggctggctgcggccggctaccagagcgatatcgtcgggagcgcggccgaggcgcgcgaggcggtgagcagcgtcggctatgccgcgatgatcctcgacctcggtctgcctgacggcgacggcatgtcggtgctgcgcgaactgcgcctcgagatggagccgctgccggtgctggtgctgactgcgcgcgggggcctgcaggaccgcgtcaccggtctgcgcagcggggccgacgattatctgtcaaagccgtttgcgatggaggagctggtggcgcggctcgaggccatcctgcgccggccaggccagttgctcggccgctccctcaatctcgccaacctcgtctacgacaccgagagccgccagatcttcgtcgacgaccagccgcgcatcatctctgcgcgcgaggcctcggtgctcgagatcctgctgcgccggcaggggcgggtggtgccgaagaagaacgtcgaagaccacatcttcgggctcgacggcgaggtcgcatccaatgcagtggaagtctatgtctcgcggctgcgcaagcagcttgcagagcacggtgcgaaagtcgcgatccacaccgtccgcggcgtcggctatctcatgaccgaggagagatagcgtgcccgccgggggctatgtcagatcgctcgcgttcaaatcgctgatctcgcggatcgtgttcctgcacatcgtcgcggtcgccgtggtcgcgatcttcctgcccctggttctgttctggctgctcaactccgagatcgaccaattgcatcgcgatgccatgcgtgcgcaggccgaggtgctggcggagcgcgtcgtcgcgcagccggacggcacgttgagcttcaacctgccggacagcctcaagggactctattcggacgcctacggacgctaccagttcgacattcgcgatgccgacggccggttgctgttctcctcccaccgacgctcagcggcgacggcgctctcccgtttctccgaaaccatctccggcgccagcgtcactcgggaggtcgccggcaagacggtgcgcatccaggttgccgaggatctggcgcaccgggacgtcattatcgacgatatcgtttcgaactttttccggcgggtagggtggatcaccatcccgatcctcctggtcctgctcgccatcgacatcatcatcttccgccgcgcgattgcgccattgtggaaggcctctcaggaagccagcaatatcggcccggcccgcaccgacattcgtctgccgaccgcgcagatcccgagcgagatcatgccgctggtcaccgccgtgaaccaggcgctcgatcgcctcgagggcgggtttcgcgtgcagcggcagttcacggcggacgccgcgcatcagttgcgcacgccgctcgcgatcctgcgcacgcggatcgagacgctcggcgacagggtggcccgccgggcgctgcatgcggacatcgaagccatgagccggattgtcgcccagttgctggagatcgccgaactcgacacattggtgctcgatcccggcgagaccgcggatttgcgcgccgtctgcgccgaggtggtcggctcgatcgctccgttagcgatcgcgcagaacaaggacatcgcgctgaagggcgccgactcgcccgtcctgatccatggcaattcggagatgctccagcgcgcgatcttcaacctcgccgaaaatgccatcaagtttaccgcggtacacacctccgttgagattgaggtgcatgacgacggttcggtgctcgtacgcgattacggtccgggcgtcccggaagccgatcgcgagttgattttccaacgcttctggcgcgccgaccgccggcgcagcgacggcgcggggctggggctctcgatcgtgcgcgcggtggcggacgatcacgccgccacgatcgcagtgacaaatctccccggtggcggcgcggagttcacggtgcggttcaggttggcagaccaaacggtatcttcgccctccccgggaggggagggcagtcgcgcctgaggtgtgtcaacgctgcttccacagcgtcatggccgggccagacacgtgtcccggccatccacgccttcattcgcgggcccaagaacatggatgtccgggacaagcccgggcatcacgatctctgccgagtgtgcatatacgctaccctccctgcagggagggcaagagcgcgactgtactcccgcctcgctacttttgcggcggtccgaaatccagtggcggcagctcgatctgcggcacctcgatcttgatcgtgctgggatcgatgttggtctggacgcccttgtagtgcatcaccatcgccgggaacgcgatgaccaggccgaccatgatgatctggatgacgacgaatggcaccgcaccccaatagatctggccggtcgtgacagggtccatccgcttgcccgtgatgcgatccgtgtagcgctccttcggcgcgacggaccgcagatagaacagggcgaagccgaacggcgggtgcatgaacgaggtctgcatgttgacgccgagaatgacgccgaaccagatcaggtcgatgccgagcttttcggcggccggcccgagcagcgggatcacaatgaaagccagctcgaagaagtcgaggaagaaagccaggatgaacacgagcacgttgacgaagatcaggaagccgacctggccgccgggcaacgaggtgagcaggtgctcgacccagacgtgcccgttgacgccgtaaaaggtgagcgaaaagatgcgggcgccaaccaggatgaacacgacgaaagccgacagcttggcggtcgattccgtggcctgacgtatcaggtcccagctcagccgccgcttcgccgcgcccaggaggagggcgccggcagcacccatcgcaccgccttcggtcggcgtcgcgataccgatgaagatcgtgcccagcaccaggaagatcaggaacagcggcggcaccatcacgaatgtggtctgctgcgccatcttggagaggaaacggaagccggtcagcttatcgacggcccagttcagcacggcgatcgcaaacgcgaagatgatgccatagaacatgctgagcacgacgtaatcggctccgtgcacggtcgaatttcgcatcatgaaccatccgaacacgcagctcgcaaggaacaggaagccgagcgagaccaggccgcggtcgccattgtcctcacggaagccgatggcctccttcggcaggcccggcgcggccgccgggaagatcatgctgacgaggaaggcgtagccggcatagaggccggcgagcacgaggcccgggatgaaggcgccttcgtacatgtcaccgacggatttgccgagctggtcggccatcacgatgaggacgagcgagggcggaatgatctgcgccagtgtgccggaggcggcgatgacgccggccgcgacgcggcgatcatagccatagcgcagcatgatgggcagcgagatcagacccatcgagatcacggaggcggcgaccacgccggtggtcgcggcgagcagggcgcctacgaagatcacggcataggcgaggccgccgcggatcgtgccgaacagctggccgatggtatccagcagatcctcggccatgccagaccgctccagcaccagccccatgaaggtgaagaaggggatcgcgagcagtgtgtcgttgttcatcacgccgtagacacgctccggcaaggcctggaggaagtcggggtggaactgaccgagctcgacgccgatgatggcgaagaacaggccgacggcgccgagcgagaatgccgccgggtagccaagcagcagcatgacgaccagcgacacgaacatgattggcgccatattggcgatgatgaatgcggtcatgaattcccccctacaccgtcgccaacggctacttcttctcgatcgcttcgacgagatgttcgacttcggcctccagcgccgacacctgggattcgtgcggatcgggtatcaatccgcgcatcaccgcaatccgcttgatcagctcggagatgccttggacgagcaggaaagcgaacccgatcatgatcagggctttggcgggccattgcggaagaccgcctgcattgcccgattgctcgttgatctcgaaggagcgcaggaagaacggcacgccggtaatgatcatgatgatgcagatcggcatgaggaagaacacgtgaccgaccaggtcgatcacgttgcgcgctttcttcggcagcgtgttgttcacgatgtcgatgcggatgtgctcattgtcgagcagcgtccagggcgcacagagcaggaagacgatgctgaacagcacccattgcagttcgagccaggaattggacgaggtgtcgaacgtcttgcggatgatcgcgttgactgcagagatgatcacggcgagcacgatcagccacgcaatgcgcttgccggtccagcgcgtgaacgcgtcgatcctgctgctcagcttaaggagcgcttgcaacgataggtcctcccccgattgtgccccggccgtcttgactgcgccgagatggcgcgtggcttgtctcgccgcgcaggcatgaggcagccgcaccaaaccagcgggcgtgccgccagtcaatcggaagtttgttgatagttaaggggaataagccccgtataaacccgtgtggcggccggcttctaaccgccggtgacgctcatgtgcctggagacgctggggcggtcgtggcggcggtcgatgatgaaatcgtggcccttcggcttcagtccgatggcgcggtcgatcgcatccgcaagcaatagatcgtcgctcgatgcacgcagaggtttacgcaggtcggaggcatcctcgtggccgaggcaggtgtgcagcgttccggtgcaggtgatgcgtacccgattgcaggattcacagaaattatgggtcatcggcgtgatgaagccgagcttgccgccggtttcggcgacgctgacatagcgggccggtccgcccgtgctctcggccaagtccgtcagcgtgaattgctgggcgaggcgggcccgcaccagcgacagcggcaggtactggtcgatccgtcccgacccgatctcgcccatgggcatgacttcgatcagcgtcagacccatgcccttgccgtgggcccagcgcatcaacgagggcagctcgtcttcgttgaggttcttcagggccacggcgttgatcttgacgccgagccccgcggcgcgcgcggcctcgatgccttccaacaccttgtcgatctcgccccagcgggtgatctcgcgaaacttaccgggatccagcgtgtcgagcgaaacgttgatgcgacgcacgccgcaatcggcgagctcccgtgcgtgcctggcgagctgggtgccgttggtggtcagggtcagctcgttcaaggcgccgctggaaagatgccgcgacagtgagcgcaccagcgtcatgacattgcggcggaccaggggttcgccgccggtgagtcgcagcttcttcacgcccttggcgatgaaggcggtgcagagccggtcaagctcctccagcgtcagcaggtcggccttcggcaggaacgtcatgtcttcggacatgcagtagaagcaacgcaagtcgcagcggtctgtgaccgagacacgcagatagctgatggtccgcccgaacggatcggtcatcgggctcgacaatgcggcggatccgttcatgcgagaggccttgtcaatgtgacgggcgcacctctgtttcagcggtgcagttaaggcaatctaagcatcggacgcggcaaggacaatcgggtggtatacgtgggttcagtcctcgggcagtgcagcctcgtcctcggatgttgcgtcggctcgctcggtgcgtattgccaacccggttccgacgcaaaacggcgaaccgtcatgcgctcccgtcgctgtgaacgcagcctgctgcgcggagccttgtggatgttgacaaaaacctcaacggcctcagtggcttgctgcgagttttgtcgtcgtcaggctggtgacggcctccggcagatcgcgcatgtgatggatcagccggtccggcttcagatcggcgatcgggacgtccgtgtagccgaagctgaccccgatcacggggacgccggcccgccgcgcgacgcccacgtcggttccggcgtcgccgaccatgatgctggccttcatctccccgccagcgcgcgccacggtctggcggaagatggtcggatccggcttctgaacgccaaacgtgtccgcgccgcagatcgccgcgaagcgaccgctgaggtcgagctggtcgaggagccgcctggacagccattcgagcttgttggtgcagaccgcgagacgatggccctgcgccgcaaagtggtcgagcgcggcctcaagtccctcgaatggccgggattcgacggcgatatggtcggcataataggcgatgaaatccgccgtcatccggtccatgtccgcgggggtgaccgtacggccctcggcctccagcccccgctcgatcagcttgcgggcgccggcgccgatcatgttgcgggccgaggccatcggcacgggcggcagcccttcgcggtcgagcacgtagttcaaggcggtgatcaggtcgggcgccgtatccacaagcgtgccgtcgagatcgaagacgatggtgtgaggggaggtcatgaccaagcgctatcgggccggccggatcgacgcaaggggcgggcccataagatcaccttataggcctgttcccgccagaaaaacgaggctacataggccgccgaaagcggccgctgtcggcggctcacgaattcaggggcgggcgcagacgtgaacatggaccagttgaagcggcaggcggcggcgcgcgccctcgaggcggtgcgcgacggcatgcagctcgggctcggcaccggctccaccgccaaacatttcgtcgagctgctcggtgagcgtgtcgccgccgggctcaaggtggtgggcgtgccgacctcggaggccacgcgcgctgatgcggagcgttgcggcgtgccgctgacgacgctggacgagatcgaccatctcgacctgacggtcgacggcgccgacgaaatcgacgccgagctcaatctgatcaagggcggcggcggcgcgcttttgcgcgagaagatcgtggccgccgcctcggatcgcatgatcgtgattgccgacgacagcaaatgggtaccgacgctcggcaagtttcccctgccggtcgaggtgattccgttcgggctcggcgcaacccgccgggcgatcgaaaaggcatttgccgaatgcggcctttccgggcaaatggcggtccgcaaggacaaggacggccacgttttcgtcaccgatggtggccactggatcgtcgatgcccagctcggaagtattgtggatccccccggtcttgccaaggcgttgagcgccatccccggggtggtcgagcatggtttgttcatcggcttggccagctcggccgttttggcgggcggcgaaggaattcgcgtgattgaacggcgcaagccgaaaggagaccaggaatgaagaacgtgttgaaactcttgccggccgcgactctcgctgtgggactggccgtctcggccgccccggccgtcgcccagcagccggcccagcccaaggctgccgccgccccggcccagccgaaggcgtcgccggccgcgatcgcggcggcgaaggagattctgcagatgaagaacgcgaccgcgatgtatgccggcgcggtgcccggcgtcgtcgagaagaccaagatcgcgctgattcagcagaacctgaattatcagaaggagctcaacgaggttgcgccggtcgtggcccagcaactcgccggccgccagaacgagatcggcgaaggcatggcgcagatctatgccagcgagttcaccgagcaggagctgaaggacctcgccaccttctacaagtcgccgctgggcaagaagctgatcgaggccgagccgcgcgccatcggcctcagcatggccttcatgaactcctgggcccagaacttctccgagacggtgatgggcgctttccgcgccgagatgcgcaagcgtggcaaggagatctgagcgcacctatctgaaaaggtcgttcttgaaaggggtcggagtggacaatggctgaattcgacgtcgacctcttcgtcatcggtggcggctcgggcggcgtgcgtgccgcccggatcgcggccggctacggcgcccgcgtgatgatcgcggaagagtatcgcatgggcgggacctgcgtgatccgcggctgcgtgccgaagaagctgttcgtgatcggctcgcactttcgccaggagctggaagacgccgcgggcttcggctggaccgtcccgccggccagcttcgactggccgacgctgatcgccaacaaggacaaggagatcgcgcggctggaggcggcctacacggccaacgtcgagaagtcgggcgcgcagatcgtcaagagccgcgcggtgatcgaggacaagcacaccgtccgcctgatcgagaacgacaggaagatcaccgcgaagtacatcctgatcgccaccggcggcgcgcccaaccacggcgcagcgattcccggcatcgagcatgtgatctcctccaacgaggcgtttcatatcgagaagctgccgaaacggatcgtgatccagggcggcggctacatcgcgctggaattcgccggcatattcgcgggtttcggctccgacgtcaccgtgatctatcgcggcgacaacatccttcgcgggttcgacgaggacgttcgagtccatgtccgcagcgagatggagaagcagggcatcaccatcctcaccggctgcaccgtgaccaaggtcgatcgccacggcgaggaattcaccacgcatctgtcgaacggctcgagcgtcgcctccgatcaggtgatgttcgcgatcggccgtcatcccaacgtcgccaatctcggcctggagaatgccggcgtcgccatcaatcccgcaaacggcggtatcgccgtcgaccatttctccagaagctcggtcgacagcatctacgcgatcggcgacgtcacccaccgcttcaacctgacgccggtggcgatccgcgagggccatgccttcgccgacaccgtgttcggcaagcgcgaggtcagggtcgatcacgccaacatcgcgaccgcggtgttctcgcagccggaagtcggcaccgtcggcctcaccgaaaccgaggcgcgcgcgcaattcagccacgtcgacatttacaagacgacgtttcgcccgatcaaggcgacgatgtcgggccgcgacacccgcgtgctgatgaagctcgtcgtcgacggcgcgaccgatcgcgtgctcggctgccacatcgtcggcgatgccgcggccgagatcacgcaagcggtcgcgatcgccgtgaagatgaaggcgaccaaggccgatttcgacgcaacgatcgcgctgcatccgaccgcggccgaagagctcgtcacgatgcgcacgccgaccgcacgccacgtgcgtcaggcgacggggtagccttcagccgtacagatatccgaccggctcgccttcggtgcgcagggggcgtaggtccctttgcgtgatgatctggccggcgaggccgtcgatctcgtcacgctgggtcggcgtccagctgcgcagctcgttcacgcccttgagcaggccgagccgcaggatctgggtgttttcgccgacgcctgcgaggctgatggaatctttgcccgccgtcaccacgtcgccggcgcaaagttcgaagctcccgccgcccttcctctgaaattcggcggttccgcgaatgacgcggtagatcacgacctcgcccctggcgaagaaggtcgcgtccgcggcgacagacgtgctcttcggcagcagcgactgaccgcgcggatcggtcgcgatgacgtggccggtgacgagatggccgctcggaatctcgatgccgatatcgcgcacgtggaccggcatggccgatttgatcgaactttcgccgagcggcttgtacagcgcatccaatgccaggggatcctgcagccagaagccggcgccggccggccggtcgtgcaggggatggcgccaagccacacggggcgtctctgcctcgtcgatctggtccggaccgacgatggtcgggttcggaaaggttgtcgggtcggtgatgaaagcctcgaggaatttgcctgaaaagcccatcgagatcgggtcgggcaccaccgtctgcggcgtcttcagattctcttcggtcgacaatcccgaccatgtgtagaacagctggcggtgcacgatcgcgctttgcagcatcaccgcgccgggaccgacattgtagaagcgcccatcatagtcgaaggtgaacgcgcccgaagtgaccagcacgagctgaaacccgcccggcggaagatgaagatggaaatcggtcgggccggtgtccgcccggtagatcggcagattggtcgcgacctcgtgcaggaggaaggtttcgttgttggcgtgaaatccctcattggcgcgattgtagagcgcctgcggtcggtacgtcgcctcgaacttcgcatcccggtcgcgatcgatcgcaacgaaatcctgctcgctgaggcggagccgcgcgccgttcggatgggtgaggccggtgaacttgagatctccggcagcatgcacgttcatggcattctccgatctgaagcctcatcccggagctgggcgcacgcaacttgccgctccttggtgtgaagggcagggaattgggcccgatgccgtcttgcgaattccaggccagtcgggcgcggtgcggcgcgcagggttcggcggctgcacggggttcgcaaataatcgagatcgaacctgagcttaaccggcagcggccgcccccctgcctggcctgagcgcgcagcccgcaacccggttgagcaacttgtcttgtctaatttgtcggcacgtccggcaaagggcgtgcatccgtgcagatcgcggcgaccggcaaacgccggcggctcggcgctcgaggccggtcaatccaacgattgacggcgggctggctccggcttcccgaacgggctctcggcccacttcgccatgtccaacgcgcgggcgtcgaagccttcgcaccagaggcagctcggctccgcgcgaccttcggtcgtcagcatcgggacgagcgcatggccgcagccggtacagaatgtgatgcgattcacgcccttctccacgatcgtcgaattcaggaaagccactttcctcgccgaagcttgcgcgggcgctatgacggcgcaggagcgctgcgttgggcaggcaggctcgttccggagagcgtagatgtagcgatccatcgtgacacggctgtgatgtcttcgccgctttcgcgataggtccggagctggaattcggccgagctgccgcgctccacgatggtccggcaatgctcgacctcggcagcgcagttcagcgcggctgcgtcctcgccaacgtcgtcgatcacgcgagtgagcagctccgagatcgtcaccggcccggcagtggaggcgaagatgcaatcggtgccgtagcgctgggcccgccatttgttctcgaccgcaatcgcgcgctcgacggcggtgacctccttcgacagatgaggtctcaggtagaggtgccgcgtcaggcagcggtagagcgaggcaatggcgacggcgtcgtcgatgaaggtgcaggtgtcgggcgcgcgaagctcgagggtggggtggcgcatggaggggcgcatcgcccaccagatgtggctttcatcgggaatcacgccggagcgctgcagggcgccgacatagtcgtcgaagtcctgcttgccttcgaacaattcgggcaggccggtgcgcggcagctcggaataggcggcgaggcggtagcccttcaggccggtcttgtgcgaattccagaacggcgaggacgccgagagcgcgatgaagagcggcagatgcggcagcatcgcccgcatcaccgccatccgcttctcgggatcgggcagctggacgtgcacgtgcatgccgcacatcatgttgcggtgaccgatgctccgcaggtcctcgatcatctcctcgtagcgcggcttcggactcggctgcgacatgcgccagaccgcggccggatgcgttccgcaggccatgatcacgaagccgtactgcgcagcgacccccgcaacctcgcggcgcaggaagcgcagctcttcgcgtgcgtcgttgacgtcgacgtggacattggtcgcgacctccagctgggattgcagcatctcccgcatggcctggccgccggtcgaccaattcgccgattcgaacagttcattgggagtctcgatcgcgacctcgaagctgcggcggtcggccaggaagtattcctcctcgatgccgaaggaatattcggtgaccttgccgcctccgccggcagaacggatcacgacgtgctgcttgccatcggaggaatcgaggcgcagccgtttcaaaacgtctgaagcaaatggcatatccccacccggcaaaggcattacctgcgggcgataatccttctggtaacagcgggttcctgcccggtgccactgcaaattgtcgcgtcgaacggaacaatcttcacgctttccgatgcgcgcgcgatcagggcgtgatttggcggtacctctgcccaatcctcttccctgtcgaacggctcggacaccaccacgacttggtcgccgtcctcgcggaaatagagcgtgttcgcgtcgtcgttgaccgcaaccctgaaggcgtagaggtcgcgaccgttggcaatcgcgctggtgaagcgcagccgttcgcggagttggccctcattgacgaaggagaagagggcttgaagcacgcgccgcgttgcgccgagcggatcctcctcgaggccggcacccatcatcgccaggaacacggcttccgaatcggtcgtgccgagccgcgacggataataggcgtcgggaatcagcgcctcgacttttcgccgcagccgattccagctcccgacgaatccgttgtgcatgaacagccagtgtccgcaggcaaagggatggcaattctgccgcgtcaccgccgtgccggtggccgcgcgcacatgggcgaagaacaggtgcgagcgcagatggcggcagagatagcggaggttctcgtccgaccatgccggccgcgtctcgcgataaaggccgggctccggatgctcgccataccagccgagaccaaacccgtcgccgttcgagcccgccgtggactggagggagcggatgctttgcgccacgagcgaatgttcgggctcggtgacgtacggctcaaaggacgtcgtctcgccccggtatgcgatccagcggcacatgagagttcctgtcgggggacatcgttacgagattggccaacggttctcgcaccctcatggttcccggcgctgccgagccgcagtcgtcgtgcagaaagccaacggttctctggcttcgtcgcgcgtcgcaacgggccggcgttgccgcgcgtccacgatcaatggaaccgatgcggcggctggtcgcagtcttttcgccttgattcctactgacctacctttatctctgtgtggaacaagaatccgggcccctctggcgaggacaccgacaacgtcggtcaacctcgtgatgtcggatgacctgtcccgcgcgattgcgatggatcggccgatcgtcgggccttctgtgatttttctccgacaatttgtctccatcgtagctccgcgcggccatttcgcgagttaagggagcaacgatgtctgacgccaaaacctcacatccggtcgagatcacggagccgcccggccagaacgagcaggctgcggccgcgctggtgatcgtgggcgcgctggttgcggttgccgaccggcgcgtgtcgtccgtggagcgggacgaggtgatcagcttcatccgggatcgcaagctggcgccgcacgtttcggacgaacggctctatgcgatgttcgatgaactcgccgaacggctcgaggagcccgatttcgccaatgtcgtgatcgacacgctgcggccggtttcggatctgccgctctcgacccatctggtggagctgtctgaacgcgttgctgcagcggatgaggacgtagatccccacgaaatgcaggcaatcaaattgttgcgcttgctgaccctggtgctgcctcgcgcgaagccgctcgtgccgagcgcagccggcgccgagcctcagcccgccctgaaggagtaagcatgagcgcagctctggacgagcgcacggacaccaagagcgccaccagccagatggctggtggcgatccgcggctcgacaagctcgtcgatcggctgccgccgcgcatgggtgacactgtcacctatcttctcaaaccgtccagccgctggttgagaatcccctcgggcacgctgctgatcgccggcggcgtgctctcgattctgccgttgctcggcgtctggatgctgccgctcggcctcgcgttgctggcggaagacgtgccgtcgctgcgctcctcgcgcgcgaaggttctggactggatcgagaggaagaagccgcactggctcgatccctcggcatcggggaatgatgaaaaatgactgaattcatcactgcggaagcgctgaccgcgctgtttcaagtcgtcctgatcgacctcgtgctcgctggcgacaacgcggtcgtcatcggccttgccgcagcgggcctggctcccgatcagcgccgccgcgccatcatcgtcggcatcgccgccgccactgcactgcgcatcctcttcgccggcgttgcgacccagcttctgcaggtgatcggtctgttgctcgccggcggcgtgctgctgctctgggtgtgctggaagatgtggcgcgagctgcgtgagcaggctacgcatgccgagcagctcgcgttcagcaatggcggcggaggggacgctgcgccggcgcagcgaaagaccttcggccaggcggcgatgcagattattgccgccgacgtctcgatgtcgctcgacaacgtgctggcggtcgcgggcgccgcgcgcgagcatccctacatcatggccttcggcctgttgctgtcggttgcgctgatgggcgtcgccgcggacttgcttggccgcttgctccagaagcagcgctgggttgcctatgtcggcctcgccatcatcctttacgtcgcgttcgagatgatctatcggggcacgctggaactcgcacccgttattgccagtctttgaggtgctgcgtgtcagcaatccggagtgatcaatgacgtctgaacccaaagcacctttggcacagcccgtgccgccgcggctcggcctgctcgctcagctcatatttggctcgcgctggctgcaatttccactttatatcggcctgatcgtagctcagggcgtctatgtcctgctgttcctcaaagagctttggcacttggtcgcgcactcgttcgaggccaccgagcagcagatcatgctggtcgtgctcggactgatcgacgtcgtcatgatctcgaaccttttgatcatggtgatcgtcggcggctacgagacgttcgtgtcccggctgaacctgaccgggcatcccgacgagccggaatggctcagccacgtcaacgccagcgtgctcaagatcaagctcgccatggcgatcatcggcatctcctcgatctcgctgctcaggaccttcatcgaggccggcaatctcggcaccgcgcgggccaatttcaccgagagcgccgtgatgtggcaggtgctgatccacatgaccttcatcgtctcggccatcggcatcgcctgggtcgatcgtctcagcgatagcggacatcgacaggaagccggtcatcactgaccaatccggtcgcctgagcacctcccgagcggccaatcctgggcccgcccgacgtccctgtcgggcgggctctttttcgagatcgataaatttgtctgtaatccgttcggcggaagcaaacgctacggacagaaagcgcagcgccttaaacctgagctttggaaccgatctgcatcctgcccgcaacagggcagggcatcaacatgtcaattctcagggagatcgtcgcatcagtcgcgggagtctatgcgctcctgttcgtctgcgacgcattgttcggggtcggcgaggcacgcttcgacgacgcctattaccgcgccagcttctacgcgccgcggccgcaggaattccgcttcgccggcgatacgccgccggcagtccgcgtcagcgacgccttcgcacagtttgcgccgggtgaagccaagccgaacaggcgctactcgtcactgaccacgatcatccgctgacgcagcctcattccccctggatccactccgcgacgccgcgccacaacgtgtcgcggtgcgcggggcggaaaaagccgaaatggccgatggccttggccccgacgtcggatggctgcacggtcagtacctccggcgtgaccgccgtgaagccgcgggcgagcagttcgacggaggggcgcgtcgcccagggatcgtcggagaagcacagcgcccgcaactcgcccttgaacctcgcgaaattctccagctccggcagtcgtgaatcgaagaggtagcgggggctcgagacccactcggcccattgcaggaagacgcccttgggcagatcctcaccgatgccggcccagcccggcgcatagccgagcgcgtgggcgagcggtacgccaatcaggttcatgaaggcgaaaacccggtatttctccggcgcggtcatcagccgccaggtcgccgcctgcgaggccacgaaggcggcgcgcgagatctccgtgttgttcgcgatcagcccgagcgcctggccgccgaaggagtggccgacataggcaagcggcaggctattataccgctcgcgcatccagctgaccgcggcagtgacgtcgagcgcggcccagtccgacatagaggccttgaagccgaccagcgatttcggtcggttgtagccgaccatcgccggcagccgggaatcgccgataccacgatagtcgtaggtcagcaccgcgcagccgcgatgggcgagataggaggcaaagccccgatagatcttgcgcggcacggcggtcgccgagttgatcaggacggcgtggcgcttggccccgcgcggcaggaacagggtgccggtcagcgcatagccgtcggtcgccggaaagctgatctcgtcgatgaaaacatcgtccagggccgcgtccatgggcggtctgtgtcccctcggtttcttgccgccgccaacaaatgcgaattcggctttgctcgcaagggcttgcggtgcgaaatggatttacaactggcgggcgccggtcagcctgtgtataaggcggccctcgcaacccacagatcaggttgtacttttcgcttcacggagagagtgcgatgtccgagcggtggacgcccgagtcctggcgcagcaagccggtgctccaggtgcccgattatccagatgccaaggccctggccgacgtcgaggcgcagcttgcgacgtttccgccgctggtgttcgcaggcgaggcacgcaacctgaagaaggcgctcggccgcgtcgcggccggcgaggccttcctgctccagggcggcgactgcgccgagagctttgccgagcatggcgccaacaacatccgcgacttcttccgcgtgctgctgcagatggcggtggtgctgacgtatgccggcgccgttcccgtggtgaaggtcggccgcgtcgccggccaattcgcaaagccgcgctcctcgccgaccgagaaggtgaacggcgtcgagctgccgagctatcgcggcgacatcgtcaacgacatcgccttcaccaaggaagcgcgcgtgccggatccgcagcgccagctgatggcctatcgccagtcggcggcgacactgaacctgctgcgcgccttcgccaccggcggctacgccaatctcggcagcgtgcaccaatggatgctgggcttcctcaaggattctccgcaatcccgccgctacaaggaacttgccgaccggatctccgacgcgctgaacttcatgcgcgcctgcggcctcgatctcgaggcgcatcccgaactacgcgccacggatttctacaccagccacgaggcgctcctgctcggctacgagcaggccatgacccgcgtcgattccaccaccggggactggtacgccacctcgggccacatgctctggatcggcgaccgcacccgtcagctcgaccacggccatgtcgaatatttccgcggcatcaagaatccgatcgggctgaagtgcggcccctcgctcaaggccgacgagctcctgaagctgatcgacgtgctcaatcccgacaatgagccgggccggttgacgctgatcggccgcttcggctcggacaagatcggcgagcatctgccgagcatggtccgtgccgtgaagcgcgagggccgcgtggtggtctggtcgtgcgatccgatgcacggcaacaccatcacctcgacgtcgggttacaagacgcggccgttcgaccgcatcctgtccgaggtgaagtcgttcttcgcgatccacgccgccgaagggacccatgccgggggcgtgcatctggagatgaccggccaggacgtcactgagtgtctcggcggcgcccgcgcgatcacggacgaggatctcaacgaccgctatcacacggtctgcgatccgcgcctcaatgccgagcaatccatcgatatggccttcctggtcgcggaactgctcaagcaggagcgcgtcggcaaggcccagccgatgccggccgctgcggggctctaaaaccttgctgcggatctggaaggccacgatcaattcccggaacggtctggcctttgcattccaatcggagcaggccgtccgcgaggagatctttgcgctcctgttgtcggtgccgcttgcctggttcatcggcgcgacggcgatgcgcacggtcgaattggtctgttcggtcgcgttcgtgttgacggtcgagctgctcaacaccgcgatcgagaagcttgccgatcggctgacgatggaccacgacaagcagatcggccgcgtcaaggacatgggctcggccgcggtcggcgtcgcgctgttgatggccggcgcgttctggatctttgcgatcgtcgagcgactgggcttcgtctgacgggaatcgaacaggggcggccatgaccgaacgtctcgacacattcgcggtcacgctcgcccagctcaatccgaccatgggcgatatcgagggcaacgcggcgaaagtgcgtgcggcgcgtgcgcgagctgctgcggacaaggccgatctcgtgctgtttccggaattgttcatcgccggctatccgccggaggacctggtgcagaagccggccttccaggccgcctgccgggccgcgatcgagagcctcgcgcgcgagaccgccgatggtgggcccgcgatgctggtcggcacgccctggctcgaggagggcaggctctacaatgcctgcgcattgctcgacggcggccgcattgcgagcttgcgattcaaatgcaacctgccgaactacggcgtgttcgacgagaagcggctgttctcgcaaggccctgccgccggtccggtcaccgttcgcggtgtgcgcatcggcgtgccgatctgcgaggacatctggcttgaggaatccgaggattacgagaacgtggtcgagacgctggcggagaccggcgccgagatcattgtcgtgccgaacggctcgccttacgcacgggacaagaacgacgtgcgcctgtccgtcgcggtggcgcgggtgacggagagcgggctgccgctggtctatctcaaccaggtctgcggccaggacgagctcgtgttcgacggtgcatccttcgcgctcaatggcgatctctcgcttgcggcgcaactgccggctttcgaggagaacgtcgtcaccctgcgcttcaccagaagcggggacgactggcgctgcaccgggccaatggccgaactgccggagggcgacaaggccgactacgccgcctgcgtgctgggcctgcgcgactacgtcgtcaagaacggctttcccggcgtgctgctcggcatctccggcggcatcgattccgcactgtgcgcggcgatcgcggtcgatgcgctcggcgccgaccaggtgcacggcgtcatgctgccttatcgctacaccgcaccacactcgattgcggacgccggcgagctcgccggccatctcggcatccgctacgaggtgctgccgatcgcggaggccgtgaacgggttcgagaccatcctgtccgacatcttcaagaatatgccgcccgacatcaccgaggaaaacttgcaggcgcgcacccgcggtacgctgctgatggcgatcaccaacaagaccggcctgatggtggtgacgacgggcaacaagtcggagatgtcggtcggctatgccacgctttatggcgacatgaacggcggcttcaacccgatcaaggacatctacaagacgcaggtgtttcggctggcggcgctgcgcaacagctggaagccggaaggcgcgctcgggccggcgggcgaggtgattccacccgatatcatcacgcgcccaccgagtgcggagctgcgggagaaccagcgtgatgaggattcattgccgccctatgacgtgctcgacgccatccttgaacgtctggtcgaacgtgaacagccgctggatcagatcatcgccgccggcttcgatcgtggggtggttacccgcatcgaccacctgctcaacgtcgccgaatacaagcgccgccaggccgcgcccggcgtcaaggtgaccgccaggaacttcggccgcgaccgccgctatcccatcaccaaccgttttcgcgacaagggcgaggcgcttgccgcgccggacgagacgctggtctcgcgcgggagccgggcgtcgatcgacgcgttcgaggggtaggcgacggcttgaccataatggctgcgagcgagatgtgaattatcgtgcccttgcgggcgagggcagctccgcagctacagcaagctcattcgggtgagggggttgtctcccgatgctcatcgcatcggtgagcacggacagaacccctcatacggcgcttcgcgccacgttctcccacaagcggagaaggcaagagcccgacacagctcatgctgtcgagcaagacctacttctgctgctgcggcaggaaggtcgggccgaccgagcggatcggcttgttctccgaacccgacgccggcgcgccggtgtcggcgggcggcggtgcggccggcgcactcgccgtcgtcggcgcgggggttgcccccttcctggcattcgcaggcgtgcccttgttgagccgctgctgctgcatcttcctggcgctctcctcggtgacgatgatgtcgccctgctgctcggccgcggccttgtcgtcggccgatttcagcgcatccgcccaggtctgtcccgccgccttgcaggagcaggacgggttgaactcgctgcggaatttgaacgcagtcggcagcgccgtgtagggctggccaccgatggagaccgccgagttcatgtcctcgccgggattgcgatgggtgtagagcacggcttccgccgccgggcacagcgccttgcaggtcttctcgtcgtcgggaaagcgtgccggcaccgtggcaaacgagatcgggaaataggcgccgtcgcaggtccgcacgcagacggtgcggaaggtgccggattgcgggccgagatcggacggcggcatggcttgcggattgcccgcattgttgccgccgaacagattgctcaggaagttgccgccgccttgcggctgcgcggcattggcatattgcgggccgcaattgttctgcgccagtgccgtcagcaccgagcggcgctggctgtcgcgctccgggctgaagccgccgctgccggcgcgcaggcgctcgagactggcggtgatctggtccagattggcgcgcatctgctggatctgactgttgaccgggccgcactgcgccgactgaccgttgaacagggagaagaagccggaggaatcgcagcccatgcgtttggcctgcatggtgacccggtcgagctcggcctgctgcttggcctgggaatcctgatagcggcggatctgctcttcgcgggctggatcaccgccgccgcgatcgagcgcggcgagctggccttccaatcgcacgcacatcgggttcggtcccagcccgttctggccgggctgaggcggcgggccgggtggtccggcctgcgcgaaagcgccggtggcaagcacgatcgtgctcaggagcacggtgcaggcaaggaggaagcgggcacgggagagagacaagaattcaggcatatccgccattctagcgaggtcacggcccaatgtgactttccacgtgactctgaggggcccaagcgcgtcctcccatagccgcttcctgcggcatcgtcacgtcgtttcaagggccaaagatggggcctaaggtccgccagctccgcgcgaattcagcgctggcaagtgattgcgacatattcgtcgcaatggccatgggagcagtttgcgccggatttggggacggagccggtaatttcgtcgggatcgacccggcggtagcttgatgcctgggcaaaatctcgtgattggcaataggtgcgggcggcggatgcgccgcacttgtcgcccttggcgaggcactggtcgaaccggtcggcgatgatgaagaggcgggtctcggcggaagcgcaggagatcgcaaggacggaagcgctgaaaatgagcgcgagcagggatcgcatgaaaataccggggcaaaaacgaaggaactgcgggttccagaatggcctcaaatggttaggggatcatgaaccatcggggtgggtccgcgctttgcggagccaaaagcggcattttcgcggctcttgacgccggggccggtggtggcccatatgtgacgcatgcacggtctcctcgccatttgcgccatttgccgcgagattacgagctagcgattcgctggctggagccgtcttttctcaatcacactgagagccctggacgcccggccgagagggatgggttgtcatggaattgcgtctttacgatacgctgagccgggaaaagcgcaccttcctgccgctcgatgcgaacaacgtccgcatgtatgtctgcggaccgaccgtctatgacttcgcccatatcggcaacgcgcggccggtgatcgtgttcgacgtgctgtttcgcctgctgcgccacatttacggcgaagcgcatgtcaaatatgtccgcaacatcaccgacgtcgatgacaagatcaacgaccgcgcggcgcgcgatttccccggcctgccgctgaacgaggccattcgcaaggtcaccgagcagaccggaaggcagtttcacgctgacgtcgatgcgctcggctgcttgcggccgaccgtcgagccccgtgcgaccgagcatatcggcgagatgcgcgagatcatcgagaggctgatcgccggcggctttgcctacgtcgccgaggaccacgtgctgttctcgccgcaggcgatgaacgcggcgaattcctcgctgccgcgctatggcgcgctgtcgaagcgttcgctcgacgagatgatcgcaggcgcccgtgtcgacgtcgcgccttacaagcgggatgcgaccgacttcgtgctgtggaagccgtcgaaaccgggcgagccgtcatggccgtcgccggccggcatcaaggccgagggccgtccgggctggcatgtcgagtgctcggccatggcctggaagcatctcggcgagcatttcgacatccatggcggcggcatcgatctcgtgttcccgcatcacgagaacgaggtcgcgcagagttgctgcgccttccaccgggagcgcatggccaattactggatgcataacggcttcctgcaggtcgagagcgagaagatgtcgaagtcgctcggcaacttcatcaccatccatgagctgctcgcggactggccgggcgaggtgcttcggctgaacatgctcaagacgcactaccgctcgccgatcgactggaccatgaagtcgctggaggagagcgccaagacgctcgacgactggtaccgcctcgcagccgacgccgcgcccgggaaacccgcagcttccgtgatcgagccgctgctcgatgacctcaatacgccgctggcgatcgcggcgctgcacggcctgcgcggcaacgacgtgagcgcgttggctggctcgttgcggctgcttggcttcctctccgaaagcgcggcgcagtgggaaggacgaaagcagcaggcgagcggggtcgatgccaacgaggtcgagcgcttgattgcggagcggacggctgcccgcagccgcaaggattttggcgagtccgaccgtattcgcgatctgctcgccgcgatgggcgttgcgatcaaggactcaaaggaaggtacgacatgggagatcgcacgatgaagcggcccgatacgcctttcccgcggcactggctctattacatcgcgctgaagatcgcgctgctggccggcgccgtggcgctggtgctcaagctctacggaatgtggtgaacacgatggcacaagcgcatcccaagcccggcttgcggcccttcctgcctgctgacgtgccggtgcttgccgcgatcttcgccgccagcatcgcggaattgaccggcgatgactacagcgaggcgcagcaggaagcctggatggcggcggccgaggacgaggagtttgggaagcggcttgcggccgacctcacgctgatcgcgacgctcgagggctcgcccgtcggcttcgcctcgctgcgcggcaacgatcacattcacatgctctatgtgcatccggccgtggccgggcagggcatcgcgaccatgctggtcgacgcgctggagaagcttgcgggcggccgcggcgcgcaaagcctttcggtcgatgccagcgacaccgcgcagggcttcttcgccaagcgaggctacactgcccagcagcgcaacagcgtcaccatcaacgacgagtggctcgccaacaccacgatgaagaaggcgctcggagcggggcaatgagcaaggagcggctctacctgttcgacaccacgctgcgcgacggggcgcagaccaacggcgtcgatttcacgctggccgacaagcaggtcatcgcggcgatgctcgacgatctcggcatcgactatgtcgagggcggctatcccggcgccaatccgctggacagcaaattcttcgcgaccaagccgaagctcaatcatgcgcgctttgccgcgttcggcatgacgcggcgggcagggcgctccgtctccaacgaccccggtgtcgccggcctcctggaggccaaggcggatgcgatctgcttcgtggcgaagtcgtcggcctatcaggttcgcgtcgcgctggagacgacgaaagaggagaacctcgcctcgatccgcgacagcgtcgcggccgcgaaggccgccggccgcgaggtgatgctcgactgcgagcactttttcgacggctacaaggaagacccgggattcgcgctggcctgcgccaaagcggcctatgaggctggtgcgcgctgggtggtgctctgcgacaccaatggcggcaccatgcctgatgaggtcgaggccatcgtcagagaggtgacgacgcacatcccgggggatcatgtcggcatccacgcccataacgacacggagcaggcggtagccaactcgctcgccgcggtgcgcgccggcgcgcggcagatccagggcaccctcaacggtctcggcgagcgctgcggcaacgccaatctctgctcgctgatcccgacgctgaagctcaagaagggttttgccgaatccttcgagatcggcgtcacgacggagaagctggcgaccctcgtaaaagtctcgcgcacgctcgacgacatgctcaaccgcgcgccgaaccggcatgctccttacgtcggcgagagcgccttcgtcaccaagaccggcatccacgcctccgccgtgctgaaggatccgcagacctacgagcacgtgctgccggaactcgtcggcaatcatcgcaaggtgctggtgtccgatcaggccggccgctccaacgtcatcgccgagctcgatcgtgccggcattgcttacgacaagagcgatcccaagctgacgcgcctcgtcgaggaattgaaggagcgcgaggcacaaggctacgcctatgagtcggccaacgcttcgttcgagctgctggcgcgccgcacgctcggcaaggtaccgcaatatttcgaggtcgagcaattcgacgtcaacgtcgagcagcgctacaacgcgctgggagagcgggtcaccgttgcgctcgcggtcgtcaaggtcgacgtcgcaggcgagcatctgatctcggccgccgaaggcaatggccccgtcaacgcgctggacgtcgccctgcgcaaggacctcggcaagtaccagaaatacatcgagggcctgaggctgatcgactatcgcgtgcgtatcctcaacggcggcaccggtgcggtcacgcgcgtgctgatcgagagcgaggacgagaacggcgaccgctggaccacagtgggcgtgtccccgaacatcatcgacgcctccttccaggcgctgatggattcggtgatctacaaactggtgaagtcgggggcgccggcgtaagtatagcgggggcattccggggcggtccgcaggaccgaaccatggtgcgcagttgcgcacctgagaatctcgaaattccgggttcacgcttcgcgtgccacggaatgacggcgggggagggagcacggccatgatcgaccacatctccgtaggtgtcagcgatctcgatcgcgccgcgaaattctacgaggcgacgctcgccgcgctgggcctttcgcgcctcgtgacgcggccgcggacgatcgggttcggcaagacctatccggagttctggatcaacttgcgcgaaggcatggcgcgtgtcgcgccggagagcggcgtgcacatctgcctgcgggcgaagacgaccagcgaagtggatgcgtttcacgcagcggcgttgtccgcgggcggcgcctccgatggctcgcccggcgtccgcccccacgaccgcgtgcgttactacgcggccttcgtcctcgatcccgatggcaaccgcatcgaagcggtgacttttccgcaggaatagcaggcgagctacagccgccgcgccacgtcgggtgcgagatcctgctcgctgtcgggaatctgtgcagccgcggcgcgcagccgcggaatgatctcctcgatcttgtccgccttcaggatatcgacggacaggccggcccggatgaactgggtttcgcgcatgtgcgcgaccagggagaataacggctcccagaagccgtcgacattggcgagcagcacgggcttggcgtgacggccgagctgctgccaggtcagctgctcgaccagctcctccagcgtgccgagcccgccgggcaaagcgacgaaggcatccgagcgctcgaacatcaaccgcttgcgttcgtgcatgtcgggcgtgacgaccatttcctgcacgcgagtcagcgcgttctcccgcatccgcagaaagtcgggaatgatgccggtaacggtgccgccgtgatccagcacggaggttgcgaccgcacccatcaggcccagcgagccgccgccataaacgaggcggatcttgctttccgccagcgctttgccgagcgccttcgccgcttcgatgaagttgggattggttccagggccggagccgcaatagacgcagacggttttgatcgtgctcattgataccatgatgcattgcagcgaagaggcgtcaagcccaatcggtgattcgatactcccggaaacctaccggtaaatgacgatgaacaatcgagaattcgccatctggcggggtgcgttggcatcaggaaggctctatatgacggacgaaaatcgcaaatcgcagttgcgcccgcacccggcgggctgtcaggcatcttgatggaccaacctcaatcgttcgacggcgccaacgttcctgatcctcctgccggaggaccgcaggccggaggcacgctaatgggcacgctggcgcatctgtggccctatatctggccgggcgatcgcgtcgatctgaagatgcgggtggtctggtcgctggtgctgctgctcgccgccaagctgatcacgctcgcggtgccattcagcttcaagtgggcgacggatgcgctgaccggcgccaataccgcgccggtcgcggccgacaactggcatctctgggtgattgcctcgccgctgctgctcaccgcgagctacggcgtgatgcgcatcctgatggccgtgctgacgcaatggcgcgacggcatcttcgcccgtgtcgccatgcatgctgtgcgcaagcttgcgaccctcaccttcatccacatgcacgagctgtcgctgcgcttccacctcgaacgcaagaccggcggcctgacgcgcgtgctggagcgcggccgcgagggcatcgaggtcatcgtgcgcatggtgatcctgcaactgatcccgaccatcgtcgaggtctcgctgctgctggccgtgctgctctggcaattcgactggcgttacgtggtcgccacgctgatcacggtcacgctctatatgtactacacctacatcgcgaccgagtggcggatcggcatccgccgcaagatgaacgattccgacaccgaggcgaacaccaaggcgatcgactcgctgctcaactacgagaccgtgaagtatttcagcgccgaggcgcgcgaggcgcaacgctatgacaaatcggtcgagcgctacgaagaggcgagcgtccgcacctatacttcgctcgcggtgctcaataccgggcaggcagtgatcttcacgctgggcctgaccgcgaccatgctgatgtgcgcgatgggcgtgcgcaatggtaccaacacggtcggcgatttcgtgctggtcaacgccatgatgatccagctctaccagcccctcaacttcatgggcatggtctatcgcgagatcaagcaggcgatcatcgacatcgagaagatgttcagtgtgctggggcgcgaggccgagatcaaggatgcgcctgacgcgaagccgctggtcatctccgccggcacggtgcgcttcgaggacgtgcgctttgcctatgagccgtcgcggccgatcctgaaagggatcagcttcgaggtgccggccggcaagacgatcgcgatcgtcggcccgtccggtgcgggcaagtcgacgatctcgcgcctcctgttccggctgtatgacgtctccggcggcaagatcctgattgacggccaggacatccgcgacgtcacgcaggcgagcctgcgcgcatcgatcggcatggtgccgcaggacaccgtgctgttcaacgacaccatccgctacaacatccgctacggtcgctgggacgccagcgatgccgaagtcgaggaagcggcgcggctggcgcagatcgatcatttcatccgcatggcgccgaagggttacgagacccaggtgggcgagcgcggcctgaagctgtcaggcggcgagaagcagcgcgtcgcgatcgcgcgcacggtgctcaaggcgccgccgatcctggtgctggacgaggcgacatcggcgctcgacacccacaccgagcacgagatccagggtgcgctcgaccgcgtggcaaagaaccgcacctcgctggtgatcgcgcaccgtctttcgaccatcgtcggcgccgacgagatcatcgtgttggatcagggacgcatcgccgagcgcggcacccacgcgaagctgctggcgcagggcggtctctatgcgagcatgtggaacaggcagcgcgaggccgaggcggcgcgcgagaagctggccaggatggctgacagcagcgaggcacccaaccggcagccgccgccggtcgatgatgtcctgacgaggcctgcggcggtggagtgatcttgtctcgggtcccaagtctggcctaaacaagcgcgcgcgacgacccgccattaaactccgaccggcagatagcgatgtccattctcgattcgatccagcgtcagatcccgccgatccacaaggagggctatcccttcatcggtggctttgcgctggcaagcctgctcctgttctggctgtggtcgccattggggtggatcggcacgatcctcaccgtttggtgcgcgctgttcttccgcgaccccgtccgcgtgacacccgtccgtgaagggctggttgtttcgcccgccgacggccgcgtctcgatgatcaccatggcgctgccgccggccgaactcggcctcggcgaccggccgttgccgcgcatttcggtgttcatgagcgtgttcaattgccacgtcaatcgcgcgcccgtagctggcagggtggaccgcatcgcgtaccgtccgggtctcttcatcaacgccgagctcgacaaggcgagcgaggataatgagcgcaactcgctggtgatcacgacgccgacggcgcggatcggcgttgtccagatcgccggcctcgtcgccaagcgcatcgtctgcttcgtcaaggagggacagtcgatcggcgccggcgagcgcttcggcctgatccgcttcggctcgcgcctcgacgtctatttgcccgtgggcaccaaggcgctggtctcggaagggcagaccgcgattgccggagagacgatcctggccgaccttgccggcgacgacccgagccgggtctaccgcaccaattgaccgatagtcggtgcttgcaggccttccgccgcaatggcggagggaggcgtgacttgctatatctcgctcgaggtgagcaatgacgccctatgacttcaaatatcccgatgcacgccgccggcggttccgaccgatcccggtgcggatgctggtccccaacgtcatcaccctgctggcgatttgcgccggcctgacctcgatccgcctgtcgatcgaggggcggatgtcgctcgccgtctacgccatcgtgttcgccgcggcgctcgacggcatcgacggccgcatcgcccgcatgatcaaggggcagtccaagttcggcgccgaactcgacagcctcgcggatttcgtcaatttcggcgtggcgcccggcctgatgctgtatttctggcagctgcacgagctcggcaatgccggctggatcgctgcgatggtattcgcaatctccggcggcctgcgtctcgcgcgcttcaacgccaccatggatgatccgaacaagccggccttcgcggccaatttctttaccggcgtgccggcgccggccggcgcaatcacggtgcttctgccgatctacatcgcgttcctcgatctcggccgcacccctgtggcggtgacggcggcctatacgcttctgatcgcctttctgatggtgtcgcgcctgccggtattctccggcaagaccaagcgcatgcgcgtgccgccggagctggtgctgcccgcgttcgtcgccgtgatcgttttcatcgcgctcctgattgcctatccctggcatgtgctgtcgattggcacggtgctttatctgctctgcctgccgctcggctacaaatcctaccgcgaccaggcgcgcgcgctgcaagccgccgcgcctgcggaaggggaagtctcgtcacctccttctgcgccgacgctgtcgaacctgtcggagccgccgcaggatgacgaccggcccggtcggctgcactgagcgttcttcgcggatatctgccatgaggcctgcctgagttgggtcggagcccgatctcggctatatcgcccgtgtgacggcggcatcgcgcaatcaatcgccgccaatctgggagagaacgccgtgactgataccgcgaccgggccgctgcccgcttccgtcctcgaggcactgggccgctacgatacgccgacgatctgcaatgccatggagatcgtggcgcccgagcgacggttgatcggctacaccaccaagcaactggtctgtccgttccccgatttgccgccgatcgtcggatatgcccgcacggtgaccatccgttcggtgttgaaatcctcgcttcccgccgaggagcagtccaagcgccgcatccagtattacgagtatgtcggcaccgggcacggtccgcgcatctcggtgatccaggacatcgacggtcctgatgtcggctatggcgcgttctggggcgaggtgcagagcaacgtgcacaaggcgctcggctgcctcggcgtcatcaccgacggctcgatccgagacatcccgcaatgggcgcccggcttccaggcactggccggctcgatcggcccgtcgcacgcctgggtgcatgccgagaattttggcggggaggtgcgcgttgccggcatgaccgtgaggtcggacgacctgatccatgccgaccagcacggcgccatcgtgatcccgctcgaggtcgcggcaaagctgcccgaggctgccgagctctgcggccgccgtgaaacgccgatcctggagattgcccgcagccccgacttctctctggagaagctgaaggccgcgctgaagcgctcggcggagatccattgaagcgtgatgagatcaggatcgatcgggtgtgtcggaacggaaaccgctgcacattctttcagatcaggctccaggcagggacgacctacggccgcgacgccggccgcgggtcgccttgttccgtcagaaacaggaccgcctggtccggctcgccgaacatcgctgcggcgcatccaatcagggtgaacccgccggcgaggtccaacagggtgatgctgtccgcattgtccgggatgggaatcaggcgcgccaagatcacggcgaaagccgcctctgcaaagagcacgaggctgaagaccggcaggacgagctccggttcgagcaggtgaagtgccagcaccgccggcagcgcagtaagaacactgaacagcgtcaacatcgcgacggctccggcgatccagcatgcgaccggccttcagaatagcaattcatcccccgttccggatgtggcgcagggccgcagccgaaccgtgggccgacgctatctgcatggttagcgaagtgttgagattcctgtcgctggacggcaattgcggtgttcgcagcggcggatgccgcgctgtccggacttaacctttacgcggctttaagggcggggctctagggtcctgcgatgcggttcgggttgggccgcgtcagcggccaggacagccgttgttgcgtacgtgttggagtcagtaatggatatcgcaacacttgtcggcttggtggcgggcgccactttggtgtcgaccctgatcttgatgggcggcagcttcgggatgttttacgacatccacgccgtcatcgtcatcttcggcggctcgttcgccgcaacaatgatccgctttccactgtctgcgatgatccacggcgtgccgctcggcgcgaagtttgcctttaccctgagccgcctttcggcccacgacctcgtcgacgagctcgcccgcatcgccgaaatcgcccgcaagcagggcccggtcggactggaaaaggtcgagacggacgagccgttcctcgccaagggcatccgctacgtcgccgacggctacgatctcgatttcattcgcgacaatctggagcgcgaccgcgacaacttcctgatgcacctcgacgaaggcagcaagatctatcgcgccgtcggtgactgcgctccggcgttcggcatgatcggcacgctgcttggcatggtgcagatgttctccaacatgtcggatccttccaagctcggtccgttcatggccaccgcgttgctggcgacgctctacggcgccgtcgtcgccaacctgatctgcttgccgatcgcagacaagctgcacggcaagctgctggacgaagagacgaaccgcaccctgatcatcgacggcatcctgatgatccgcgactccaagagcccaacgctcgtgcgcgaaatgctgctggcctatctgccggagaagcatcgtcacaccgaaggcgagccggtgccggcttgaggccgccgccgggatttgagagatggccaagaaaaagcgcggcgatgctcacggcggcggccacggctggttcgtaaccttcgccgacctgatggcgctgctgctggcgttcttcgtgatgctggtcgcgttctcgacacaggatgccaacaagctcaagatcgtcgcgggctcgatgcgcgaggcgttcggcgtgcagaccgaagcgcgctactcgggcatcgtcgaatccgacggcctgccgacgcgtccgcggctcaagaacgtcgaccacatccagcccgaagattcgtccaacacgccgacgccggatcaggaggatcgcgagaagacctccggcgccaagatcaaggtcgaccgcaatttcgccctggccgcagcctcgctgcgccaggcgttgcaggacatgccggagctgaccgagatgtccaagcacatcatgttcgaggaaaccaagcagggcctcaatctcgagatcgtcgaccaggacggccgctcgatgttcgccgacggctccaaggtgccttacgaccgcacgcggcgcctggtcgagaagctagcgatcccactcaaggccaccccgctgcgggtttccatcaccggccacaccgcggccggattcgtgccgacccgcagcgactacggcgccttcgacctgtcggcagaccgcgccaacgccgtgcgacagatcctcgaacgcgaaggcctgccgccgtcgcacatcttcgccgtctcgggcaaggcggatacgcagccgctgtttccggacgatccctcgctcgctgccaaccgtcgggtgaccatcaccctgatgcgtgaagatccgccgctgccgcccaatctgaagccgtgaccctcttgcactacgattatacctgagacatgtcgtcgcgcgggcgacaagcgtggccgcaccgtcacagcatccgtctcaaggcctgctaaggtggggggccgattgacacgcgcgcgggaagcgtcaaaaggcgccggatcaattcagggacggaagcgtttttcacccccatgacggcgagcatcacatcgaccgagacccaggacgggcaaccggtcaaaacaggcttttgggcccttacgctcgggagcatcggcgtcgtcttcggggatatcggcacctcgccgctctatgcattccacgaggcggtcaagggcgcggcccatggcgagccggtgtcgcgggtcatcgtgctgggcgtgctctcgctgattctgtgggcgctgctgatcgtcgtcaccgccaaatacgtgctgctgctgctgcgcgccgacaataacggggagggcggcacgctgtcgctgatggcgctcggccagcgcgcgctcgggcgacgaagctgggttctgctcgcgctcggtgtggtcggcgcttccatgttcatcggcgattccatgatcacgccggcgatctcggtgctgtcggcagtgcagggcctcaagctggcaacgcccgcgctcgagcactatgtggtgccgctgaccgtcctcatcctggtgctgctgttcgcggtccagagcaagggaaccgccctggtcgcatcggccttcgggccggtgatggtcgtctggttcgccgtgattgcggtgatgggggcagtgcacattgccgacgaccccaccgtgctcgcggcaatcaatccctattacgcggtgcaattcgtgctgtcgcacggcatcatcggcctcgtcacgcttggcgccgtgtttctggcggtgaccggcggcgaggcgctttatgccgatctcggccatttcgggcgcaagccgatccagtcggcgtggatgttcttcgtgctgccggccctcttgatcaactatttcgggcagggggcgctcgtgctgtccgatcccagcgcgatcgaacattccttctaccgcatggtgcccgacagcctggtgctgccgctggtcggacttgcgacggcggcaaccgtgatcgcgagccaagcggtgatcacgggcgcctattcgctggtctatcaggccgtgcagctcggtctcttgccgcgtttcgaggtgcgttacacctccgaatcccacgccggccagatctatctgccccgcgtcaaccgcctgttgctgatcggcgtgatgctgctggtgctgctgttccacacccccagcaatctggcctcggcctacggcattgccgtctccaccaccatggtcgtcgacggcatcatgggtttcgtcgtgatctggaagctgtggaactggcgcgcggcaacggccgcagccgtgatcgtgcccttcgtgatcgtcgatttgagcttcttcagcgccaacctgctcaagctgctcgacggcgcctgggtgccgctgctgttcggcgtcgtcatggcagggacgatctggacttggcgcaaggggtccggaatcctgatccagaagacgcgacggatcgaggtgccgctggacgatctggtcggcagcctggagaagcggccgccgcatatcgtcaagggcacggcggtgttcctgaccagcgatcccgccttcgtaccgaccgcgcttctgcacaatctcaagcacaacaaggtgctgcacgagcacaacgtgatcctgaccatcgagaccgcgcacacgccgagggtcgatctgtcggagcggttccggatggagaagatcagcgacaagttctccaaggtccgtctgcgcttcggctatatggagcagccgaacgtgcccaaggcgcttgcgatcgcgcgcaagcagggctggcaattcgacatcatgtcgacatccttcttcgtgtcgcgaaggtcgctgaaggcatcggcgcagtcgggcatgccgctgtggcaggaccatttgttcatcgcgctgagccggtccgccaacgatgccaccgactacttccagattcccaccgggcgggtggttgaagtcggaacccaggtcaccatctaagtgcatcggcaaagccatgcatatctgcatggctccggcccgcaaacaggctaggccatgccgctggcgcaagactataagccgcgcgctcttccgccgttgtgccgtgaagcattttgaggccactgggctctcccatgacaaccgacgtagcagcagttcctgccccggaaacggcggtggccaatgggcatggcgaggcccacacaacggcccgtttcggtgcactgaccctcggcagcatcggcgtcgtctatggcgacatcggcaccagcccgctctacgcgttccgcgaggccgtgatggcggcctcgggtgcggagggattgccgacgccggcagccgtgctcggtgtgctctccctgatcctatgggcgctcatcatcgtggtgacgctcaaatacgtcgtgatccttctccgggccgacaacaacggtgagggcggcaccctggcgctgatggcgctggcccaacgggcggttggcaccggcgggggaaccatcgtcctgctcggcatcatttccggagccctgttctatggcgatgccgtgatcacgccggccctgtcggtgctgtccgcaatcgagggcatgaaggacgtcaccctgacattcgagccctatatcgttccgctgaccatcgtgatcctcgtctgtctgttcgctgtgcagtcccgcggcacggcgcgcgtcgcagcgttctttggcccgatcatgtgcgtgtggttcgcagtcatcgcggcagcggcggtccatccgatcatccagcagccgcaggtgctgcttgcgctcaacccgctccatgcggtgtccttcatgctgcaccatggcatcatcggcttcgtgaccctgggcgccgtgttcctggcagtcaccggcgccgaggcgctctatgccgacctcggccatttcggcaagcggccgatccagtttgcctggctctccatcgtgctgccgtcgctggcgctcaactatctagggcaaggggcgcttgtcctcagcgaccccggcgcgatcgtgagcccgttcttccagctctttccgcaaggctttttccgcggcagcatggtcgtgctggccatcgccgccacggtcatcgcgagccaggccgtcatcaccggcgcctattcgctgacgcggcaggcgatccagctcggcctattgccgcgcttcgaaattcgccatacgtcggaagctcattccggccagatcttcatcccccgcatcaaccagttgctgctcgtcgcagtggtgctgctggtgctcttgttccgctcgtccagcgccctggcttccgcctacggcatctcggtcaccggcaccatggtggtcacggcaatgatgggcttcgtcgtgatctggaagggctggcgatggccgccgctcgccgccggggtgctgatcgcaccgttcttgttcctggatctgaccttcctgaccgcgaacctcctgaaggtgttcgagggcggctggatgccgctggcgctcggcgcgctcatggtcatcctgatgtatacgtggcggcgcggcagccgtctgctgttcgagaagtcgcgcaagctcgaattcccgctcgcggacctcgtggccatgctggagaaacggccgccgcaacgagtcccaggcaccgcggtgttcctgacctcggacccgctcagcgcgccgaccgcgctgatgcatagcttgaagcactacaaggtgctccacgagaagaatgtcattcttaccatcgagaccgcgcagaccccgcggatcgatccggccgaccgcgtgaggctggagcagatctcgccgaccttctccaaggtgacgctgaagttcggcttcatggaatcgcccaacgtgccgaaggcgctcgcgatcgcccgcaagctgggctggcagttcgacatcatgtcgacctccttcttcctgtcacgcagagcgctcaagcccgcggcccattccgacatgccgcgctggcaggaccggctgttcatctcgctgagccgctccgccaacgacgccaccgattattttcagatcccgagcggccgcgtcgtggaggtcggtacgcaggtggcgatctagggcccggattcaaagcggacttcaagtcgctgcgatttagctttaacttgcgccgcgcggctcaagcctttgtagcgcttgattttcgtctcccgagaggcgaggttgccgccagccgggatcgccccggtgcgcggccgcgacgttggaggatgatgtggcaaatcaagtgcaggatctgaccccggacgaggtctccaaaggtgtcgcggaaggacgctatctgctcgtcgacgttcgcgagccgaacgaggttcaggccgaggcctatcctttcggcgtcgtggtgccgctctcgaccttcgatcccaaggccatccccgatcccgcaggcaaggaggtcgtgttcgcctgccgttcgggcaagcgctcggtgacggcctcgctggcggcgcaggcggcgggcctgccttacgacaggcatctggccggcggcatgctggcctggaaggcggccggactcccgaccaggctcggcggctgatcggcccgatgtccaaaagctcgtccctgaacaaggtcttcgccgatcttcccgtcaccatcttcgaggcgatgtcgcaggccgcgcgcgacaacgaggccatcaatctcggccagggctttcccgacgatcccggccccgaggacattcgccgcgccgcagccgaggcctcgctgaacggctacaaccagtacccgtcgatgatgggtctgccggagctgcgccaggcgatcgcgacccattatggccactggcacggcctcaagctcgacccgatgagcgaggtcatggtgacctccggcggcaccgaggcattgacctcggcgatcctcgcggtggtgcagcccggcgacgaggtggtctgcttccagccggtctatgattcctatttgccgatcatccgccaggccggcggcattccgcgcctcgtccggctcgagccgccgcactggcgcctgaacgaggacatgctgaagagcgtgttcaattcaaagaccaaggcggtcctgttcaacaacccgctgaaccctagcgcggtggtctatccgcgcgaggacctcgagctgctggcgcgctactgccaggagttcgacgtgatcgcgatctgcgacgaggtgtgggagcacgtcaccttcgacgagcacaagcatatcccgctgatcaccatccccggcatgcgcgagcgcaccatcaaggtcggctcggccggcaagatcttctcgctgacggggtggaagatcggcttcgtctgcgccgcgccgccgctgctccgcgtcgccgccaaggtgcaccagttcctgaccttcaccaccgcgccgaacctgcaagtggccgtcgcctacggcctcggcaaatccgacgactatttcctgtcgatgcgcaaggatctgacccggagcagggaccgcctgaccaagggcctcgagagcctcggcttccccgtgctgaagtcgcagggcacgtacttcctcaccgtcgacctgtcgccgctagggctcaacgagagcgacaccgagttctgctggcggatcgtgaaggattacaaggtcgcggcgatcccggtctcggcattctacgagcaggacccggtgacctcagtggtgcgcttctgttttgccaagaaggaccagacgctcgataccgcgctggagcggctctcggatgcggtgcgcgggcgcaagaggtaggaacgagatgacgaaggtcggccgctcggggtttcgcctcggtctcgcaatcaccgcggcggtgtcgttcctttcccaggcggccgccgccgaggagcgcgtcgtcaacttctacaactggtccaattacatagcgcctggcgtcctcgaagccttcaccaaggagaccggcatcaaggtggtctatgacaccttcgatgccaacgagacgctggagacgcgcctgatggccggcaagtccggctatgatgtggtggtgcccaccgcctatttcctgcagcgccagatcaaggccaacatcttccagaagctcgacaagtcgaaactgccgaacctcgccaatgcctggccgatggtgaccaagcaccttgcgacctacgaccccggcaacgtctacgccgccaactacatgtggggcacgaccggcatcggttacaatgtcgccaaggtgaagcagatcctcgggcccgacgccaagatcgacagctgggacatcgtcttcaagccggagaacctggcaaaattcaaagattgcggcgtgcacttgctggactccgccgacgacatctttccggcggcgctgaactggctcgggctcgatccgaactcgaccaagcaggccgacctcgagaaagcagcggaggccgtggcaaaagtccggccctccgtacgcaagtttcactcgtccgaatatctgagcgcactcgccaccggcgagatctgcttcgtggtcggctggtccggcgacatcatgcaggcacgcgcccgcgcagccgaagccaagaacagcagcggcgtcgagatcggctacgccatcccgaaggaaggcgcgcagatgttcttcgacaatctcgcgatccccgccgatgccaagaacgtcaatgaagcatacgagctgatcaactatctctaccgccccgaggtcgcggcgaagaacgccgacttcctgtcctacgccagcggcaatctcgccagccagaagctggtcgatccgaagatcctgaacgacaagaacatctatccggacgaggcgacgctctcgaagttgttcgtcatcaccgcgcgcgagccggccacgcagaggatcatcaaccggctctggaccaaggtgaagacggggcgctgagctggattgccgtcatagcgagcgaaaactctggattgcttcgtggcttcgctgctcgcgacggcgacgtaactaacgccaccttcgatgcagccaaagccactgctcgggatgctcgcgcacccagctttccaccacgctggtgatcgcctgcgtcgtgccttggatgtcgatcctgccctccgcatcgcgcaccggcttgacctcttcggtcagttcgccgcggaaacggccaccgggcaggcggatgatgcggacgccgtggatcgggcattcgacctggcggagcaggcgcgccagcatcggattggcgcgggtcttgcggccgaagaatgtgacctcgacgccgccggtgagatactggtcgatcagcatcgcgacgtgcttgccgtccttcagcgcctgggcgagccggagcggggcgtcacggcccgccgggatcagcgtgcccatgttgacctgtcgcatctcctggatgatgcggtcggccgaggcgatgttcgggcggcgatagaggatcgcggtctccagtccatgcgcgacggcggcgagcgccggcaattcccaattggcgagatgcgcagcgaagatcagcgccggcttgccgtcatcgcggatccggtcgaacagctcgatgctgcgcggcgacaattcgatccggctgttctcgggatggtcgcggtcgtagtcccagaccttgtccatatgggcgaattcggcgccgacgcggccgagattgtcccacacgcccatcaggatctgctcgatctcctccggcgatttctccggaaaggcagcggcgagattggcgcggccgatccgatgctcgcgcaggcgcgggccgatcgtcttcacgacgcgcgcgaagaagtcggaggtcttgaccggatcgaaatagcgcgtggtgcgcagcaggccgacggtcgcggcgccaatcaggcttccgccgagcgatttggcagcctcgcgcgcgcgggccttcgtgctcgcagtcagcagcgccatgcgtccggtcaggccggttcgcgggtcaggatcagcgaagcgttctggccgccgaaaccgaacgagttcgacatcaccgcggtgacgcgggcatcgcgcgccttgttgccgacgacgtcgaacaggatcgtcgggtccggggtgtcgtagttgatcgtcggcggaatgcgctgatgctcgagcgtgagcagcgagaagatcgcctcgactgcgccggcggccgagatggtgtggccgaccatggatttgttcgacgtgaccggaatcttccgcagaagctcgccgaacacggccgatgtcgtgttgtactccatcttgtcgttctcgggcgtcgcggtgccgtgcgcgttgatgtgatcgatctggtccggcgtcatgccggcgtcggccagcgtcttgttcatgcagccgatgatcggcttgccgtcaggcgaggagcgggtgcggtggaaggaatcggtgagctcgccgcaaccggcgatcacgccgaggatctttgcgccgcgtgcagtcgccgcctcatagctttcgagcaccagcgcgccggcgccctcggccatgacgaagccgtcgcggttcttcgagaaggggcgggaggccgcctgcggcggatcgttctgggtcgacagggccgagagcagagagaagcgcaccatggcctcgggattgaccgtgccgtcggtcgcgacgcacagcgcggcatcggtctctccgcggcggatcgcttcgacgccgagctggatcgaggtggctccggacgcgcaggccgtcgacagcgagatcggggagcccttggtgccgaaggtctcggcgaggtaggcggcgaccgagccgaacatgaagcgatgatgataggcgctgtacttgccgccgccggaaatgcggagcagatcatcataggtgatgtcctgctggccgactgcgcgaccaagctcgcgacgctgcggccattcgacctcgaccggcgcaaccgcgaggaagaggggacccgggaagtcggccttggcgccgatgccggactgctccaaggcttcctgcgtcaccaactcggccatccgctcggacagggcggtcgaggagaacggatcgacgctgacgaaatcgaccgtgccggccatggtggtcttcaggccgtcgaccggaaaacgcgtgatggtgcggatgccggattcgccggcgacgagcttcgcccaattgtcggccttgccggcgccgagcgaggtcatgatgcccatgccggtgacgacgacgacgggacgcccgagtttgtcgcgtggtgcagtcatgtcgatccccgcttgagctagctaaactgcctcgaccagcgccatgccttcgccgcgccaatgtccggcccccaccacgacaatctgggtgggtgcgccctgcatttcaatctcggtccccgtggaatcatgcggcgggaacagcgcgccgcgcgagatggacagtgcggccagcgcgatgccgagcgggaattgcgtctccatggcgtggccgaacatcgtgccggtcgagcgcaccgggaactcggcatggttcttcaggaaattgcgctcttccgaggtcgcgggctcggcaccggtcgcgccggatatgatcgcgcccttgccatcgcgcttcggcaactgggtccacagcttctccagggtcgcagccatgtcgccgggctgcttgcgcttggcgaggtcggcgaccacgctcgacagctttgcgaacggcttcgcgccgcgcgcttccgcatgcgccttcgattccagcaccaggaaagcgccggccgagccgagcgcgaagccgggatggtccttgcgcgcccagacgggagcgaacttgtccttcaagttgaagtcgccgaattcgtagaggacgagcaggtccttgcgttcgccgttgtgcgagccgccgaccagcgcgatgtcgctttcgcccgaggcgatgcgcgcgagcgcaatgcgcgcggcatcggcgccggcgacctcttcacccatgaaggtgcgcgaggtacctcccaagccgtgcacgatggcgatgttgccggcgagcaggttggagagctgggccaggaacagcgtcggcctgagatcgctcatcagccgctcgttcaggaagcccggcgcgttggcgcccttggcctcggcggtgagaatgccggtgtcgacgttgagatcgcgctctccgccgccggcggcgaccaccatgtcgatcttcgacaggatatccttgttgcccttgatgccggcggaatcgagtgcaagaccggcggcataggtgccgatgcgctgccaggcctccatctggcgctggtcgcccttcttgggaatctggctgtcgaagctgaccggcatcagcggatgcacgatgtagggggcaaagcccttctcgtcgacattgatgcgcttctcctgaagcgcggcccagttggcatccaggccctcgccaagcgaggtggcgagcccaatgcccgtgatccagacttcggtctggcccggcttcgaaacggaagtgtcagtcatggcgatacggcctgttgcggaaacccgacgcgcttggcgatcgcgtccatgtgggagcgcatgtccgcattggggaagggaatcagcgtgaaggtgagcgccgaattcgcgcgcagcttgccgccaaccttgatcttggcctcggtcatggcatagccggagccttcgtgggtgaggctcgcctcgatgctcatgagatcgccggggaacaccgagccgcgcaccttggcctccttcacggcagccaggatcggcatacgttcgaacttgaacacgccgagctgaagccagccggaggcctgcgccatcgattcgatcagaagcacgccgggcatcaagggatagcccgggaagtgcccctcgaatacggtgctttccttcgggacctgggcttcgacgacgatcgtcttctcgtcgaccttgaggtcgacgatgcgatcgatcatgtggaagtattcgagttgcatgactgcgcccttaggcgctcgcacccttggccgcaaccagttcgtcgatgcgggcgcacaggttcttcaggacgaaatattgctcggtggtcgccttgccgtcgttgacctcctgggtccacttttccagcggcagcttgatgccgaactgcttgtcgatcgcgaaggcgatatcgaggaaatcgaggctgtcgatgccgaggtcatcgatggcgtggctatccggcgtgatcgtgtcgcgcgggatgtcgcaggtttcagcgatgatcgtagcgacctgatcgaatgtggaggacatcactaagcctttgatagattgtgggtatttctcagatattccagagtggcatggtgggtgggcatcgcgcccctgatgacgccctctaacccctctctggccgggtcgaaagcccgtatatcggagcgccgccctgagttcaatggagccggacaagggcggcgacagggctggggatgcctgtcggagcctcccggcgcacgaccggcggcgaccggctctagatgtgtggcgtcgtgatcttgatacagtcgcggcggcccatcagcacgcaatcctgggtccggcgcaggtcggcgatgctgaccgcgagccagatcccgatcgcggtcaaagcaatggtgaaggccagcgctgcgatgttggcaagcatgcgctggcgaaaattgtcgggttcggcgcggggctgctcatagcgcgacaagtcgagccgttcgggtgcgatgcgcagcggctgcacggtgccgctgccgcgctgggccggccgggaaggcgcggtgcgcggcctgaactggagcacccggtgctcgtcatcagagcttatgggccgctggttgttcatggggcgggatcactccgaagctccgattttgatagcataggcgacgagagcgttgcagaaaatcttctgaatgcgcgcgtgcatttgtgcagtcgcacaatttgtgaatggatggtccaaagcgtcggggaagccggtcgtcgtgcattttatcgccgctggatccgatggcatgagccgcgggaaccggaacatcagctgcaacggtgtgaggactttcgatcatgacgaacacgcgcgagccgagagtgcatccggtcccgattatgtcgctccggccgacacagatgacggtcggactgcgcgaggtcagggagaaacgcaagcgctggcgcgagcacgacaacaaggagcaggccgacctgctcggcaagcacatgattcccgtcgtcttcggtccagacaagcgctactacgtcatcgaccatcatcatctcggccgcgcgctgcacgatgaaggcgtcaaggaggtgctggtgaccatcgtcggggacctcaggatggtcgagcgcgaggctttctggggcgtgatggacaacaggcgctgggtctatccttacgacgccaagggcgagcggcggtcgttccgcgacctgcccaaatcgctcgccgatctcaaggacgatccattccgcagccttgccggcgaattgcgccgcatgggcggcttcgccaaggacactacgccgttctccgaattcctgtgggcggatttcctgcgcagaaggctgtcacgcaaggcggtcgacgctgatttcgacaaggcgctcgagatcgccatggctgcggcgaggagcaaggatgcgatctacctgcctggctggtgcggtccggaggacgaggattagggcggtggacgccctgcgacaccatccctcgcatgacatcacggtctcttgagcgaaatcatttttcatcgccatgaagcggtcctgaaacacgggccgtcccatctatggttatcgagctcatacaggaggccgaaatgcgccgtctgatttttgtcattgccgtgctcgccgtcgcctcagcaggcatctccgcctcgtttgccgcagttcaccacgcccgaacattgacatttgccgagcggtttgccccggcgctcgaggcgatggcaaagcgctagcggtacggcggcccgaacacgcttgatcttccgcaagttcgcggcggcgtcggcggctatcgtgcgcctgcatgattacggaagcagcgatacgccccgacgcgggggcgggagggctacaggtcatgctgactgggacatgaccatgagcatcatctttcgtctcctgttcatcatcgccggcgcggtcaccgcactgttcgtcgcgcgtgatgcgctgaacttcacgatcatccagaccttcgttgcgattttgctcgtgaccgctatcgtgggcgttggaagtctctggagcctgcggcggaagacgtgagtgaggtagaacgcggcagtttagccgggctgagcgaagccgaggcccggctacggctacaacaggaaggttacaacgaactgccccggtccgaacggcgcactccactgcgcatcgttctggaggtgctgcgcgaaccgatgctcgcgctccttctgtgcggcgggctggtctacctcctgctcggcgatctccgcgaggcactgcttctgctcgtgttcggggccatctccgtcgtgatcaccatcgtgcaggagacccgcaccgaacgtgtgctggaagccttgcgagagctgaccagtccgcgagcgctcgtggtcagggacggggaacgccggcggatcgcagggcgggaagtcgtccgtggcgatctcctcgtcctctccgagggcgatcgggttccggcagatgccatgcttgtcagtgcgcgagatctggctgtcgacgagtcgctgctaaccggcgagtcggtgcccgttcgcaagcagctcgccaagatgccgcccgcggaagcggcatcgaccgatcatcgcccgggcggtgacgaccagccattcgtgtattcgggctcactcgtcgtacgaggtgagggcctggccgaggtcgaggccaccgggccccgcagcgagatcgggaagatcggattgtcgctgcatggcttgcggccggagccgcctcggctgcagcagcagactgcccggctcgttcggctttgctttctcggcggcgtggcgatcagccttgccgctgtcctgctctatggaatgttgcgcggagattggctgcaggcgttgctcgggggcatcgcaatcggcatgtccatgcttcccgaggagtttgccgtcgtcctgacggtgttcatggccatgggcgcctggcgcatctccaaggcgcgcgtgctgacgcgtcgcgccgcagcgatcgaggtgcttggctcggcgacggtgctctgtaccgacaagaccggcaccttgacgcagaaccggatgtcggtcgcggagctgaggttgcgcgacggcgtaaatatgcgggctgggtcctcgcaggcggctcccgtaagaacagagtttttcgaactggcgcgttgcagcgttctggcaagctcgccggaaccgttcgatcccatggagaaggcgctgcacgcattcgtgcatgcaggtctcccgcaggacgacgaggccgcggacgctcggaccttggtacgcagctacggcctgcgccccgaactgctggcgatgacccaggtctggcgttggtcgcatcagaagggcctcgtcgcggcggcgaaaggcgcccccgaggcgatcgcgcacctctgtaagctggatggtgcggatcaggaggcgatgcgggatgcggtcgcggtgatggcgaagaatggtcttcgcgtgctcggcgtggccgccgcaacctaccacggcgaggacctgccgccgtcccaggaaggcttcgcctttcgcttcatcggtttggtggggttggccgacccgcttcgtccgggcgttcccgaggcggtgggtgaatgccgctcggccggcattcgcgtcgtcatgatcacgggcgactatccggcgaccgccatggcgatcgccgggcaggcgggactccatgtcaacgaagtcgtgactggcgagcagatcaagcttgcggacgacggcgagctcgatgcgctcgtcagaaacgtgaacgtcttcgcgcgcgtcctgccggagcaaaagctgcggatcgttcaggcgctgaagcgctgcggcgagatcgtggcgatgacgggcgacggcgtcaatgacgcgccgtccctgaaagccgcgcatatcgggatcgcgatgggcggccgcggcaccgacgtcgctcgcgaggcatcctcgatcgtcctgctcgacgacgatttcagctccatcgtcgcctctatccggctgggacgccggatctacgacaatctgcgcaaggccatggccttcattttcgccgtccacgttccgatcgccgggcttgccctgcttcccctggttttcgggctgccgctggttctcggcccggttcacatcgcctttctggagctgatcatcgaccccgtatgctcgctggtgttcgaagccgagcgggaggagcgcgacgtcatgcagcgcccgccgcgacgggccgatgcggagctgttctcgtggcccttgatcggctggagcgtcctgcagggcgccatggcgttcgccttgatcgccgcgatcttcgtcggagcgattcgttccgggcttccgcccgatgaggcgcgcacgatcgcattcatcacgctcgtcgtctgcgtgatcgcgctggtgctggtcaaccggtccttcagcgcctccttcttgtctgccttcttccgccccaacccggcgctgctgtggatatttctctcgattgcgttcgtgctcgccacggctctgttctggccgcccgcgtccggtctctttcgtttcggtcccctgcacctggtggacctgatgatcacgctcggcgcgggattgctggtgcttacggcgctcgaactgctcaagccgttgtggggccgccggcttcggttctagccgctccctcgggaatccgtctgcggcaaggtctctgtccgttgcggatcttccttgccgccgagggctcgatgcagccagcgttcgacgcggcggccgatcgtgagcagcacgaaggtaaaggcgagcgcgaccaggacgatcttccactgcccggcgccgcaggcaatgccgacacaggcggcgagaaaggtgcaggccgcgctggtgaggccccgcacccgaaagcggtcgctctcgtggacgatgacgccggcgccgagaaagccgataccggtgagaatgccctggatcacgcggctcgccgcatcggtgatcccgccgggctcggcgaacgcgaccgcgagcagcacgaccgttgcggtagagagcccgacgatgccgagcgtcttcagtccgatcggcttgccatgcaggtcgcgattgaggccgattgcgctgccggcgagcgtcgcgctgccgaggcgcagcaggatttcgggccagtccagctctgtcattgcgtgtcgatcatgtcttcggcaggcgtcccatcaggtagaactcgtcgttcggacgcatgcccgtgaaattcgccagccggttcgacagcgcgaagaaggcggagatcgcggcgatgtcccagatgtcgtcgttgctgaagccgtgcggggcgagcgctgcgaaatcgtcgtcggagatgcgctgcgcctcggtcgagactttcatcgcgaagtcgagcattgccttctgccgcggcgtgatgtcggccttgcggtagttcaccgcgacctggtccgcgatgagcgggttcttggcgcggatgcgcaggatcgcgccgtgggcgatcacgcaatactggcactggttggccgcagaggtcgccaccacgatcatctcgcgctcggccttggtgaggccgccgtccttctccatcagcgcgtcgtgataggcgaaaaaggcgcggaactcgtcgggacgataggccagtgtcaggaacacgttcggcacgaagccgctcttctcctgcacggcgagaagccgcgtgcggatgtcgtcggggagtgtatcgagggcgggtgcggggaagcgctgcggggcggtctttgtcatggcatggattccggctgggggtcggaaaccatactcgatgcggcctgcaggctcaatctggtggccgatgcaatgacggtatcggatcgaccgttgccttaccgcagcggcttcttgagcagcgagaagcggtccggatcaaggcccatcgatggctgcagcatcggggcttcgacgctggacatcgtcttcgccggcggtgccgagaacaccggatcgttcggcacgtcgcgctgcgatgtggcaccgcgccagcgctcgagcacggcgctgacgaaatgcatgtcatggccggaggtgacggagggcacgctcgagatggtggcttcgccgcgcggcaattgatgcggcggcacctccttgaagcgcaagcgcgtcggcagtgcgacgccttcgccgaaggccagcacctcgcgcgtgccgagcgagggcacgaaggagagcaggttcgcggcggcgtccgacaccgcggcgcgcagcaaggcctggtcgcgatcgttggcaaggcgcatcgtgaacagcgtgttgcactgggagatgatggtcgcgtcgagctctgccggacgctgcgtgatcaggccgagatagacgccgtatttacgtccctccttggcgatgcgcgacactgccttgcgggtcggcccgaagccgatgttgcggtcggcggaggcatagcggtgggcttcctcgcagacgaacagcagcggtgagacgccgtcgctccacaggccgaaatcgaaggccatgcggcagagcaccgagacgacggaatcgatgacttccgccgggaagccggcgagttgcatcaccgtcatcggcttgccgttcgctggcaggcggaacagatggctgatcacctcggccatggtgtcgccgccgacattggcgttgtcgaacatgaaggcgtagcgcgggtcgttgcgcacggcctcgatacgcgagatcagcttgtgatagatgatgcgcgaggagcggttctcgagcttgcccatacgctcgtcgatcagcgacagcaggtcgacgaggcgatagggcaccggcgtgtcgacggtgtagccgatctgcttgggatcgatgcgcttgagaccgatgcggtcggcgttctggtactgggtgtagacgcccttggcgagcggaatcacctcagcgaggatgtcgagctcctccggcacgccggcgcgaccgccgaacagcacgtcgacgatctcctcgaagttgaacagccagaacggcagcttcaggttccgcgggttgagaaccagcgcgcggtcgccgaagcaacggccatattcgttgtgaacgtcgagcaggaagatgcgcaggttcggccgcgccttcaggatctcgttgagcagcagcgagacgcccgtcgatttgccgacgccggtcgatcccagcaccgcaaagtgcttggacagcatttcctcgacgtcgacataggcgacgacggagcgatcctgctggaggaagccgacattgatctggtccgaccccgtcggcgcgtaaatcgtgcgcagctcctggctggtgatcaggtcgacggcgtcgccgatcgtcggatagttggtgacgccacgctggaatttggccttgtccgcggcgttgaggatctcgccgagcagatcgaccgaggcaatggcgatgtagccgtcggagctcgacaggttctcgcaggagacctcagtgatcatcgcgacgatgaccgagctggcgcaacgaatgctgacgaagcggccgacggtcgcccgaacctccgagatcggcatttggcttgccgccaataacccgacccgggcgagcgatccgcgaaccgaaatcacacgtccaaaggatgtcacgatgagtggacccagcaagagcaacgaattcgctccgactatgcgcggctgtcgctgcacaaacggttaaacgccgggcgcggcggcttcgttaaatctgcggtaattcagtcgggagctttgtggccaatgcacacttaggagcgtaagtgcccggaaattgctgcatttctcgcccgttgccccataacggtcttagggaagattttaccattcgggcaggctgcagtccgctcggaaggcgcccttgggccaccgggcgccgctcgcgcgatggtcgatttgttgacgggacctaatgatttgtacattagtacaaatcaaatcgcggtcctcggcgccgaccgggccctgcgcctcacgtccgtcaggcggatagcagccacatccctggaggaatcatgcagcccgaaccgatcctcgatctcgctaatctcggccatatggagctgttgacgcccaagcctgatgagagcctcaaattcttcgtcgacgtcatgggcatgaccgtcagcgggcaaaagggcgagtcggtttacttgcgcggctgggacgattacgaacgctattcgctcaagctcacggcttcgaagacatcgggcatgggccacatggcgctgcgcgcacgcagccagcaggcgctggagcgtcgggtcgccgcgctcaagggctctggcttcgacatcggctggatcgacggcgacatggggcaggggccaaccttccgctgccgcgatcccgacggccatatcgtcgagctctactacgagaccgaatggtatcaggcaccgccggagctcaagcccgcgctgaagaaccaggcgcagcgctttccggcccgcggcgtcaacgtccgccggctcgaccatctcaactgccttgccgtcgacatcaaggccaaccgcgagttcttcgagaactatctcggctgccggctcaccgagcaaatcgtgctcaacgacggtcgtgaagccgcgatgtggctgaccatgtcgaacaagagctacgatttcgcctattcgctcgaccattccggcgtgcccggccgcttccaccacgtcacctacgcgctcgacagccgcgaagagatcttgcgcgccgccgatatctttctcgagaacggtgtgcacatcgagaccggtccgcacaagcacgcgatccagcagaccttcttcctctatgtctacgagcccggcggcaaccgtgtcgaggtcgccaatgccggtgcgcgtctcatcctcgcgcccgactggaagccgatcgtgtggaccgaagaggagcgcaagaagggccaggcctggggactgaagacgatcgaatcctttcacacccacggcacgccgccggtggaggtggagaagcacgcctgaactaatgtgccgatgatcggaggcgcgcgatcgtctcgcgcacgttggtccacgccggtttgtcgggtgcaaactgccggcgcaggaacgtgacgagctcctccacctgcgtgtcgctcatgctgttcctgaacgccggcatgtagccgaggtcgctggagacgggctcgacaatgccgtgcaggatgacttgcacgagattgtccgccgttctgctgtgcagattgctgttgagcgcgagcgaaggcctggtgccgaacagcggcagaccgccgacttcgtggcagaccgcgcacgcaccctggtagaggcgcgcgccgggggatgcggcgacggcgacctgcgtcccgctctcgagcttcgcggcaagtgcgtcctgggtccccatggccctatcgttgaacgagttgagatagacggccatcgcacggatgtcctggtcgggcagggctttgagatccttcacgatcggcgccatggggccggccgcgacgccgtgatagcgcgaatggccggtgcgcaaataagcaaagagctcatcctcgctccacgggatcggcgcatgcgagagcgaggtcaggggcggcgcttcccagccctcggcaaaaccgccggcgagataggcctcgcgctgctcggcgccgagcgcgttgcggggcgaatggcaggcgctgcaatggccgagaccttcgatcagataagcgccgcgattccaggcttccgacttcgcgggatcgggcttgaactcgcgcgtccgatgaaacagcgcattccagcctgccagcagcggacggagattgaacgggaatttgagcgcgtttgcggggggcgtcgcgcgcaccgaaggctgagccatcaagtaggcgtagagtgcctgcatgtcggcgtcgcttgtcttcgcaaaatgcgtgtagggaaaggcgggatagagctggcgcccgtcgcgatgcaatccgtcgcgcatcgcgcgttcgaaggcgggataggaccacgcgccgatgccggtctcgacgtcgggtgtgatgttggttgcgtagatcgtgccgaagggcgtctccagtgcgcggccgccagcgttgaccgctccgccaaggctggtgtggcactccgcgcagttgccgagcgcagcaagctgctggccgcgcgcaatcgttgccgcggaatagaccgatgcatccggtcgcgagatcggtgcgatggctcgtcccggaagcagtgctgcgccaatcccgatcgcagcggtgcacagggccgcaaccgcagcgaagacgccggcgcgcttggcgaagggatttgtccagatccgagacggtggcggcgcggccggtgcgggcagggcctgcggcgtcgccggcctgtcgccatgcagccctttcaagatgcgctcgggcgtaaacggcggctcgcgaaaccgtacgccggtggcgtcgaatatcgcgttcgcgatcgccgccgcgctcggcaccgaggcggattcgccgacgccgagcggcggctggtcctgacgcggcagcatcaggacatcgatcttgggaacgtcggggaaggggatgatcggataggcaccccattcccgcgccgccaccgcgccgcgctcgaacgacacttcctccatcagcgcgcggctggtggactgaatgacattgccctggatctggtggcgcacgccgtccggattgatcatcaggccggaatcctgccccgcaacgacgcgcgtgacgctgacatcgccggtggtcttgttcaccgcgacgtcggcgacccaggccgaccacgccgcgccataaccgggaaacttgctgtgcacgtagagcgcataggcaaagccgcgcccgtgcacgacctcgccgtccttctcctcgcgtaccggacgtggtttccaccccgcacgttcggcgaccgcatggacgagatcgatcgcgcgcgggtctttgagatagcgcaggcggtattcgatcggatcgacgccggcctccgttgcggcctcgtcgatgtaggattcgtgggcgaaggtgttcggcagcgcggacacgccgcgaatccaggaggcgcgcacgatcggcggcatgtcatgggcaacgacacgcatgtgatcgtagtcgtagggtgggatcgcggtgcggtcgcccatctgaagcaccgccggttccggcgatatgcgtcccgtcagcagcagcgccaaggtcggcgcagcgtttgaggggtaacgcgtggccagatcgtaaccggcaatgccgccaccggcgtccagtccgccattgacgtcgatgagctgcgcggtgcccttgggttcccaggcgtgctcctgctcccgagtcaattgcacgcgcaccggccgtccgaccgcgcgcgatagcaacagcgcgtcggcggtgacgtcatcggcgcagttgcggccgtagcagcccgcagcctccagccggatcacctcgatctcgctctcgggccgctcgatcagaagtgcaaggtcgccgcgaagcacatgcgggttctgtgtgccggaccagacccggatattgccttcctggaaatccgcgaccgcgcaggatggaccgatcgacgcatgcatctgatacggccacacgtaagtgcgctgcatcggcttggccgcgcccgcgatcgcctggtcgacgtcgcccttgtcgatcagcgtgcgcggagtcgacggattggcgcggagcgcggtctcgacgtcggcaagatcggtcagggtgggcgtcggcttccagctcaccttgagctgctccgctgcgcggatggcctgctcctcgcgctcggcgacgacgccgacgaaatcgccgatgcgcaccacggccacgaggccaggaatgccgcggaccgaggattcgtcgaccgcgagcaagctggtgccgacgaacgggccggcgtcgacgcccgcatagggcgggcgcacgacacgcccgtggagcatgccgggcactcggatgtcgtggacgaaggtcagctcgcccgtcgccttggcgggcagatcgacgcgcggcaccgactggccgacgatggagtaatcgtcggccggcttgacttgcacatcgtcggccagctcgagccggatcgtctcgtcgccgatcagctcgccatagctgatgctgcggttgtcgcggccgcgcacgaggccgtcttcgatcctgaggtcggcggccggcagctccaggcgttctgctgcgcgtgcgatcaggaaatgccgcgcttgcgctgcagccctgcgcagagggacggccgtgatctggatggtttcgctcgcaatcgtcgcgccctggttcggcaccaccgacgtgtcgccgagcacgatcacgacgcgcgcaaaggagacgtcgagctcttcggcgacgatctggccaagcgcggtacggatgccggtgccgagatcgacgtggccattataggccgtgaccgaaccatccgcagtgatgcggacgaaggtctcggacgtgacctcgtcgacggtacgggcgacgacgagcgagcccgatggccgctcagctccgttcgaaacaggggaggccatcagtccgcggcctcgacgatctggcccgatgcgcgcatcaccgcgcgcaggatttcgacatgggtgccgcaacggcaaagattgtagcgtagcgccgccagcgcctcctgctcggtcggccgcgggttgatggcgagcagcgccttggtggtcatgatcatgccgttgagacagtagccgcattgcgcagcctgctcgtcgatgaaggcctgctgcacgaggtcgggtctctcgcgggtgccgaggccttcgagcgtcacgatgtcgcggccttcacagccgctcaccgggatcacacaggagcgcgccgccgcgccgtcgatcaggacagtacaggtgccgcattcgccgaggccgcaaccgtacttcgggccattcagcgcgagctcgttgcgcaacacatagagcagcggcgtctggcgctctgccgtgacctcgtggatcctgccgttcacggtgaggcggatcgatgcctgcgtcatgctcgttcccaaaccaagattatgcaatcgcggaaattcgaccacgcgacgataccgtttgtacacaaacgtgcaagccgcgcattccgcactgcagcgcgattgccttgtttgtggacagagcggataggcaaatgaggttttatacggcagtggcatcttttgcgctgcaccgccgcttgacagccccgggggaccgcgcgcaacatcgttcgtatacgaatgataaccgaagtgtccgcctccgacatggtgacagaaacgacgagcgccgtcatcgacaagatccgctgcgatgcgtgtccggtgatgtgctatatcaagccgggcgcggcgggggcttgcgaccgctatgccaaccacgacggcaagctcgtccgcgtcgatccgcacgtcatcctggagcgcaccgtctcgcatggcggcaagctggtcccgttcagccgcaccgaggactgggacggcaagatcgtccacgaaccctcgaccttcgtcacagcgatcggcgcgggaacgacctatcccgactacaagccggcgccgttcatcgtttccgcagaggtcgacggcgtcgacatggtgactgtggttaccgagggcatcttctcctattgcggtgtcaaggtgaagatcgacaccgaccgctatctcgggccggagactgcgactgtgcgcgcgcaaggggaggcggtcggccacgtcaccaccagcgaatacggctcgcagatgctgtcgctcggcggcgtgcatcatctcaccggcggctccaagaaggaaggtcgcatcacctgcgacacgctgatggatctcgccaattgcaaggcggtcgagctcaccatcgacggcggcgccacggtggtggtgcaggccgggcagcccccgatcgtcaacggcgtgaaagaagagcgtatgcgcgtcggctgcggctctgcgacgatcggcatgttcgcaaagcagtggcacggcaaggtcgacgaggtcgtcgtggtcgacgaccacatcaccggcgtgctcagcgagcatcaggccggcaagctgctcgacatcgccgataccggcatcaagatgaagggccggcgttcgacgcccggccgctatttccaggtcgccgatcccggcacgggttggggcggcaccgacatatccgacccgctctcgatcctcgggccgtttgatcccaaggaagcaaagcccggcctgaccatgctgatggtctccaccacgggtgagcattcgtcctactacgtgctcgacgatgccttgaggccggtcgagaccgagatgccggccgacctgaagttttcggtcgagcgcatccaggagaattgcgagccggcgctgtgcaccgtgctgttcatggccggcgcgggcggctcgctgcgcgcgggtgtcaccgacaatccggtgcggctgacccgttcggtgaaggatgcgctgacgcgagtcaccagcggcggcgcaccggtttatgtctggcccggcggcggcatcacctacatggtcgatgtgacgcagatgccttcaggcgcgttcggctatgtgccgacaccggccctggtcgcgccgatcgagttcacgctgaagctgtccgactatgccgcgctcggcggacacatggactatgtgaagccgcttgccgaggtgcagaacggcgacgatatccgccagttgccctggcatcatccgattccggggcgccggacatgatgagacgcccgcaaatcgcattgctgtctgatggccggcggctgcatttgcaggatggaccgatcgatctgatcgcggaggcgaggggagctgcaggcgaggtgcgctccgcctatgaggccgcggtgcaccggttcaccggactgctggacgagctctgcgccgagttggcggatttgcggatggctgcggcggatcggacgtcgctgcagggcgtcgtcgcgcgtcgcatgcactccgctgtggcgccctatgccgctgattgcttcatcacgccgatggcggcagttgccggcagcgtggcggaggagattctggccgcaatgctgcgtgctgcgacgcttgatcgcgcctatgtcaacaatggcggcgacatcgcgcttcatctcggcggcggtgagtctttttcggtcggctttatggatcggcctgatcgcgatggcgtgatgcggacgatgcggatcgaggcggatgatccggtgcgcggcatcgcgaccagcggacgccggggccgcagcttttcgctcgggatcgccgacgcggtgacggtgctggcggcgacggcgtcgcgggccgatgcggctgcgacggtgatcgccaatgccgttgacctccccgggcatcgcgccgtcatccgcaggcctgcgaacgagcttcagcccgacagcgatctgggcccgcgcctcgtcacccgcgacgttggtgagttgtcgcacgatgacgtcgccgtcgcgctcgaatctggcgcggaatgtgcacgacaattgttcgatcgcggactgatcgagggtgccgtgctgcagctttgtggtgatatgcttgtcatcggaccgaaagacattgaacggcagggatcgctcccgcgtcagccggagaatgcggttcatgtctgaacagggaagagctcaaggaagcaaaacatgagcgcgatcatccgcaagatcgtcaccgtcgtcgaagagacgcagatggagatgggccggcaagtctcgccgccgacgcggcgtgcggctgcgatcgccgtgatcgagaatccatttgccggaaagtacgtcgaggatctctcgccgctgatcgccatcggcgaggagctcggagagctcctgtcgaagcgcgcggtggccgcgctcggtatcgacggcgccaaggcacagagctacggcaaggcggctgccgtcggcgagaatggcgagctggagcatgccgccgcgatcctccaccccaagatgggcgcgccggtacgcaaagtgctgggcaagggtgcggcgctgattccctcgtcgaagaagcgcagcggcccgggtacgacgctggacatcccgctggggcacaaggacgcagccttcgtccgcagccatttcgacggcatggaggtacagatcaacgatgcgccgcgcgccaacgagatcatggtcgcggttgcggtcaccgacagcggccgtccgctgccgcgcgtcggcgggctgacggtcgcggagatcaagggcgaagacggtctgagataggatacgtaaagaagttcaaactggaggttgggatgcgagcaagaaatatcatcgtcggcgcggctttcgcgtttctggcgggcggcatggctcattcggccctggcgcaggacatcaagatcggcgagatcaacagctattcgctgctgccggcgttcaccgagccctatcgcaagggttggcagctcgcggtcgaggaagtcaacgcggccggcgggatcaacggcaagaagctcgtcgtcatctccaaggatgacggcggcaagccggccgatgcgcagaccgcggccaacgagctcgtctcgagcgaaggtgtcgcgatgctcgccggaacgttcctgtcgaatatcggcctcgccgtcagcgacttcgccaaccagaagaaagtgttcttcctcgcggccgagccgctgacggacgcgatcacctggtccaagggcaacaagtacaccttccgcctgcgtccatccaactacatgcaggcggcgatgctggtggaggcggctgcgaagctgccggccaaacgctgggccacgatcgcgccgaactacgaatacggccagtcggcggtcgcggtgttcaagaagctgatgtcggagaagcgcccggacattcagtgggtcgacgagcaatggccgccgcagggcaagatcgacgccggcccggtggtgcaggcggttgccgccgccaatcccgaagcgatcctcaacgtcaccttcggcgcggatctcgtcaagttcgtgcgcgaaggcaacacccgcggcctcttcaaggggcgcgaggtcgtctccttcctgaccggcgagcccgaatatctcgacccgctcaaggacgagacgcccgagggctggatcgtcaccggctatccctggtactcgatcaagacgccggagcatgatgcgttcctgaaggcgtaccaggccaagtacaacgactatccgcgcctcggctcgatcgtcggctatcagacgatcaaggcggcagcggcgatcctcgccaaggcgggctcgaccgatccggagaaaatgatcgccgcggcggaggggctgtcgatgccctcgccgttcggcgagatcacgttccgcaagatcgatcatcagtcgaccctcggcgcctttgtcggcaagacggcgctgaaggacggcaagggcgtgatggtggattcggcctacaagaagggcggggactatctgcccagcgatgccgaagtcgcgaagctgcgtccgaaggattgatacgaaagggacccgggccttcacggttcgaggcgcgcggcgccgccgcgttcctcaccgtgaaggtcctgggacctcatcccgaggaggcgcggagcgccgtctcgaacgatgaagcccaacacctgagatccaaccaaccggaccgccgatggccttttacgtcgtacagtttctgaccggtctcgccagcgcagcgtcgctgtttctggtggcctcgggcctgtcgatcatcttcggcgtgacgcgcatcgtgaacttcgcgcatggcgccttctatatgatcggcgcctacatcgccttctcgctcactgaacggctttccggcgcgttcggcttctggggcgggatcctcctcgcggcgctcgcggtggcggtgatcggcgtcatcgtcgagatggtgctgctccgccgcatctaccatgcgccggagctgtttcagctgctcgcgacattcggcctgactctgatggtggaggatctcgtcgtcctgatctggggacctgacgatctcgtcggccgccgcgcgcccggcttcagaggcgcgatcgatttcttcggacagaacgtcccgacctacgacctgttcctgatcgtgctcggaccggtcgtgctcggcattctctggcttctgttccagcgcacgcgctggggtgtgctggtgcgggcggcaacgcaggaccgcgacatggttgccgcgctcggcgtcaaccaaaaatggctgttcacgtcggtgtttgccgtcggcgttttcctcgcagccctcggcggcgcgctccagatcccgcgcgatgccgtgcatcacgccatggacctgcgcatcatcgtcgaggtgttcgtcgtggtcgtgatcggcgggctcggcagcatcgtcggcgccttcgttgcggcggtgctggtctccgagctcaatgccttcggcatcctgatctttccgaaaatatcgatcattctcgttttcctggtcatggcggtggtgctgatcgttcgcccctggggcctgttcggcaagccggaggcggccgcgcgcaagacgccgggcctcaccgtcaatccctggcggccgctgacgtcgaacgagaggttgatggcgcttgctgcgctcgtcgttgcggcgaccctgcctctgttcgccggcaattatctgctgacggtcggctcggagatcgcgatcttcgtgatcttcgccgtcagcctgcatttcctgatgtcggtcggcggcctcgcgtccttcggccacgccgcctatttcgggctcggcgcctacggcatcgcgttcctggcaaaaatggcgggactgccgatgatcgtgtgcctgttgctcggcccgctgctcggctgcatgggcgccgccgtattcggcttcttcgccgtgcagctctccggcgtctatttcgccatgctgacgctcgctttcgctcagatcgtgtggtcgatcgcctttcagtgggtggaggtgaccggcggtgacaacggcattctgggcctctggccctcgagctgggcggcgagcccgtcgcatttctactggctggcgctcggtgttgcagcgctggtgacggtcgcgctgcgggcgatggtgttctcgccgttcggctatgcgcttcgtgccacgcgcgactcgctgctgcgcagtgaggccataggcatagatgccaagcgcatccagtggaccgccttcgtgatcgcaggcacgacggccggcatcggcggcgcattgttcgcctacctcaaagggagcgtcttcccggacaatctcggcatctcgctgtcggtcgatgcgctggtcatggtgctgctcggcggcgtcgagacggtgtcgggcgcggtgatcggcgccatcgtctacaaggccttgaacatctggctggtgagccagaccgatctgtcgaagctcgtgctcggcggcttcatcgtgctgatcgtcgtcgtcttccccaagggcatcgtcggcatgctggagatgctggcgcagcgccgcaggaaagcatcgccgccggggtctcccttgctcgccaagccgatcgagtctgccgaatgaacgttgcacccccacttctcgccgtcgagggcctcaccaaatcctacggaggcatccatgccgtgcgcggcgtctcgttctcgctgcgtgccggcgagatcctggctctgatcgggccgaacggtgcgggcaagagcacctgtttcgatatgctcaacggccagaacatcccggatagcggccatgtccgcctgttcggcgaggagatcacgggacggaagccgcgcgaggtctggcggctcggcgtcgggcgcacctttcagatcactgcgactttcgccaccatgaccgtgcgcgagaacgtgcaggtcgcactgatctcgcacgggaagcagctgttcaatctgttcggctcggcgccgaagttcgaccgcggcgaggccggccgtctgctcgagctggtcggcatgggcggctatgcggaccgaccctgcggcgagcttgcctatggcgatctcaagcggctcgaactcgcggtggcgctcgccaaccagccgaagctgctgctgatggacgaacccacggccggcatggcgccgcgcgagcgcgtcgatctgatgcggctgaccgcgagcatcgcgcgggaaaaatcgatcggcgtgctcttcaccgagcatgacatggacgtggtgttcgagcatgccgaccgcatcatcgtgctcaatcggggtacgttgattgccgaaggcacgccggcggaggtgcgtggcaatccccaggtgcaggccgtgtatctcggcgaggggctcgtctacgacgcccgccaccgcgagggagcttcggcatgaagctgacggtgcaagacctcaacagtcattacggtccggcccatattctgttcgacgtcggcttcgaagtcggcgagggggaggtggtggcgctgctcggtcgcaacggcgccggcaagtcgacgacgtttcgttcgatcgtgggcctcgtcgcgcagcgctccggccgcatcacgttcgaaggcaaggatgtctcggcgaagccgacacatgagatcgtgcgcgagggcctcggctatgttccggaggagcggcggatcttcacggacctgaccgtcgaggagaatctcgaggtcggccgccagccgaggcggcccaacgcgccgcattggacccgcgagaagctgttcgcgctgtttccgaatctcggtgagatgaagaaccgtccgggtggccgcatgagcggcggcgagcagcagatgctcaccatcgcgcggaccctgatgggcaatccctcgctggtgctgctggacgagccctcggagggcctgtcgccgaagatcgtggagcagatggtcgatgccatcctgaccatgaagaaggagggcgtcagcatcgtcgtctccgagcagaacctgcatttcgcgcggctgatttccgatcgcgcctacatcatcgagcgcggccgcatctgcttcggcggcaccatggccgagctcgacgcgcgtccggatatccgcgacgcgcatctgtcgttgtgaaggcggggaacggatggcgagaagcgtcacggcgaagaagagtgtcaagccggcaagaccgccttacgtgctggacgaacaggtcggcttcatcctgcgccaggtctggcagcgccacagctcgatcttcgcccgcgacatcggcaccaacctcacgccaacgcaatgggcggcgttgtcgaaactggcagagaccgggccgtgctcgcagaaccagctcggccgtctcacggcgatggatgtcgcgaccatcaagggtgtgatcgatcgcctgacggcacgtggtctcaccgagaccagccaggatccggacgacgggcggcgcttgctcgtgagcctgacccgcgccggtcagcagcttgccgaaaagttggccccgaatgccctcgcgatcagccgcgagaccttggcgccgcttgagcccaaggagcgcgatacgctgatggcgctcttgaacaagctgcgttgaagcgcgactaacctcggtaagggcgcgaccgaggttttgcggacatgagagcggcgaattggcttgcgatggccttgtgtctcggtgcgtctctagcaggcgcatgcggtcctgtccttgcagctcaagcctatgaagggttctgggcatcgaccaagaaggactgccgtgatgacgacagcccgaaccgcatgagcatcgaaggcggcaaccgcctctattggtacgagacgcgatgcctcgccagtcggatcacggccgacggaaagctgagctggaagatgcggctcgcctgtgaaggcgagggcgagaagtttcgctccagtccccgggtctcgatcgcggcggatggcagactggtgatggacaatggaccggtcgggcgcgccaagcgccagacctatgtgcgttgcgagttgcccaaacggcgctgatcctcagcgccccgagtctttgccggttcatccggatcgggcagagagaccagcagcggaggcggcagccgtgaactgcgatggccgcgttacttcgcgaccacctcaggcaccttgccggccggcggcgtgttgcggctgcgctgggtgcgcacgatgccgtcgatgatggtcatgccgatgccgggcaggtcgccgagctgcacgctctccaggatgttcttgccgggcgagtgctgcgccttgtccatgatgacgaagtcggcggagcggccgacttcaatgaggccgcaatcgagctgccgcatccgcgcggtgttgccggtggcaaggcagaacgcgatctcggccggcagttcgcccagcgaggacagcatcgagaccatgcgcaagatgccgagcggctgcacgcccgagccggcgggcgcgtcggtgccgaggatgacgcggtgcaggtcgcccatctcgcgcgcggtgcgcagcgtgaacagcgccgagcgctcgttgccgttgtgcacgagctcgagtccgcgcttgcagccctcgcagatgcagcggatctggtcgtcgggcagggcggtgtgaccgccattgatgtgcccgaccacgtcagtgtcggcctccaggaccacgtccttatcgatcaggccggagccggggatcgatgggccgccggtgtgaatggtgctctggatgccgtatttgcgcgcccagccgaccatcttgcgtgccgtcgggccgtccttgacgccgcccaggccgacctcgccgagcagcttgacgccgttggcggccatctccttgaaatcttcctcaaccatctcgcattcgatcaccggcgcgccggcgtgcaccttcacgccgccaggacgcagggtccagaacgcgcgctgggcgaacacggccatcgctttgaggccgacgacgtcgcggggacggccgggcatatgcacttcgccggcggagatcatggtggtgacgccgccatggaggtagctgtcgatccagttgatctggttctgccgcggcgtccagtcgcccgccacggggtggacgtggctgtcgatcaggcctggcgcgaccgtggtgccctgggcatcgacgatggtggtggcgccttccgtattgacgtccttgtagcggccgatggcggtgatcttgccgttctcggccacgatggtgtcgccgtccaggatcggcttttccaaagcgccggacaggatcaggccgatatttcggatcaccagcttcgagggtccggtggcctggggggcgtcatgcgccatggaagggctccttattcctaactgcaacgcttccgatcttgggcagccttgaccgccggatcaagccggattattcattagtatacgaatgatcgtgtacaaacgacgcatagctgaccgccttgggaccgcaagcaagcgacacggaagggtgagatgagcaatttcaaccaggaaagcgttctgagcgtccaccactggaccgacacgcttttctccttcaagaccacccgcagcccgaccttccgcttccgcaacggcgaattcaccatgatcgggctcaaggtcggcgagaagccgctgctgcgggcctacagcgtcgccagcgccaattacgaggagacgctggagttcttctcgatcaaggtcccggacggaccgctgacctcacggctccagcatctgaaggaaggggacgagatcatcgtcagccgcaaggcgacgggcacgctggtgatcgataatctggaggaggggcggaacctctacctgatcggcaccggcaccggccttgccccgttcctgagcgtgatcaaggaccccgagacctacgagcggttcgagaaggtcgtgctgctgcacggctgccggcacgtcaaggagctcgcctatggcgagatgatcaccgagacgctgccgaaggacgaattgatcggcgagtacatccgcaaccagctgatctactatccgaccgtgacccgcgatccgttccgcaaccgcggccgcatcaccgacctcatcacgtcaggcaagctgttcgacgatatcggcctgccggtgctggaagcagcccgggatcgcgtcatgatctgcggcagcccggcactggtggcggacacgcgcgtgcttctcggcgaacgcggttttgtcgagggcaatcacggtgaaccggcccagttcgtggtcgagaaggctttcgccgagcgctgacctgggatcatctgcgcaataacgccgtatttctgccgcgtccagcccgttgcagcgccgattcggcgcttgatacactgtgggagcgaatcagcggagttcccacatggttgcggacagcgacagcaacatcgcctggcaccgggtccagttgaagaagaaccgcgccgagttgaaggcgctggagaccgcgcgcttcacgatgggcgagatcgcctcgtcgaagcgcaatggccagacccagaagtcgatcgcagaactcaagcgcaagatcttgcagtccgagcgcgtggtcgccgatcacgacaagcgcacgcgccgtccgttggcgaccgacctgcaaagcctcagcaatggcagctggagccattgggacgcctacacgcaacagcagcgcaagaccggccagcgctctccggggcgcggctagacgcctctctcggcgtgtcctgaggcgcgcgcttcaccccttgcgccggcggtgccgcttgccatctggttgagacgccagcaatcggtccggtgctcccatgactgtgcgcatcgatttcaccagcgaggcctaccttcgcgagccgcccaaggcgattgcgaagctgcgcatgtccggccccgtggtcgcgacacgatttcctctcatcggcgacgtctggatctccacgacccacgatgccacggcgcaaatcctgaaggacagcgcgaccttcacgttgagaagggaagatggcgacgtcgcgggcctgcgctggtggatgccgagatacgtcaggaccatcgccaacaacatgctgacgatggacgagccggatcacaagcggctgcgcagcatcgtggacgaggcctttcgccggcgcgcgatcgtcgccatggagccgcgcattcgcgccatcgccgacacgctcgcggacgagctgttcgcagctggaagcccggccgatctcgtgcagcgctacgcacgcatcctgccgctcgcggtgatctcggagctgctgggcctgcctctggccgaccgtccgaagttcatcgcctgggccaacgcgatgtcctcgctgacgaacgtcttcggcttcttccgcctgttgttcgcgttccgcaagatgcgggcctatctcgaacggcaattgcagatcgcgcgcgcggagggtggcgagggcctgatcgccgagctgattcaggtggagcgcgaaggcggccagatctcgccggacgaaatggtctcgatggtgtttctgttgctcgcggcgggatcggaaaccacgacgcatctcatcagcggttccgcttacgaactgctgaggaattccgggctgcgcgactggctggagcaggactggagccgcatcgggctcgccgtggaggagttcctgcgcttcgtctcgccggtgcaattctcgaagccgcgctacgtgcgacgagacgtcgagatagagggcgtgcggctgaagaggggcgatcgcgtcatggtgatgctggctgctgcgaacatggatccggccatgcatgagcgcccggagaggctggatctcgaacgcaagccgaaccgtcacatctcgttcggaacgggaatccatttctgcctcggccatcagctcgcgcgcatagagaccgcctgcgcgctggaagctctgttcgtgcgctggccgaaacttggtctggccgtcgatcccgccggggtccgctggcgcaagcgaccgggcttgcgcgccgttgcgatgcttcccgtcacggccgagagccgcggaacaaggtaactgctcgcagcgaagcgagcgccgaccgttccctgacctcggcgagctgaagacaagctcccttcggaaaatcgttgtcgcgcgcgatctatcaggaacgccgcgccgctcgtcctgttgtcatctcgacatagggcgccgcgacgagttcctcggtcgttcatgtcgaggtcgacgtcttaacgggagacaattcatggccagcaagatgccacctgttccgccggacaatcagagccgaaagggaactggcgacagcaagcagatgtccgccgatcagctgccgcagggtcagcaacgcgcccaaaatccggaccagcaaggacaacagggcaacatccagcagaacacgaccaatcaaggctatcagcaagatcgctgaggaggggacatccatgtcgacatccaccaagacaccgaacagcattcgtcagggcggccccggcgcctcgcacgagaacgcaaaggcgccgctggaagtgaagaagccgcccgccgatgactcgcggcggaatcacagcagggtttccggcggtggcggggagcaggattcgcaccacacgcacgaagaggctcgaaagggaggaggcagataagccatgaccaataagcaacccaagctgtatgcgccgagcgagaaggacctgcgcgagaatcccatgatcgggggatcgaagggcgccacgatggcaggcgcctcggccgaggacctcgaggacgcccttggcgccaacacgatcgaaggggacgtcgagaacgacgtcaacgccgccggcggcatcgacaaggacgtcgcgcgcagcggctcccatcgacgccgacgctgaaataggagtcatccgatgcaaggcaacaagacgcacgaacagcaattgcgcattcttgaacggaagagcgatgtgcccgatcagcgcgagcttgaccaggccatcggccgcaatccccgggatgactccgttcatcatgccaaccggcaggcacggcaaagcgagtttcccgtgagtcgcggcggtctcaaccaggaaagcgaccacaataagcacaacgatcccggtcaaagcggccacaagccgccaagaccgacgacggcgcaagagaagcactgacgtcccgaaaatcaccgcaagaggagagactgatgccaggtgggcacggcagcaagacgcacttcagatcgggcatgcacggcaagggcgacggcacgggcgcgctgaccgacgtgccgaaggagatgatcggcgacaacatggtcctgtccaaccgcgacaagaagcagcattcggacattcgcggcatggacggcaagaccatccagaccgagcaatatcaggaccattctgcgaaccggctcgacgatgagccggggaccgaccagacctgaaggttcctcccgccgacttgcggaccggtgctcagccggtccgctttttcgtggccgcaagatcgcgctcccagccgaacaccgaacggccgtcgagatccggcgagaccgcgcgttcgccgacgatgaaagcgtcaaccgacggcccctgcgcggtgcgctccagccgccgcgcctgatcgtccaggcgcttgatcgcctggatctcctcctcgcgcccgagcctcgcgttctggatcgcgcgcttcagcacccggatggtctcgtcatagaccttgatcgggacggggtagggatgccggtccttgccgccatgggcgagcgagaaacgcgccggatccttgaagcgatagggcgcgccatgcacgacctcggcgaccatcgcgagcgaacgcacggtgcgcgcacccacgccgggcgtcagcagcagttccggaaaatcgaccgggccgcgctcggcggctgccgcgagcgtgccgtgcaggcggcgcgcgaacacgtccttgggccggacgtcatgatgcgcaggcatgatcagatgcggcagcgtggcctgtgccggcttcggctcggtcccgatgagccgctcgaattcggagacgatgcgatcggggccgagaccacccaagagatcgagctgcgcggcgcgcgagatgtcggcgcggtggtcggtgagattgacgatctcaccttgctgcggaccgtcgatcgcgctgtgcggcgtatcgacaaagctcttcagcgcctcggaatgccagtgataccggcgcgcctgccgcttgtcgccgttcatgccctgctgcaccacggtccatttgccgtcggcggtcacgaagaagccgtgcaggtaaaggtcaaagccgtcctgcaccgcggcgctgtcgacctttgccaccaggcggctggcgcgggtcagcttcgcgccgtcgaatccgacgcggttgccgagttgcatcagttcgtccggtgtcttgcgcgaatgctggccccggccgccgcagacataaatcccgagttcgtcctgaagcggcccgaggccacgcttcagtgcgccgatcacggaggtcgtgatgcccgaggaatgccagtccatgcccatcacggctccgaacgactggaaccagaacggatgcgacagccgctgcagaaacgcatcgcggccataatgatgaacgatcgcttgcgtgacgatcgcccccagcgaggacatgcgacttgccagccacggcggaacccgcccggtgtggagaggaagatcggcgctgccggtacgtcgagtcatggacggctcaaactagcgcctcggcgacggttgcgccagtggaatgctgcgttgcacgaaacaggggagcgaagccagccactaggcgttgaacgctgagggattgcagcgacggggacactcatggattggcagagtctcgtggccgacatcgacacgatgttcggctggataccgtcatggttcgtcggtctcagcctggttgtcggcgcagttttgctcgccctggtcgcctatcgggtggccagatggctgctcaagcgcgccttcggaacccgtcttccgatcctgagcgtattcatcgatcgtacggccggaccggcgcaaatggcactctgcttggccgccgtcgcactcgtgttgccacttgcgccgcttgacgatgcgatccgcaccccgctgacgcgcctgttcgttgtggccttcatcgcgctgatcggctggatctcgatccggatcgtggacatgagcgcggcgcgctatctgcagaactttcgcgttgtcaccgagaacttcatcgcacgcaagcatgtgacgcaggttcgcgtgttcaagcgtgtcaccgacaccatcattgtcgtgatcaccgtgtccactgcgctgatgacgttcgactcggtaaggcagtatggcgtcagcctgttcgcttccgccggcgccgccggtatcatcgtcggtcttgccgcgcggccgctgctgagcaatctgatcgcaggcttgcagatcgcaatcacccagccgatccgcatcgaagacgccgtgatcatcgagaacgagtggggatgggttgaggacatcgcctcgacctacgtcgtgatccggctgtgggactggcgccgtatggtggtgccgctgtcctatttcatcgagaagccgttccagaactggacccgcgacactgcctccctgatcggcgtcatcgcgctccatgtcgattaccgtgccgacgtggcgcgcatccggcagtggctggaagaggtggtaaagaaatccaagctgtgggacggcgaggtggtcaatctccaggtcgtcgacgcagacgcgcggacaatcgagcttcgcgcgctggtcagcgcgcgcaacgcgccgcaatcgtgggacctgcgctgcgagatcagggaaaagctcgtggccttcatccgcgacgagatgccggaagcgctgccgcgcgagcgcgcgatcctgatcccgtcaggcgatgatgatgccgactatctgcggcgccccgcgcctccggagaccatgcgggcgaggccggataattaacggtcggcgccgctcgcgggccgcttacgcgcgctgctttggtcgcggccagccgctggccggcctgctgccggatcgtgtcccagcgcgtcagtcccgggcccgaaggtagttcttgttgacgagacctgatcttttgtacgatagtacaaatgcatgatgcgcaagcccaccagcaaggaaacgtcccgcaagccgaacatgcgcgaggcgatcctcgttgcggcggaggagctgttcgccaccaacggattcaatgccgtgtcggtgcgcgacatcgcgcaagccgccggcgccaatcccggcagcgtcacctatcatttcaagaccaaggacggcctgctgctggagatctaccgacgccattgcgcgccgatgaatctgcgccgttctgaactgcttgccgccgcgaagcgcgtgcgcgatctccaggaccggctggaggcgatcgtgcgcgcctatgtggtgccggccttcacctcgggcagcgatctcgccggcggaggggcgcggttcacacggctgcgcgctgtgatgtcggcggaaggcaacgaggtcgcgcgaaagatcatcgcgcagacctttgacgacacgagtcatgccttcatcgacgcagtccacgagagcctgccgcacattccgcgcaccgacatcgtctggcgcagccatttcctgctcggcgcgctctattattcgctggtgacgccggagcgcgtctcgcgcctgtcgcgcggcgaggctgacgggagtgatgccgcgagtgccatcgagcaattggtgcaggccagcgttgcggcgttccaggcgccgtctctggatcaagctgccccggcgcggcggcggccggccgtcgccaacaagacctgagcggtctcgcctcggcggttcactgatgacgatgatgtacacgccgaccattccgccgcccgatccgaacacgcgcacgccgaaattcggactgccgaagctgtcctgcgacgcgcattgccacatcttcggacccggcaccaaatatccttacgcgccggaccgctcctacacgccgccggacgcgccactggaggatttccgagcgctgcacgccaagctcggcgtcgagcgtgctgtcatcgtcaatgccaccgtgcatgggaccgacaacagggtcgcgctcgacgccgtcgcacggagcgacggcgcctaccgcgcggtcgccaacatcgacgacaccattacggaacgcgggctccgcgagctgcacgagggcggcttccgcggctgccgcttcaatttcgtccgtcatctcggcagcgtccccgagaggggcgtgttcgatcgcgtcatcgccatggccgcaccgctcggctggcacgtcgacctgcacttcgatgcgatcgacctgccggaatatgccgacatgctggcaaggctgccgctccgctacaccatcgaccatatgggccgggtgcaggcatccgaggggctcggccaagttccgttcaggaccttgatcgagctgatgcagcgcgacgagaaatgctggatcaagatctgcggcgcggagcgggtgtcctcggccggtccgccgttcaccgatgcggtgccgttcgcgcgcaagatcatcgagaccgcgcctgatcgcgtcatctggggcacggactggccgcatcccaacgtcaaggccatgccgaatgatggcgacctcgtcgatctgattccgatgtttgcgccggagccggagcttcagcagaagatcctcgtcgacaatccagcgcgcttgttcgagttcaaggcgtgacggcattcccgcgatcgacaagcggcgcggcatccttgcagggcgctggagtgggacacgggccaatgcatgcgaacgaaaggagtaatccatgaagacaggactcgtgatcacggcccatcccggcgatttcgtctggcgcgccggcggcgccatcgcgctgcatgcgaagaagggctatcgcatgaagatcgtgtgcctgtccttcggtgaacgcggcgagagccagttcgcgtggaaggagaagggtgcgacgctggactcggtcaaggcgggccgcaaggacgaggcggagcgtgccgcaaagctgctgggtgccgagatcgagttcttcgactgcggcgactatccgctcaggctgacggaagcgcatttcgatcgcatggtcgacatctaccgcgagctcaatcccagcttcgtgctgacgcacgcgctggaggacccctacaacttcgatcatccgaacgcagcgcatttcgcgcaggaaacgcgcgtggtcgcgcaggccatgggccacaagcccggtgcgcaatacaaatattcggcgccgccggtgttcctgttcgagccgcaccagccggagcaatgcaattacaagccggatctgctcctcaagatcgacgaggtctggaaggagaaatatgaagcgttccagattctcgccgcgcaaaagcatctctggggctattacgagcgcgtcgcgctcaatcgtggcattcagggcagccgcaacaccggtgtgcccatgacgtacggcgaggcctatcagcggctgtttccgacggtggcggaggagctcgcatgaagcctgtcgtcgttcgcaacatcaaacgggccgatcccgccggcatggcggaatacggcgtctcgacggtgcatgaggcctacgagcgtctcggcctgatgaagccgtatttgcgccccgtctggccgggcgcggcgatcgcggggcccgccgtcacggtgctggcgcagcccggcgacaactggatgatccatgttgccgtcgagcagtgcagaaaaggcgacatcctcgtcgtcggctgcaccaccgacaacaccgacggaatgttcggcgagctgctggcgacctcgctcagggcgcggggcgtgcaggggctgatcatcgatgccggctgccgcgatgtcagagcattgcacgagatgcgctttcccgtgtggtcgcgcgcagtctcggccaaggggacggtgaaggcgacgctcggctcggtcaacgtccccgtggtttgcgccggtgtgagcgtcgaccccggcgacatcgtcgtggccgatgacgatggcgtggtggtggtcccgaagcgctatgcggccgaagtcgccgagaaggccgggaagcgcaacgcggaggagggacgcaagcgcaagcggctcgcctcgggcgaactcggcctcgacatgtacaacatgcgcgaagcactggagaaagctgggctcgtctatgtcgacaattccggggacgtctgaagcgggagcaggaggatggatcgtctcaagctgaaggccgtgctcggcggtcatgcccacgtcaaggcggcgaaaagcggcgcgcttcgttccgacctgttcgatctcgagttcatcgagtacacgccgaccaacacggcgttcaagccgatggtgcgcgagcaggccttcgacgtctgcgagatggcgatcgtcacctatctgatggcgaaggcgcacggcaaggcgctggtgctgttgccggcgaccatgctgggccgctttcagcattcctacgcgctctataatccggcgcaggggacgctcgggccgtctgccctcgaaggcaagcgcgtcggaatccgctcgttcacgaccacgacgggcgcctggatcaggggcatcctcgccaacgactacggcgtcaacctcgacaatatccgctgggtgaccttcgaggatccgcatgtcgctgaatatgtcgacaccgccgagcgcgcgccgaaggacaagaagatcctgcagatgctgctcgatggcgagctcgacgccgtgctcggcgaaacctctgatgatccgaggttgaaggcgttgttccctgatccagctgcggaggcggcgaaatggtacgcccgccgcggagtcgtgccggtcaaccatctcgtggtcgtgaccgaagggctggcgaaatcgcgcccggacgtcgttgccggcgtctatgacctgctcaagcggagcaaggaacagacggggcctgccgcgactccggacctcattccgttcgggatcgaggcgaacagacagccattggagctgatcatcgactatgcattccagcaggcgctgatcccgcgccgctatgcggtcgaggagctcttcgacgagacgattcgaggaatgaactgatggcttaccgaggcggaccggatcctcgcgaggatcaatctcaaaagtgatcagctcaagatcgcgcgggcctgaaagctgacgacctcgtcgcgagcgcgctcgatcaggtcgatcagattgcgggacttgcggacgagttgctcggtggcgggctgcgtgcggaattccgccagcacggcgcgaacgcatttgctggcggcatcgagcgtccagagcgcacggttcacgtcgtcctgcgtcttgattgccgcgatgtcgagatccgagagaacatggccgatgccgtcgagccgcttctccgccgcatcggtgggcgttcgaatctgggcggaatgatcgatgctgcggaatgcgctgaacatactcgtactacccaccgaccgcagatggtcagccgaaggtgtagtatggtcggcgacgccggcctcgcaatgcgttgggctacggtccgggattctaccgaattcgagcggcggcgctaaaatccaggtcaggacgttcggttggtttccgggatcattttaccggcgaaccgacgttttcatcatggccggaaggtttcggcggcgcgcaaagctgcgcttggcatgttcactcggctcttcgatgacgagcgaaccggggtcagttcttcgggctcaagagggtgggccgctgccgcgcaaatgtctgccggccgctcttgaagcccatcaggatatcgggcagctcggcgatagcgaagcggccgtccgttgtgtcgagcacgatgagatcggcgggattgccgacctcgataccgtaatcacggaggttcatcagccgcgccggcagctcggtcacgagatcaaggcagatgtcgaaatcgcttacggaggcgtgtgcaacgttggcgtagaagtttgccatccgcagcagcgaggcatctccgaacggcgtgaagggattgagcacgttgttggtcgcgaccgagcacacgacgccgtcggctgcgagcttgtgagcgagcgtcaatccgcgtggcgcgttgtgggtggcctcgcgccccatcagatagagatcggtcgcgggcagcacggtgacagccactccggccctcgccagttgcacggcggcagccttcatgcgctcgggcggcaatgcggagagctttgtcgcatgaccgatcgccacgcgtcccccatagttgcgccgctcggtctggcggcagacctcgtcgagatgccaccaggaggggtcgagatcgaagtcgagatggagatcgacgtcaacgtcgaattcctcagccagatcgaagatgcgcgcgagatgcgcatgcggctcggtgtccatgtagggacagccgccgatggcctcgccgccgttgcgcagcgcctggatcagcagctcctcggctccgggatcgttggtcaggccctcctgcggaaagacgcagagttccagggcgatcgcccaggcgtaggcgtccttgagcgccttgaccgcctcgaagccgcgcaagccgatgcgcgggtcgatctcgacatgcgtgcgcatgcgcgtcgtaccgtgcacgatggcgcgttcgagcacctttgcgccccgcgcgtagacgtcgtcgaccgtgaaattcttcttcatcccggcaacggcacggatcgcttccgagacgctgccgtgatcgtgcccgcagcggccgagcaggcaggccttgtcgagatggatatgggtgtccacgaaaccgggcagcgtgaggtgcccgccgaggtcgacctcgaccgcttcgcaggcaagccttggcgcgattgcggcaatgcgtccgctcttcaccccgatgtcggcgggggcggcggatgatcgcaacagcgcgttgcgaaagatcaggtcgaagggggcttgggcggtcatgacgtcggattcagctgagggagcctaacccaaggcttgggggtgggcagctccagattgtgtgcagtcgggccgccagattgttgaaaaaatgtgcatgcacttcagggcctgaatcgtagaatatggacagtctggagaagccgccatgtccgttgccgcgaacaccgaacgcccgatgaccgatgccgagatcgtcgaagcctatctcacggcgtcgatgatcccggatcccgacgccgccgcggcctacatgaaacccggcacgttgatcacgttcaccggcggacgcgagttcgatcatccgcgcgggccgaccggcttcaatgcgaagcgctaccgctgggtcaagaagaagatggagcgcttcgacgtctgcccgggcgcgaacgagaccgtcgtctacagcatcggcacgctctatggcgagtggatggacggcacgccgttcgagggcaaccgctacgtcgatcgcttcgtcgtccggggcgggcagatcgtcaagatggacgtctggaacgacagcgccgagcgcatcctcgttcagcgcgggatcgaggcttagccccttcgcgcgattttcggcagcttgacgacgcgatcgctcgtcacctcgtcggcatagggcgccaggatatcgagcagatcacggccccgctgaggagtgggagcaaccagcgcgcgattggccacggaatcgaggtggtgatgcatcaattccatcaccttggcttcgtcacccttggccagcgccgcgatgatggcgcgatgctcattgatggcgcattcggtcgaatgcggccggctgtagagcgacagcgtcaggcagcagcgataggcgacctcgctgacatagcgcaccaggatcgggctgttcgtcatgtgcgcgagcaggatgtggaattcggtggcgagccggatcgacactgcatccgtgccgccgcgcgcgcgatcctcggcgtcgacatgggcattcagctcagcgatctgcgccctggtcagcttgcccgcgagctgacgcacgacgagccgctcgagctcgatgcggatgtcgaaggcatcgcgcgcctcctgccagctcggcgtcgccaccaccgcgatccggttgcggcgaagctcgacgagaccttccgcggcaagttggcccagcgcatggcgggcgatggtgcggctgacgccgaagcgctcgccgagtgcatcctcgggcagctttgcgccgggctcgagcgcctgctcgatgatcgcgcgcctgagcgcgcggcagatcacgctgaccttgtccgacgcttcggaagtcttgctgctcgcgcgcgcgggcatcggcgaatccctgggatgttcgaggcctctcattagcatagcccagcggcgatccagcgcccgaattgcatgcagttcgatgtccagattgcctaaactggctccgtcgggtcgtccggagcgtctggcaaatgctcgatatcgcggacatcgggggattggcactcagcttgcatacacttttcctgtgatgcgcatgcaacccaacgctcagtttgacggccaacccgttcccgaaggcgccgccgccacagctatcgagttgtcggaggcgtccgtgaccttcgggcgcggtgaccgcgccgtgcccgccctgtcgaagaccacgttgaagatcgccgacggcgagtttgtcgcactggttggcccctcaggatgcggcaaatcgaccattctccgtctcgtcagcggtctggtgcagccgagcagcggcgtcgtcatcgttggcggtcgcgaagtcgcggcgcgtgcggtgcgggtcggcatggcctttcagaacccgaccatgctgccgtggatgacgatcgagcggaacatcatgctgccgctgaagatcgtcgagccgttccgctcgaacttccgcaggcttcgcaagaccgcgttccgcgacaaggccaacgcgctgctggagcaggtcggcctcaagggcttcggcggccgttatccctggcagctttccggcggcatgctccagcgcgccaatctctgccgcgcgctgatccatgagccgcgcatgctgctgctggacgagcccttcggcgcgctcgaccagttcacccgcgaagagctgtgggcaatccttcagaacctctggatgacgcacaagccgaccgtgcttctggtgacgcacgacctgcgcgaggcgggctttcttgccagccgcatctgcgtgatgagcgcgcgtcccggccgcatcctcgacgacagccgcgtcgatttcgcgcggccgcgtacggtcgcgatgacgttcgaaccggatttcgtcgcactgaaccagaagctgcgtgccttcatcgaggatgcgcgcagcgcggcccagcagggagcaggctgatgttcgggatcgatgtcaggcagaaggcgtggtcggctgggctgatcgtgctgttcttcgtcgcctgggagctgttttgcctgatgaccggcatgtccgatctcgtgctgccgcgcccctcgcaggtgttcacgacgttgatcgatcgtttccccgtgctgtggccgcacatcgtgcagacgctcgccacgacgatgttcggcttcgtcctcggagtcgcgctcggcgtcgccctcggcgcgatcatcggcgtctcgaagaccgcctacgacacctgctatccgctgctgatcggcttctcgtcgatccccaaggtcgccgtggtgccgatcttcgtgctctggttcggctccggcacggtcccggcggtgctgaccgcgctgtcgatctgcttcttcccgatcgtcgtcaacatcgcgaccggccttgccacgaccgagcccgagctcgaggacgtgttgaaggcactcggcgccagcaagttcgacattctctggaatgtcggcctgcccaggaccatgccgtttttcttcgcgtcgctgaaggtcgcgatctcctatgccttcgtgggcgccgtgctgtcggagacggtcgcctccaaccgtggcatcggcaacgtcatgatgaccgcgtcctccaatttcaacgtgccgctggtgttcgccggcttgttcgtgctcgccgggctcggcgtcgccctctacgtcgtgttctccctgatcgaagggcaggtcaccggctgggccacgcgcaagaacgacgtgattgccacctgatttcaaaccacacgcaacgaagcttgaggaggtctcgatgttgagaaaagcaactgccgcgctgctgggattggcgctgtccacgggggcggtgatggcccaggagaccacgatcaagttcacgctgggctggaagacccagggcagcgacgccgccttcttctacgccaaggacaacggcttcttcaaagaggaaggcctcaatgtcgtcatcgaccagggcgaaggctctggcgccaccgtgacgcgcatcatgtccggcgcctatgacgccggcttcggcgacgtcaacgccatcatccagaacgcctccaccaagccgcaggaggcgcccgtcatggtttacatgatgtggaatcagccgccgttcgcgatcgttgccaagaagagcagcggcatcaacaccatcaaggatttcgaaggccgcacgctcggcggcgcgcagggcacgccgaccacgcgcctcctgccggtattcacgcgcaagaacggcctcgacggcgagaagatcaagatctccaacatggcgccgaacctgcaggagccgatgctgatcaagggcgacatcgacgcggccctggtcttcaacatcaccagctatttcaacctggtgctcaatcgccaggatccggacaaggacttcaaatggttctcgttcggcgagtatggcctcgatctctattccaacggcgtgatggtgtcccggaagctgatcacctcgaacccgaaggcggtcgcgggcctcgtgcgcgccatcaacaaaggtgcgatcgcgatcgccaaggaccagaatgcggggatgaaggcggcgctgaactacgacaacctcatcaacgccgacgtcgagaaacgccggctgcaatattcgttcgaaaaactgattgtctcgccggagatgaaggagatcggcatcggcgacatcaaggacgatcgcatgacgcgcgccatcggcatcgtggtcgagggttaccagctggcccgcgccccgacgccagcggaagtattctcgcgcgagttcctgccgccgcgcgccgagcgggagctggtatacacggccaactgatcccagggagatgcacatggccacggagatttcggcaacgagcctgttccgtggctctgatcgcgacatcggcgagaacgtcgtgctgcggcacgatggcggcgtcatcaccgagatcgtcgaaggcgcagggcgggatcctcgatctttcctcatccctgccttcgtcaacgcccatgatcatgcccgtgccaccgcgtcgtccttcggtgcggtcggcatgcctttggaaagctggatcctgcgtaccgcgctgggcacgcccgtcgatccctatctcactgcagcttccgctctggcccgctccgcaaaggccggctgcgcggcaatgatggtgcattacacccgcccgagtgggacgatgccgttggtcgacgaggccaaggccatcgcgaaggccgcgtccgatgtcggcatccgcatcgcgtttgcgctggccgtgcgtgaccagaacccgatcgtctatggcgatgccgagccagtgctctcgggtctgacgcgcgacgaccgcaagaccatcgacgatctgttcgtccgcccgccggtctcgccgaaagcatatatcgagctgaccgacgccattgccgcagccatcggcagcccgatggtggacgttcagctcggtcctgccggcgtgcaatggtgctcgaagccgctgctggaggcggtggccgagaattcggcgcgtaccggccgccgcatccacatgcacctgctggaaaccgtgtaccagcgtgcctgggccgaccaacactttccggacatggtgcgctggctacgcgacattggctttctctcggagcggctgacgctggcgcactgcatccacgcccggccggacgagctggagatgatcgcgtcctctggggcgcgcatcgtcaccaatttcagctcgaacatgcatctgcgctcggggctcgcgccgattgcggctgcgcatgaatgcggttgcgccatcgcagtgggcgtcgacgggctggcgctcgacgaagacgacgacatcttgcgggagatgcggctggtgcagatggtccatggcggactgggtttcaaggcgacatggacacccgccgagctgttctcgatcgcgatccgcaatggacgtcgcgcgactggcgcccccggcaatggcgagctcgtcgtcggcaaccctgccgattatgtcgtgatcgatctcgatcggctggatcgagaccagatcatgccggtcgatccgatggcgctgctgttcgcacgaggcaatgcgtccctggtgaaggacgtcgtcgtcgcaggcaaggccatcgtaagggaggggacctgcaccggcgtcgacctgccggccatcgagcgggaattccgggacctgtaccgcgccaatgtcggcaagctcacgaactttcagcggatgtggccgcggctgtccgagcggctgggcggctggttcgaacagcagttgacgtgccagtgatgcggctccggttcgggcaggttgaaaaacgcgatagctggtagtcgctgccatcgccgcgctctcgcgagcgcagctttcaggcgttcgagtatttcttcagctcgagccgtgcgatctgattccggtggacctcgtcgggaccgtcggcaagccgcagcaaccgcgcggtggcataggcctgcgtcaggccgaagtcgtttgaggtgccgccgccgccatgcgcctggatcgcccagtcgatgatctggcaggccatgttgggcacggcgaccttgatcatcgcgatctcggccttcgccaccttgttgccgaccgtgtccatcgcatgggctgcattcagtgtcagcagccgcgcctgctcgatcatgatgcgggcctccgcgatgcgctcctgcgtcaccgtctgctcggagaccggcttgccgaaggcgacacggctgcgcacgcggcggcacatcttctccagcgtgcgttcggcaaggccgatcagccgcatgcagtgatggatgcggccgggcccgaggcggccctgtgcgatctcgaagccgcggccctcgccgagcagcatgttctccttgggcacgcgcacattggtgaagacgacttcggaggcgcggtcgggcacgccgtagaagccgaacacgggcaggggacgcttcacctcgattccgggcgtctccaacggcaccaggatcatggattgctgcttgtgccggtccggattgtcgggatcggtcttgcccatgaagatgcagatcttgcagcgcgggtcggtcgcgttggtcgtgtaccatttgcgcccgttgatgacgtaatggtcgccgtcgcgcacgatcgagctctcgatattggtcgcatcggatgaggcgaccgcaggctcggtcatggcgaagcaggagcggatctcgccagcgagcagcggcttcagccagcgttccttgtccttctcggtaccgtagcgctccagcacctccatgttgccggtgtccggcgccgagcagttgaagacttcgggcgcgaggtgcgagcggcccatgacctcgcagagcggggcatattcgagattggtgaggcccgcgccatggctcgactccggcaggaacaggttccagagcccctcggcgcgcgccagcggcttcagctcctcgaccacgggatagaccttccacggtcccagctcttccgcctcgcgatagaagcgttcctcgttcggatagatgtgccggtccatgaagctctcgagcttgcgcttgagctcgacgactttgggcgacatcgggtagagcatctctgatctccttgatcgatggacggcatctagccgatttcgagatagtccggatctggcagtctgggaaatggtgcggtcggcagcgtctgataccagaatgcgacg

SEQ ID NO: 102 - DNA, 10917 bp, Bradyrhizobium colbertium
gggttgcgctcgttgcgggacttaacccaacatctcacgacacgagctgacgacagccatgcagcacctgtgctccaggctccgaagagagggtcacatctctgcgaccggtcctggacatgtcaagggctggtaaggttctgcgcgttgcgtcgaattaaaccacatgctccaccgcttgtgcgggcccccgtcaattcctttgagttttaatcttgcgaccgtactccccaggcggaatgcttaaagcgttagctgcgccactagtgagtaaacccactaacggctggcattcatcgtttacggcgtggactaccagggtatctaatcctgtttgctccccacgctttcgtgcctcagcgtcagtatcgggccagtgagccgccttcgccactggtgttcttgcgaatatctacgaatttcacctctacactcgcagttccactcacctctcccgaactcaagatcttcagtatcaaaggcagttctggagttgagctccaggatttcacccctgacttaaagacccgcctacgcaccctttacgcccagtgattccgagcaacgctagcccccttcgtattaccgcggctgctggcacgaagttagccggggcttattcttgcggtaccgtcattatcttcccgcacaaaagagctttacaaccctagggccttcatcactcacgcggcatggctggatcagggttgcccccattgtccaatattccccactgctgcctcccgtaggagtttgggccgtgtctcagtcccaatgtggctgatcatcctctcagaccagctactgatcgtcgccttggtaggccattaccctaccaactagctaatcagacgcgggccgatctttcggcgataaatctttccccgtaagggcttatccggtattagcacaagtttccctgtgttgttccgaaccaaaaggtacgttcccacgcgttactcacccgtctgccgctgacgtattgctacgcccgctcgacttgcatgtgttaagcctgccgccagcgttcgctctgagccaggatcaaactctcaagttggacttgaactttgaaccggctgatcacaacgtttgacgaggtcccaccattatcgaccgaagtcgatgtgctgcctgcgattcacatcgctggcaacgatggtgtttcctttaaaacgtgtaccgccgaagtctttcgtccggtctcgatcagaaaagccgaagctttccagaagcgagacccgcaaggactccgccgtccacgtttctctttcttcatcttcacttgtcaaacagcccgggaccgtggaggccccaaccttccggcttggaagggttccgacacccttaccgacgatgaatgactccaaccgactggtgtcgattgttgtgtcactcaacaaggtgaggagcatcagtggcgcgttcgctcgccttggtcagtgacccggcggcgccgcgctcagtggttggggttataggccccgccttccgggctgtcaacgccaatcgtcaacaaatcgtcgcacagcgggatgacgaaaaaatttgcatgtttgcaagcacttaggaagacgctgggcgggcgaaccgagttcgcccgaagaaaaaactgaaaaaaagtttgggccctggagggctccgcagggctcatgggacgggctcacggcgccgcgccggggctgcccctggcgccgtccgcttcagcaagtattttccatgtcaggcgccgtacttgagccacattcccgcggcgttctgataagagacaagcttgaatcgcgggatgcctgtgggggctgccggcgattttcatggggtcagaggaaggcgatcttgcagatgacgcgaccttccttcggcgttcgagagacatcgagagagctttatccgtccagttgttcgtaatttcggccggccccagcgaaggggctttctgagcgcggacgcctgtgcggcttgccttttccggcgatcccccttgaagagggcgaccagggaaaaggttcgaagcgagctttctcggggtcgttgattgggggacttgggttgaaccacaggacgtcacgcggcactttcgggcgcgagaccgggatcatcgatctcggccacgagccgccgctgtccgtcgatggctccgaagccgccgtgatcgaccgtcgccgcgtctcggtgcaatggttcagtgggacaattctgaccggactctgcggcgcagccctgatcggcggcgccgttttcgcatcgctcgacggcgaaatgaccttcgccaaggtgccggagcgggtcgaaggagcgctgcgcggtgcattcggcgccgccgatcgcgcggccacgctgcacaagagcgatcgcctgccgccgccgagcgaatccacggcctcgcgcaacatcgtgcgcgtctcgacggttgcccgcgtcggtagccgcgacgtgatgcgggtgcgccccttcgtccggatcgccggaaatttgtcgatgacgacgagcgacctgtcggcgaagatcccaccgttcaacgcccagcgcctgctcaccgatgtcggctccgatccgaagacggcatccgacgatcccaacaatccggaagccgtcgagcccgacgcggaagtgtccttcgtcaccaaggacctgtcggcggtgctgccgaaggccaagatttccgcggtggtggcgctcgacgatatcctgatgcgggtccgcgacgccgccaactggcgcggcaatggcggcgtgcgttacgcctcgcttgccaatgccacggccgacatctccggcgcgaccggcccctccgacatcaagatggcctacgccaccgaaacgtcctcgtccgatccctatgccggtttcgagacgcgcgtggtgccggagaacgtcacgctgctgcccaagaccaaggagcagatcaccggcggcaatcccaacggcgaacgcgtccacatggtcaagaagggcgacagcgtcgctggcgtgctgcgcgatctcggcgcgaccgccgaggagatcaaggccatcacggcaacgctcggcccgcgcggccgcgatggcggcctcaaggaaggcgagaagctccgcatcctgatggcgcccgcaagccccggcgcgcgcctgcaaccctaccgtgtcgtcatcgccaacgagaccatggtcgaggcgattgccgcattgtccgatctcggcaaatacgtcgcggtcgacgtctccagcatgaataccgtcgcggacgctgcggccaacgccagcagcgacgacgacagcgatgacgacggctccggcgtgcggctctaccagagcatctacgagacggcgatgcgcaacaaggtgccgatgcccgtcatcgaggacatgatcaagatctactcctacgacgtcgatttccagcgcaaggtgcagccgggcgactcgttcgatgttttctacgccggtgaggacgagggcgtgacgtcgagcgaaaagaacgaggtgctgttcgcctcgctgaccgtcggcggcgagaccaagaaatactatcgctaccagagccccgacgatggcgtcgtcgactactacgacgagaccggcaagagcgcgaaaaagttcctggtcagaaagcccgtcaacaacgccatcatgcgctccggtttcggcggccgccgtcacccgatcctgggctatgtgaagatgcataccggcgtcgactggtcgacctcctacggcacgccgatcttcgcctccggaaacggcatgatcgagaaggccggccccgagggcggctacggcaagtacatccgcatcaagcacgccaacggctatgagaccgcctatggccacatgtcggccttcgccaagggcatggagcccggcaagaaggtgcggcagggccaggtgatcggcttcgtcggttcgtcgggcctgtcgaccggtccgcacgtccattacgagatcctggtcaatggccgcttcgtcgatccgatgcgcgtgaagctgccgcgcggtcgttcgctggaaggcccgatgctggcaagcttcgaaaaggagcgcgaccggctcgagggcatgatgagcggccgtggcagcgccatcgcccgcatgtcggacgcaacgggcggtcccttgcaggtcaccaaccggtaggtcggcaacgccgatttcgacggacattttcgaacaagatttcaaacgatgacgcggcacagcgaggcgcgcttggcggtgtcgcaacgtcaagtttcgtttgccaaagccgctggacgggcgaatactttccaaaaaaaaacgggaggtctcgccatgaagaatgggctcgcctgcgcagctgtcgtcgctgcgctgttctcagccacgaccgcttcggccgacggctgggaggtcacaaggctcgttccaggctcggccttccacggcgtgcacgggctcgcggtcgacaaagccggccatctgtttgccggcagcgtcgcgggcgcggcgctctacgaggtcgacatcgccagcggtagcgccaaggttgcaatcccggcgccggtcggaatggccgacgacatcgcgttcgcgcccgatggcaccatggcctggaccggatttctcgccggcgagctctatgcacgcaagggcgacggccggatcaagaagctcgcgagcggccttcccggcatcaactcgctcgccttccgcaaggacggcaggctctacgccaccaccgtcttcctcggcgacacgctttatgaaatcgacgtcgagggcatcaagccgccgcgtcagatcatggagaagatgggcggactcaacggcttcgagttcggtcccgacgacaagctctacggtccgctctggttcaagggccaggtcgccaaggtcgatgtcgacaaggcggagctgaccgtcgtcgccgagggcttcaaagtgccggccgcggtgaacttcgattccaggggcaacctgttcgtgatcgacaccgcgctcggccagctcgtccgggtcgaccccaaatcgggcgccaaggccaccgtcgcgcaattgaagccgtcgctggacaatctcgccatcgacggcagggatcgcatctacgtctccaacatggccgacaacggcatccaggagatcgatccggcgaccggccaagccaagcagatcatcatcggcaggctcgcgctacccggcgggatcggcgtcacctcggagaacggcaaggacacgatccacgtcgccgacgtgttcgcctatcgcacggtggacggggccaccggcgaggttaccgagaagacgcgcatgcatgccgccggcaggacgctcgaataccccatgagcgcgacggcgaagggcaacgacgtgatcctgtcgagctggttcaccggaaccgtgcaggtcatcgacggcaagaccggcgcgacgcgagacatgctgcacggcttcaaggcaccgcatgacgcggtcgtgctcgcggacggcagcatcctggtggccgagcttgggaccaagtcactggtcaaggtgagcggtgagcatggcaaggatcgcgtcacgctgatcggcgatctcgagggaccggtggggctggtccgcggcgccggcgacgaggtctacgtcaccgaagcctttgccggcaccgtctccaggatcgacggcaatggcaagaaggcgctggtcgccaaggagctgaaaatgcccgaaggcatcgcgcgcaccagcgacggccaactgatcgtggcggaggtcggcgccaaacggctgatcgcgatcgcaccggagagcggcaaaatcaccgagatcgcggccaatctcccgatcggcctcaccggcgcccctggcggcctgccgacgcatatcccgaccggcgtcgccgtcggtgcaacgggcgcgatctacttcagctcggatgtcgagaacgcgatctacaaggcggtgaagaagtaggagcgctcgtgcaggtccgccgcgcggaacctgcgcgccggttctcggttagacgcagacggaagccgaccagcaggagaatcgcccatgacgcgcctctcacgcgacgatgtcgtcaaagccgtggaccgcgccgacgatgtcaccattgcccagatcatcggaacaggcgcgaccgctgaggaactcgccgaggcccaggcctggctcgccaatgacgagcccatgatcaacgatttgcggccgctggcgcagggacgggtgcgcgagttggttgatattctgtcggagctggaagaggacgacgaggaggctggaccggcgaaagcgggctcagcgcccgcagccggctaggactgcgcgcaccttcaccaaacataattcgccccggagaggcgaaacctctccggggcgggtaatcgcggcattgccgatcaattcagcttgcgcttcgccaccggcgcctcgaactgcgcaatctcggcggtctgcggcgccttgccgttgaaggtcagcacattgccttcggacgagatcgcaacgctgtcgccgtccctgacgtcgccggcgaggatcatctcggcgagcgggtcctggagatagcgctggatcacccgcttcagcggccttgcgccgtaggcgggatcccagcccttggcggcgagccagtcgcggccggcggcatcgagcgtcagcacgatcttgcgatcggtcagcagcttctgcagccgcgtgaactggatctcgacgatgcggcccatctcgctgcgctgcaggcggtggaacaggatgatctcgtcgacgcggttgaggaattcggggcggaagtgcccccgcaccattcccatcacctgctcgcgcaccgccgaggtgtcctcgccctccggctggttcaccagatactccgaaccgaggttcgaggtcatgatgatcagcgtgttgcggaaatcgacggtgcggccctggccatcggtcaggcggccgtcgtcgagcacctgcaacaggacgttgaagacgtcgggatgcgctttctcgatctcatcgaacaacaccacttggtagggccggcgccgtaccgcctcggtgagcgcgccgccctcgtcatagccgacatagcccggaggcgcgccgatcagccgcgagaccgagtgcttctccatgtattcggacatgtcgaggcggaccatcgcggtctcgtcgttgaacaggtactccgccaaggctttggtcagctcggtcttgccgacgccggtggggcccaagaacatgaacgagcctgtcggccggttcgggtcctgcaagcccgctcgcgaacggcgcacggcggtcgcgaccgcacgcacggcctcggcctggccgacgacacgctgccccagctgctcctccatcttgagaagcttctccttctcgccttccagcatcttgtcgacgggcacgccagtccaccgcgagaccacctgcgcgatgtggttggcggtcaccgcctcctccatcatctcgccggagttctccttggcctcgatgtcggctagctgcttctcgagctgcgggatgcggccataggccagctcgccggctttctggaattcgccgcgccgctgggcgttggcgagttcgacacgcaggccatcgagctcggccttcagcttctgggcatcggagagcttgctcttctccgcgctccagcgcgccgtcagggcagccgacttctcctctagctcggcaaggtccttctccagggtctggagccgggacttggagccgagatcgctttccttcttcagcgcctcctgctcgatcttgagccggatgatctcgcggtcgagcgaatccagctcttccggcttggaatcgacctgcatcttcagccgcgccgcggcctcgtccatgaggtcgatcgccttgtccggcaggaagcggtcggtgatgtagcggttggacagcgtcgtcgccgcaacaagcgcggaatcggtgatccgcacgccatggtgctgctcgtacttgtccttcaggccgcgcaggatcgagatagtgtcttcgaccgagggctcgctgacgaagatcggctggaagcgccgcgccagcgccgcgtccttctccacgtgcttctgatactcgtccagcgtggtcgcgccgatgcagtgcagctcgccgcgagcgagcgcaggcttgagcaggttggaggcgtccatcgcgccgtcgcccttcccggcgccgatcagcgtgtgcatttcgtcgatgaacaggatgaaagtgccctcgctcccggtcacttcctggagcacggccttcagccgctcctcgaactcgccgcggtacttcgcaccggcgatcagtgcgcccaggtcgagcgagagcagcttcttgtctttcaggctctccggcacgtcgccgttgacgatgcgcagcgcaaggccttccgcgatggcagtcttgccgacgccgggctcgccgatcagcacgggattattcttggtccggcgcgacagcacctggatggtgcggcggatctcctcgtcgcggccgatgaccggatcgagcttgccgtcgcgcgcagcctgggtcaggtcgcgggcatatttcttcagggcgtcataggcgttctcggcggtcgccgaatccgcggtgcggcccttgcgcaacgcctcgatcgccgcattgaggttttgcggggtgacgccgcccttattgaggatcgtgccggcctcgctggtcttctccagcgtgaggccgagcagcagccgctcgacggtgacgaaactgtcgccagccttctcgccggccttctcggccgcgtcgaaggtgcgggcaagctccggcgcgaggtagatctgcccggcgccaccgccggagaccttcggcaccttgccgagcgcgtcctcggtcgccttcaggattgcacgggaattgccgccggcacggtcgatcagaccggcagcgaggccctcattgtcgtccagcaggactttcagaacgtgcagggtggagaattgctggtgcccctcgcgcatcgcgagcgactgcgcagactggatgaagcccctggagcgttcggtgtacttctcgatgttcatcttttctgtccctcggcctgcccttggggccctctcaggcaccccaatacggcatcttcattgggtttccgctgtccgcattgacgtttctcaagcgggaacggtcgtgttttgccgacgttgccgacggcctgaggcagatgtgggaagctgggggccggtgcgaaagaggcaaattcacaatttcgtgcgcttgtgggacggcttggcgcagacaggccgaatcccttaagtaacggcatgatagacagccacattgccgagattaccgatctctaccgatacccgatcaagggcctgacgcccgaacgcctgtcgcgggtccctttgcgggtcggcaagaccctgcccgccgatcgccgctacgccatcgagaacggcccgagcggcttcgatcctgatgcgccccagtggaagccgaaaatccagtttctgatgctggcgcgcaacgagcggctggctgaactccatacccggttcgacgacgccagccatgtgctgaccatcagcagggacggccgaatcgtcgcgagcggggacctcgagaccgccgccggacgtgcggccatcgaggcctatttcagtgagaacttccagccggagctgaagggcccgcccaaggttctgtccggccgcgaccacagcttctccgacgtcgcccgcaaggtcgtctcgatcatcaatctcgacagcgtccgcgcgatcgagaacatgctggacggcgtcgccgtgcatcccctgcgctttcgcgccaatctctacgtcaagggctggccggcttggtcggagctcgacctcgtcggccggacgcttgcggtcgggcaggcccggctgcaggtggtcaagcgcatcgtccgctgcccggccaccaatgtcgatcctgaaacggccaagcgcgatctcgagataccgccgacgctctcgcgccatctcggccacatggattgcggcatctacgccgaggtcatcgccgacggtgacattggcgtcggcgatgcggtggcggtggaggagccgaagctggtgtgagctgctgcgccggctgcgcacactccgtcattgcgaggagcgatgcgacgaagcaatccagaccatttccgcggagggattctggattgcttcgctcgcaatgacgaggcgtcacctcaattgggcatcacatacgcatagatccggccgcgcgagaccggcgcttcgcggacgcggttgccgctgttgccggagatcatgatcggattgccctgcgcatcgatgccggtgatgataccgacatggccgccccggcgcccgcgcgacatcaccgcgatggcgccgacctgcgggccggacacgcgcgtgccgtagcgcgcgaaagagctcgccatgtcggagccggtaccctgatggccggtctgttgcagcaccatattcatgaagcgcgcgcaccaaagtctgccgcgcccggtcggattgccgccgagatagcggcgcgcttcggacacgagacccgatccgccaccgaagccgccgttcatccccgcaccgccggcgttggcattcggatcatagctggcctgggtgttgtcgaagccactcgcctgcagctgtgccgcgctccgcgcgaagcgcgagctgcgtgcatgatggcggtgatgatgatgtctggcgtggtgcacgtgactgtgccgctctgcgctatgacgatgaagcggccgtgccgaggccggagaaacgaacgcggcgaccgccgcaaagaaaagcgccagcgcgacaacacaacgcgacaggcgaaacgcaaacaactcaaccattcttcatccttcgttacaccccgctttcccgatcggcccgtgcggtgggccaaacatgcaggcgcgtatcagaatccggatgtggcgagatcaagacacgttcttggagattttgcgcggaggttaacgatgctagaactcgcatgcgtgaactgcagaacggc

SEQ ID NO: 103 - DNA, 4028 bp, Bradyrhizobium colbertium
caattcctaccaactccgcgacggcaccgagccgacagtcaccgcttaaatagtcgcacgagaacaagcttctacagccgagtataaacggaaaatatcacactctgccttcgccaaatacagcaggaatttttggcttggttctcgcgccgcccgaccgctataccaacgacttctgcaccgctaaatcgcgcgccccgcgcgacgatctctcatcaggtttttgagacagatcgaatcggaatgcaatcagtcgcaaatggcttgagaatgacagacttattttggagcacttgggagattatctcgctgatagagcaggcagctgaccaaaacgctattcaagactgtcttataaacatcgctaaaatttacggatttgcttcggtgtttggcggaatcgtaccaccgggtgatatgcgaaattcaaagaccgaaatccaagctcgcgcggtagtacaatatttccctaaaggctggggagccagatacgtcgatcaaaattatcttccccgagatccgattttagctcggctccaaaaagatcgaaatgcattttcctggtcagacggttatagatcctgtcccgacccagacaatgtgcggattatcggaggtgaggccgccgactttgggctagtggagggctttgtgatccctatcaccacattagaccagcggacggcggcattgtcattcggcggcgcgagggacgacctcagcaatcgtgaccgatcagcacttacttttctcgcacatttcgccatcggccattggttatatttgcgccgtccgaacttaacacgttctaaaccgctctcgcctcgcgaatttgactgtcttctttgggccgcggaaggaaaaaccgattgggaaatatctgtcattctcggtatttctcggtcaacagttacgaagcacatcgcttcagcacgcgagaaacttgatgctgttagcaaatcccacgcgattgcaatcgccatgcgtctaaagattttatgctaaaatctccctcgcacgctccaggaacaattcaatcatcctcggcgagcagcttcattgtaatatgccgttacgatattctcaaacgcgcagtaatcctatttgcggtaccttttagatttcgctggtgatgtttgctcctcatctaagcctttgtcccttgattgattgcaagcttggcttttccgcctcgagctcacgcacgatcttttcctgttccgcgcgaagctttgccaagccatcggtctggatcaaggcagccggcagtggctgtgctggatgttcggcgattgatctcgcggcctcggcagcagcggctgcctcgcgcgcttcccgggccgccgattgttgcgaaccggcaacgatagccctttccgcccgcaattcctgctgcgaggcttgatcaatgcccccgcggccctcctgccgtcgctccgcatcgattgcactacttgcaagatattcatcggacgtcgcctcaaactcttccttgatccgaatctcctgggcgcgctcgataagccgatcggcgttcacgccgacgatggcttcgacctccgcctgggcgagctgctgcacaccgcgttcctgcatccgctggagatcaatccgattggcaagcgtttcaaggtagcgcgccgaagtctcacggaactgctgcttggtctccccatctaacaggtcgctggttcgcgaaaccgcttcgttcatgagtcgcagatcctggaccatctgttccgatgtaattggcatgtcgccctccttgctcaacaattccacccgtttgccgatcgtgtgaagaatggctccaacagtctgcgccatcaacagccgctcaagcatatccttcgccatccggtttgaaggctgctccaccgtgactgccttccaggccacgatgctctcgttcacgactttgcggtcaggcgcggacatcggcaagcggatgggattggtcctcgccacccggatccgctgccgcgcattgtcgataagacgttgattggcgggatcggcagcataggcgcgatctcgggcttctcgcgccggacgcggccgatccgccgcttcgacgatcgccctatccttcgggccgtaactttgcgaggaagcccgctccttcgcggtggtcgcgacgatcttcaagccttgtgcctgagcgtgctgtgcatacacctcgcgccattccgcgaacgtatcccgattgggacggatcttctggccggattcgttcttcacggtgatgacggcgtgagcgtgaatgtgcccggccgattccttgtccgtatgaacgccaaacatgaacttatgatcggcaaagcgatcgtgcaggaacgcacgcgctgcatcggtgaaggcggccacatccgttccagccttcgccgatatgatcaggtgcatcgtatcgcgcgcggattgcgaccggagcgacggaccccattcgcgcgcggcgacccgcgcatctgccacgttggacaagctcttgccgcggtcgtcgagtgctgcgtccttctcgatcagcttattgagcctgtaggtgacgccgtctcgaccatggctggtcgccccgggtcggattaacaccgcctgcccgtcgatcgccgaggccgcttcgatcctggcgcggacagcggcggcggacactgaatcaagacggcgtggtcgggcgtcatgatcccgatcggcagcctgggcctctctgatgcgaaaccgttccttgccgctcccggccatcgcggcgacgacgtgcgcctcgagcgcgcccttgtcgtcgacgtcgacgcgagccgcgtagcgatgtcccgagaagccggccgcgatcgccttctggtaggccgctcggccttcggcattgtctgagacaccttcaaacttcagacggaatgcgccaacgtcctggctctccgcacgcttcgaaaaatctgccgaccaggccttgatctcgtcggcgacggcttcgcggttcgtcaacaaccgcccgtcatgggtctcgagcggaacatcttcgcgctggacatattggccggtcgccgtggcgcgcgtgacgccgcgcgcataggacactaccttgatgacagcaggctggtagccggcagcgagttgccgggctcggccaaggggtccgccctgtcctgccccgccggaactcattgcggtcccgctagcgccgaatcctccggagatcgggctcggcgcgccacgcagaggcgcggtcccaggtcctgcgccgccacccccgctcgcggccgggatcgagcgggcccgttcctcatcccactcacccgtgatggtcgcgccacggatgatgtcttgtgccggcggcgtcttgggaagcggcgccacccgtgctcgcctcgcgcggacgtcctcgtccaacgcgccgggccggcggggccgccgacgttccgctcgcgcctccgcgaccgcccgacgcgcggcctcgacctgttcaagccaccagacaatctgtgctgcgcggctcatggggcggcctcatcggcgacgaagtgcaacgtcaacttggcctctcgccgcaacttcgacccgtaggcgaccgtcatttcggtcagctcatcattaatcgcggcgacgacttcatgaagacctcgccacacgggctccgtgtcctcgatccgcacggcctggccgcgatggatggctctaagcacctgcgccagattgcggccgaccatccggacctgctgcgcgagttcgacgacagcgcgcgtgttctcggccgacaaggccggtcccgcctgaacagacgctcggatcaatcgccgcaccacctccgctttcggcaggccgaacaacgcgacagcctcctgcagacgctgctcatctgcatcggacagctcggtccgaagcctcggcttgcgtcgcagggctcttgcagagcggaccatcgaggttcccctcctcctcccgttcgctcggctcgccggtcgtgagaccggagccgactacgccggcgtcccgacaggacgccggcgtcgcgcgtcagcgccctccggctgcgcccagca

SEQ ID NO: 104 - DNA, 8277 bp, Bradyrhizobium colbertium
cgcgcaagcaattcggggcagcttgagacgatgccgcagcagcggccagaggactcgtgtcatgctatccaccatcgcggactacaccaggctgaccaaggacatgggcaagtcgctgacgcaggtggcgaagcagccggatgtcagccgcgagaccgactatttcctcagccatatcggcaacgtgaagagtattgacgatttcctgaaggactatcgtctgtattcctatgcgatgaaggcttatggcctcagcgacatgacctatgccaaggcgttcatgcgcaaggtgctgaccgagggggtaacgagcaaggacgccttcgccaacaagctgaccgacacccgctaccggcaattcgccaccgccttcaatttcgccgccctcggcgacaaggcgacccagaccgccgcggccacgaccggaacggcgacccagtacgtcacgcagaccatggaggagaaggccggcgatcagaacgaaggcctgcgattggcgctgtacttcacccgcaaggcttccacgatcacgaccgcctatcagatcctcgcggacaaggcgctgacgcaggtcgttcagaccgcactcggcctgccggcgacgatcagttcggccgacatcgacgcccaggccaagatgatcgcgagcaagatcgagctcaccgacttccaggatccggccaagatcaccaaattcgtgcagcgctttgcggcgatgtgggatgcgacccaggcccggaacgacagctcaaccaaccccgccctggtcctgatcgccggcgccgcgacgtcgatcagcatggacaccaacgtgctgacgacccttcagaacatcaaattcaacaggtaagcgatgcaatcggctctctacgtgggtctgtcggcgcaagttgcactcgagaagcggctccagacgatcgccaacaacgtcgccaacgtcaacacggcggcgttccgcaccgacgtggtgaagttcgaaaccgtgctgtccaaggcaggccctactgcggtggcgttctcttcgccgggcgacaacgtcatctcgcgcgagatgggcaacatcaccgaaagcggaaacccgctcgatgtcgccgtggtcggacagggctggatcgccttcgccggtccgaacggcacggtctacacgcgtgacggccgtctccagatcgcccccaacggcgatctccagaccgtgagcggctttccggtcgtcgattccggcggcgcgcagatcacgctcgacccgaacggcggaccgatctcgatcgcgcgcagcggcgccatcacccaggacaacaacgagatcggcaccatcggcctgttcaacattccggccgacgccaacctcgagcgctacggcaattccggcgtgacgcccgaccggcccgcgacggccattgcagatttctcccgggacggcttcaagcaaggctatgtcgagggctccggggccaatccgatgctcgaactgacgcggctgatcgcggcctcgcgcgccttcgacggcaccaattcgatgatcgagggcaccgagagctcgctccagaacgccatccgggcgctcggcgaacccggcaaatagatcgcgcctcgtgcgcattgagattgaagtggacggtttccttgaacgctcttcggcaactcgaatgggcgctgctcgagctgcagcagagcactccgctggcaagcgtcagcggcgcaatctccgagatcgcgccgacgcatttccgcgtctccggcctctcgcgcttcgtcaagctcggcgagctcatcggcgtcaactccgccggcaagcgccagatcggcgaggtggtacggatcgacaatgacggcatcgttgccaagccattcgaccggcagtttggcggcggactcggctcggtcgcttaccggatgccccccctgtcgttcgcgcccgatccgagttggaaaggccgcgtgatcaacgccgtcggcgcaccgctggacggattgggacccctcacccagggatcgcaggcggtctcggcagaggcggaggcgccctcagcgatgaagcgcgcacgcgtgcacaaaccgctgcgcaccggcgtgcgcgtgatcgatctgttcgcaccaatctgcgccggccagcgcgtcggcatctttgccggatcgggcgtcggtaaatcgacgttgctcgcgatgctcgcccgcagccagggcttcgacaccgtcgtgctggcactggtcggcgagcgcggccgcgaggtgcgcgagttcatcgaggacgtgctgggccccgaccgccaccgtgccgtcaccatcgtgtcgacaggcgacgaaagcccgatgatgcggcggctggcgccgaagactgcgatggcagtcgccgaatacttccgcgaccggggcgaatcggtcctgctcatggtcgattcgatcacccgtttcgcccatgccgcccgcgaggtcgcgctggcagccggggagcctgcggtcgcacgcggctacgcgccgacggtgttcaccgatctgccgcgcctgcttgaacgcgccggccccggcgaggagggagccggcaccatcaccgggatcttctccgtgctggtcgatggcgacgatcacaacgagccgatcgcggacaccatccgcagcacactcgatgggcacatcgtgctctccaggcacatcgccgatcaggcgcgctatccggccgtcgacgttctggcctcggtgtcgcgcctcgctcataacgtctgggatcccgaggagcgggagctcgtgagcaagctgcgcgccatgatcgcgaaatacgaggacacgcgcgaccttcgcctgatgggtggatatcaatcggggcgcgattcgggcctcgaccaggccgtcgacatggtcccgcgaatctacgacgcgatgcggcagggcgcgtcggctccgccgagcgccgatccgttccgcgagctgcgggataccctcaagggcgagtagcaggtaaggaggacggggccacgcccaggagccgcctgccgtccgtcttgcacgagttttcgacaggagattgcgcatgtcgctacgcccccggcgcatgcgcgcgggcattcatcacaaatttccgtcatgagcgcacccaccattcggatcagatcaacgcgtgaccgggcgcacgcactcggtggacgattctgtgagaccgggcaacaacaaccgatacgtgcaattcctccgaattccccgtcgattttccggcagaagcgcacaagttgtggatgaagtacggacgcacatcgtcgtcatgcacaagcttcaatcagtttgcgtcgatgaaagacagcaacatgccgtgtagtcaaacggtcgtagcgttgagcgcacgttactggatgcgcagcgattgcgttcactatcatgtgtccggaagagcgagattgtcttgaacgttacattcgcctgcggtgacatccagtctgcgcgagtgtctcgacttgattttgttgagaagctcattcatcgtttcgacggaatacaagaaacgtctgcttatgacttgagctttgggggcttcggttgaactactccgatccaccgtctgccggcgacggcaatctcggctcccgcgcgacgaacacgccgtcggcatactatcggcaacacggcctcgcgctcccagcgaggcgacgcctatcagccgagatcggccgcggcgcggtccatgccttcgaacaagagcacgacacgacaggctcgtcgaacacgcagggcacaaagcggcttcggcacgccgtggacgaagttccgggggcggggtagatttcatgccattggcgcgagaagccgtcgagctgctggttcaggcggcgagggcttggtatttcgaaggcaatcagcatggattgcgcgaccgggagtggatggcgctgcgctttcttggccgcgccaacaggttttcgcgcacaccgtccgcgcttgccggcttcatcggcgccacccgggcgactgcatcgcagatcgtgaagactctggagagcaagtcctttctggtgcggaagccgtcgcatgaggacaagcgttccgtcgtcctgcacgtcacctcccagggcgagaaatgcctgagccagcacgacccgatcaatcatgtggtgaatgccgtcgcggcactcgggaccgacgaatgtatcaggctgcgcgactcgctgcgcgaaatcctcaatcacctcgatgcggcccatcagcgtctcgacgccagcatctgccgggactgcatgtttctcgccgagcgcagcccaagcaccggcaagggacgaacgaccgccgagttcatgtgtcggctctatcgtgctccgatctcgctcgaggagactgaactgctctgcacgagtttcgagcgcacgcgcgaccgccccaagatcgagcagcatctcgaccgcgcgcgcgtggcgggccaaggctgaggcgggcgctcgcaacggtggagcaacaggccttggccttggccagcgatcacgtttagcgaaggcggcccggaccacggccttgcccacgcgcggctcgcaagttcggcacagatacccacgcgtcgcggaatgaacgagacgcgcctttcggcgccattcatcggcgcgcggttgcgatctctcgggaataccctgtccgtgttctgtccccggcggcccagcgcggccttgtatgcattatcccagttgccatcgccgcggacttcgctttacatgccggcaactcgcccgcggatgacagcccgggctcaagaaccgcacaaatcgtcaaagggacggagcatggcgcgcaacatattgattctgggagcttcttacggctccctgctgggcacgaagctgctcatggccgggcacaacgtgacccttgtctgccgcgccaagacagcggagctgatcaatcgcgacggtaccgaggtgcgcatcaagctgcgggacgaggcggtgcaccgtgcgatcctctcacgggatttgcccggcaagcttgatgcggtcacgccggccaatgtcgatctgtcacgttacgacctggtggcccttgcgatgcaggagccgcaatacaccaaccacacggtgcgcgttctcatggtcaagattgcggcggccaaactgccgtgcctgtcgatcatgaacatgccgccgctgccctatctgaagcgaattccggcgctcgccggcatggatctcgaagaggcctacaccaatgcgcaggtgtgggagcggttcgagccgggcctggtaacgttgtgctcgcccgacccccaggcattccgtccgccggaagaagccgcgaacgtgcttcatgtcgggctacccaccaacttcaaggcatcgatctttgccgacgagaagcacaacaagctgctgcgcgaattggaggccgatatcgacgcggtgacgctcgacggccatgacgtgcccgtgaagctaaaggtgttcgactcgctattcgtaccgctggcaaaatggtcgatgctgctcaccggcaattaccgctgcatcacaccgaacgagccgcagtcgatccgcgatgccgtgcacggcgatctcaagcgttcgcagacgatttacgatcacgtcgacgcgattgcccgtcggctcggcgccgatccgcaggatcaggtgccgttcgcgaaatatgccaaggcggccgagagcctgctcaagccgtcgtcggccgcgcgcgcagtcgcgagcggcgcacccttcattgagcgcgtcgacctcctcgtgaagctgatctcgcatcagctcggcatgcccaacgccgagatcgaccgcacggtcgagacggtagaccagaagctgaatgagaagatcgtgcagggcggatccggcgcgcagtaatagggtggcttccggatgcgggcgatcaggcgatcaggaatgattgaagccagatcaggcctgtcacggcgacgagcctgaccgcgcggttgggcgtgactaggtccggacgcctgaggcagcgggcgccccggtcgcgccagagcatggcgcgctccttgcttctgcttgcggcggagcttgcggttatctgctcgcgactggtgttgcggctggcgatcggtcccgcgtcagcgagatcccgattgcggcggccgtgctccgcatcgccgtgacaaatctacgtctacgtcctgtgtcttgccgtcatctgccgctcgttcacctgcgcctgactgcaaggccatctcgaagacggctggttcccgagaaggccggcctcgtcgtgcatttcagccaggacgctgtcgatgtcactgttgacgacgagtgtccctatgcaactcttgtcgtttcagcgcagaccgtttcctgctgcttggaagcaccatcattatcgagcctacgccgttcggaacagcgttcctgccgctgactgccgatactttccggttccggcgggcgacatcgccagaacacctgcggcagctgcacgagcgcatcgccgagatcgaacggatcaggcaggaattcggctcctgcgatcccagagaaccaggatgacgatccccaagcgccgtatcggcccgcactcttacggttgttgcatcgcgcctgaactccgccgtgggcaacgcggcctgattagcgccgtaacgctcgacgcgccccggcgcggttggtaagccgctgtccgcagatgacaggacttgagtcgacgttatgacagttgcaatcgagatggggcagaccacggcaggcgccgcggccgccatggacctcgaggaactgctggcgacccgcctcctggtgcaaggtaattcgggctcgggcaaatcgcacctgctgcggcggctcctggagcagagcgcgccgtgggtgcagcaggccatcatcgatcccgagggagacttcgtcacgctggcggagcgcttcggccatctcgtgatcgaggccgaggatcacaccgagcgcggccttcaggtcgccggcgagcgcgcgcggctgcatcgcgtctccaccgtgctcaacctcgaagggctggatgccgagaaccagatgcgccgtgccgcggcgttcctcggcggcctgttcgacgtcgaccgtgaccattggtatccgatgctcgtcgtcgtcgacgaggcgcagctgttcgcccctgcggtcgccggcgaagtctcggacgaggcgcggaagctgtcgcttggcgcgatgaccaatctgatgtgccgcggccgcaagcgcgggcttgccggtatcatcgcgacccagcggctggccaagctcgccaagaacgttgccgcggaagcctccaacttcctgatgggtcggaccttcctcgacattgacatggcgcgcgcggccgacctgctcggcatggaacgacggcaggccgaagcctttcgcgatctcgagcgtggacagttcatggcgctgggacctgcgctgtcgcgccggccgctgcgtctgaacatcggcccgaccgagaccagcccgcgcaattccacgccgcggctgatgccgctgccggaagcaacgttggaggatgcgcgcgccgtgatcctcgccgcgccgccgcccgatgccagccgcccgcagcgcaggcccgctcccgatctgctcgagcagctgcgtgccgcaaggacggccgcgacagcggagatcaggcccgaggtggtcgaggtgccggtcagcgccgaggagttcgcgcagcggcgcgagcgcgtggatcggactctgcgtgccgtgctggccgagcctgacgccgggttccgcgccatcggcgtgctctatcaggaattcgtggtccgctgccgtatcgagggcctcggcgcggcggtgcccgatctcaacgagtttcgccgcatgctgacgcatgcgcgcgccgggctcggcaccgagcttgccgaggacgacgcctggcaggatgtgtcgctgcgcgcctcgatcctgcctgacgacatgcagggcgtgttcatgatgatcgcgcgtgcggcgaaggaaggctggccctgtcccggcgacgcggcgatcgcccgtgcctacggctcgcattcgctacgtcgcgcgcagcggctgctcggctacatggaggagcagggcctgatcgtcgtccagctcgacgggggcggacgccggatcgtgacgctggtggaactggcctgggcgacggcaccgggcgatcccaacggcgacgatctgccggtggaagaggtacagagcgcggcttcgctctgagctgcggcgtcaggtacgcctcatcacaaccgcctcggtcgcatcaaagcctgctccagcttcgggcgaagcgcgccggtcatccgcgaacatgcggcgatggagcacgaccgagacgagc

SEQ ID NO: 105 - DNA, 28023 bp, Bradyrhizobium colbertium
ggcctggggctggggtaccgacgctgccgagagcgcgcggatcgtcgacgcttacctcgacgccggcggcaacttcatcgacacggccaacctgtatgtgaacggggaaagcgagacgattctcggcggcatcatcacacccgagcgccgaaaccgcatcgtccttgctaccaagttcacagatgcgcccgaaggcgacgatcccaatgccgccggcaatcaccggaagagcatggtgcagtcgatcgaggccagcctgcgacgtctgaagaccgaccgcatcgacctttactacgtccatagctgggatttcaccacgcggcccgacgaggtcatgcgcggccttgatgacctcgtccgtcagggcaagatcctctacgccgggatcagcgacacgcctgcctggatcatctcgcggtcgaacgagctggccgatctgcgcggctggacgccgttcgttgcgaaccagatcgagtacagcctgctcgagcgcacgcccgagcgcgagcaacttccgatgtcgcgcacgctcgacctcggcgtcgtagcctggtcgccgctggcgtccggcctgctcaccggcaagtacacccgcgcggatggcggcagtaggcggcgcctcgacacggctccattcaaggagcgcgacgagcgcaatctcaagatcgcacgcttggtcgacacgatcgccgatgagctcggcgtagcgtccgctcaagtggcgttggcatgggtacgggatcaaggtgtgatcccgatcgttggcgcgacccgcaccgatcagatcacaagcaatctcggctacgtggacctgacattgacgtccgaacatctggcacgcatgaacgaggcgagccgcatcgagctcggctttccacacgactttgtcgagagcgcacgtggcttcgtctacggcggaatgttccaccggatcgatcgccatcgtgaggaagggattcgactgagcagaagctgatcagcgccacagtagatgcgatgcttgtaggcttcagaaccagataacccgctgcgctcgggccatcgagaaaggagcaaaggagatggacagcaaggaagaacttcccatccagggcggcgctcgttgctcgttggcccttgagctcggaccgcagaacatccgcgtcaacgcggtcgcgcctggcgcggtgacgatcaccgatttcgggcgcaacaatccgccgccgaccccggaggggatcaggaccggcaatagcaaccatggcatcggccggatgggcacgacgatggagatcgccaaggcgatgatgtggctgatcgccccctacgccagcttcgtggctggtgaagtcttcgccgtgaatggagcgtcccgtgtcggatgaaaatatcatgatcgaccgtcgtcacctcatgggagcagtcggtctcgccgccgtggcctttccgggcgcagcgcctgcgcaaccgagtgagtgggacgcatcgccccgcgcgcgttttgcaggccgctcggtcatcgtgaccggcgcgacatcgggcatcggcgaggcggtcgcgcgggcttttgcccgcgaaggcgcatcggtcgccttcaacggccggcgcgaggcgctcggccgccaggtcgaggcctcgatcaacgaggacccctgtgacgaggcgagcgcgcgggcgtgccttctacttccgcagcgatgtgcgcgacgctacccaggtcgaacggttcgtcgctgtggccgtcgagcgccacggcgccctccacatcgcctacaacaatgccggcgtcgttttcgggaacggcagcctcaagggcaacgccccacttgccgatatctcggccgacttcttcgacgatgtctggctgaccaatacgcgcggcgtcttcctggcgatgaagcacgagatcccgctgatgctcaggaacgcgccttggggccgcttcggcctgcgcggcgtgatcgtgaactgcgcctcggtttcgggtcatggcggcttcgccggcatcggcagctattcgacgagcaagcacggcgtgctggggctcacgcgctgcgcggcgctcgattacggcgcgcgtggcatccgcgtgaactcgatctcgcccggcggcgtaaacacgcccatgcgtcgcgcctcgatcgaagcgcaaggcggcgatcctgaccagcttccggcacccgacattcaataccggacgaacaccgtcgaggagatgtcggacgtcgtgctctaccttgccgaaggtgacgcaccgtcctcgatcttaggcaccgacatcgacgtcacaatgggaatggtgaccgggccccttacgccgcccgacccgcgcaagcgcggatagcattcgcagggtgtggatgtgaacgagcaaatgcggtcagcgttggtcacaggcgccaaccggggcaccgggccggaagtatggctatgaagttcgttaatgattaggttccggcgatcgccgaggccattgagggttgtcagccaagcaaggcactccgcgggcaagcgatcgagctgctcagttccctcctcggcaaaggttggcgccgtgctaagaaggggtttgtcgatctcgcgcgaatgaagcatttgatcgggagcaaaagctatcctcgtctcacaagacgccattgtatgactaaccatgcttacaattgaaccgtgagatatcgaagccgaagcgtgcagctaatattgccgccagcgctccgcggcaggtcgagaattagttccggttgcaggtccatgggcgcaagcaggtcgggtgcctcacgcccaagtgctctgcgccggatcgtgaatctcttgtcgctactgaccccgagcggctaggtgaggaagcgtcggcccagtcaacgtatccaagccaatgagcgtgttggtggcggcgagcgcgtgctcgctgagctccggcatgcgtgggcatggtccggcgtaagcagtcgccagtcccgccgactgcatccagccgctcacgccgcatgctaatgatgtccggcatcacgaggtcgcaggcctggcggcctgaggcgacgcgccggtcagtcatttatcacgcggcctccctccgagctctgccactgcggcgaccacttccgacggctcgggccggcgggtgtagtcggggtcggcctccgcgtaggcaatcgcgccgtccgcgcgcacgacgaagcgggcgggcatcggcaacgtccagctgtcgtcgccgttgaacgatggcaggtccacgccgtaaccgcgatagagcttctgcacggcaggctcgagcgtgaagcgcagcccgaaggccgctgcgatctcgttacccggatcgctcaggatcgggaagctcagcccatcctttcgcttcgccttgcggctgttgggcggcgtctgaggcgagattgcgacgagcgccgcgccgagacggctgatctcgggcgcgacttcctcgagtgcctgaagatcggcattgcagtagggacaccacacgccccgatagaagctcacaaccacaggccccttctggcgcaggtcggccagcgagatggcctcccctccctcgtccagcagtacgaaatccggagcgcgctcgccgggcctgagcacgccggcgaggatgcccgaccgtcgcagcgcgtcggtcgcggcggacatggtggccatctcttcggccggaagctgcgtcgcagtctcggcagagatgcgctccaaacgttcgcgaagtaccatggcttatctcctcttgaggtgagtggttggcttgccgcgcggcgatgttggccgagcatgaccttcaggcgttctgttccttctccggagcggcgccgaccgtcttcgcgccaccgcgaagcgcagccgacgcgactgcgccgatcaccagcccgcagccgaggacctggagcacggagaggtgctcaccgagaaacagaactgcgccgccggcaccgaagaccggggtaagcgccaggaacagcgcggcggtcccgaccggaagcgcgcgcagcccgacaaggtaaagccagaacggcagcgcatattggacgactccggaggtgccggcgagcagccaagtagacaggggcatggcagcgaggttcagccgctcaattcctagaaccagcgcgccgagcaacaggaggacgacaaaaccaaggccgatcgtctgctgcagcgcggcgagcggcaggggggctattttggtcgatagtcggcttgtagtaacgacgtaagccgccgcgaagagtgtaccgagaacgatgagtccgtccccgagaagcgagttctcggcgcccgccggatcgctggccgtgaccagggcgacgcccggcacggcgatgaagatggcggcgagcgtcgcccgttgcgggcggacggcaaacagcacccaggcgatcagcacgacatggagcggttcggtcgccgcgatcaacgaagcgtgtgccgccccggtgagagcgaggccgctcgtaccgactgcgtaggcgagccccggctcgagcacgccggagagagcggcgcgccgcccgtccgcgtcgagcggggctcgttggccggacagtgcgactgcgatccataggagcgctacgctgactccgagctgcagggcaagcagcgtgaagggcggcacatggccgagcgcgctctttgacataactgtggccacgccccagcaggcggacgaaccgaccattgcagcgacggccagcgggacggcgctcccggccttcgtacgcgcgcctccgcgaaggcgcatcagactctcgcccagcacgaccgagctgacgccgagcagcgccacgtccttgatgaggaacgagcctaccgcgttgagccagggaaatccgccttcggccgcttcccagacaggcagggcgagcatggtagagcaggtgacaacgaaggtgagcgctcccagcgagcccgcggcgacgccagcacgcgacgaccaagtcgacgcgacgaacagagccgcagtgaccagctcgacgatgcccagcaggtaagaggcgcccgcctcgccgaaaacgggatacatccagacaagccaaggggtgccgccgaggactggtttgagcgcgtcgatctcggtctggctgaatttcaagatgccgatccagaaaagcggcagcacgactcccgcgagcgctacggcccggcctacctgcgtgatcgcttcgccaggcgaacggcgcccggcggtgcgttctgctgcaggaagagtgtgcatgagcggcaatcccaagaattgtatgcgtgaggcatataaccgagatcgcgcttgaagtccatgcgcggcgcatatattttttccctatgaccaaacacgctcacgagaacgtggttggcgcgctcgccctggcactcgccgacgccatgctgcgcgacgcgcaggccaaggcgcccgaacttgggccagcagcggcggctctcgcgcttctggggcatgaatcgggcctgaccatcgagcggctgcgccgggcgcttgccctttcccatccgggtgcggtgcgtctggttgatcgcctgagcgccgatggcctcgtcgtgcgcgagccgtcgacgagggaccggcgcgcagtggcgctcaggctcactgccgacggagagaaaatatgccgtaacgtcatcgcctcacgcgacggtgcgatcgcgcgcgcgctgggcgcactgaccgaggacgaacttgcgagctttcgcggacttgcggagaaggtccttcgccgcttcgtaggcgacctcgaccacgcttactctgtttgcaggctgtgcgactacgatgcttgcggcgactgtccggtcgacgacgagctgcgtcggcgcgcggcggaaaaggcggcgagtgctcagcgcgagccgtcctcccgataagcattggccgtctctcctccatgctcgccgccgcgtcagtccgggctcaactcgcgcctccaaacgccagcgctcgcctggacaatgccgtgatccaagttcgcccggcataggcgaggcggtcgcgcgtgacctacgctagactggcgccaagctcgtgctcacggcgcgctgggccatcaagcttaaggcgctctgctacgagctcggtgaagcagcgttcatctccgggacaccagagcggcaggcccgcgcctgaccaaccgcccggatctgcggtgattgcacggctgaagcgggcgcgcctgcggaccgaatccgttgcgatctgctgaggtgagagcatcacgccctttgagtttcctatggactgtcacagcggtgagtttggtcagatcgttccggaaagaaatgttgcgttgtcgatcagatggcgaaacccgtgtgccggatgtcttcggggtccgtcacggtcaagcgcagcgcaaggcggtgcaaggcaccatctcctacatggagggagatcgctccgaggcgaatatgccgccgatcaatctagccgatcaattccttggcaaaggattgcgccgcgctgataagggcatcgatgctcttctttgaacgctcagggctgggttgagctagttcttgtaaggtgagaccgtcgagcccggcgaaaatgaaccgagcgagcaaagtgcaatttgcggaagaaacattctgcgacttgtgtcgtcctgccatcagagcatcccgatagaagcgaacataggtatcgtactgacgttcggccaaccattccgctccttcgcggagagcatacagcgtcagttcgtattgcacgatttgtatcgacctcgttcgcgagatcgcgcgccatgaattgtgcagaagttggcttatacgtgtatccagatcggcactctccaaggtaccgacacttcttatgcgttgcgcgatccggtcgttgagcgcctccaggacggctaccaggagcgcgctcttgttctcaaaatgatagtgcagcgctgcaagcggcaccccggccgcggccgcgatatgccgtgtcgtggtgcgcaggacgccggtttgctccaaggcttgaagggcgccctcgatgatttgcgcccgcgcatgatcgctcttcgttgtcgattgttttcgggctgccatcaatgtgactccgacgagatccagaccgcttcgcaaaaaatcggttatgaccatatttggtcacttgaccaatttttagattgtgacatgctttctagtggctggattgcggcaggtacagggggtagggatggatcgacgtttgtttttaagcggcgttcttcttacggcagtttcatccaaggtcgcgcaggcgagggcagcaacggatcggatcaagatcggcgtcctgttcgcgctatcagggcccgcggcctttctcggcgagtcgcaagagaaagcattcaagatgcttgtcgaggagaagaatgcccgaggagggttggccgggcgcaaaattgaatacgttctctatgacacggaaggaaacggcacgaaggcgattcaacaattgcgtcggctggttgattccgaccatgtcgatgttgtttttggcccgaacacctcggccgaggccctcctcgtcaagcccgtcgtggcggaactggagaccccacttctgagctttagcggagcggttgagatgacggtgccgccgagtccttgggtttttcaggcggtgccgaataaccggctggccgttcagcacttcctcggctttctcaagcgaaagaacttcagaaaaattgcgttcatcgcctctacggactcgttcggacaaggcggagcgacaatgttcaaacagcttgcgccggattacggcctcacgatcatcgcagctgaggagtttggtcttcgcgacaccgatatgacgccgcaaattctcaagatcaaaggcctgagcccggaggcgatggtcatctggagtattaatcccggtccgagcattattctgcgaaatgcaagggccatcgggtttgacaaggcgatcttcaacagcaacggggttgcttcaccgcaatttatcgatcaggtcggcttcgctggtgaaggtacgtggctttcagcgccgcgcctcctttctcccgacagtttgcccgatagcgacccgtcgaagcccgtcgttaccaaactttatcagagctacgttgcaaagtggaagaaacaacctgcggcgtttgcggccataccgcacgatgcgctcctggtgctcgaatcagcgctcggtagtgtcaatggtgcggtgacccggaaaaatctccgcgatgccattgagtctgtgaccggcgtcgttggcgccaacggctcctataacttctccagccagaatcacatgggattggacgatagttctcatccgatggttatgatgaggattgtgaacggtacgtttgtagtggagccgtgagacatggatgccctgggtcaaaacctcgtctccgccctcgtctcgggcgccatctacggcgttgcaggccttggtttcaccgtggtgtataatgccacgaaggtgatgaatttcgctcaaggcgaatttcttatgatgggggcattgatctccgcatttttcgtaacgtcgtttggagtgtacgtcgtcttggcgatcgtgatcgcgaccatcgcgaccgtcttgcttggtgtcactctcgatcgatgggtcatccagctcagtcgccgcaagacaccgttgaacgcggttatgatcacgcttggtgcggctattactttccgcgggctcgctgtcgtcgtaatcgggcgggacgttctgttcgaacctccgttcggtggcattccaaccatcactttcggaaatgtgtacgtgtcgagccagggcgtctggatcctgttgatgctcatcgttttcagtgtcggtctgtcttacatgttcagcaaaacgcggattggtatgtcgatgcgcgcagccagcgacaatccgcgcgcagcgatgctttgcgggatcgatacacgatggacctccatgcttgcgttcggcctcgcgtccgcgaccggggcggtcgctggtgcattcgtcgcgccgatctcgtcagctttctatgagagcggactttttttcggcctgaaaggttttgcctctgcgatgctcggcggtctcgggtatcctgtgggggccattatgggcggcatgctcattggtcttgttgagacgctttcggcgggctatctcacatccgtttataaagatgcgatcgcgctgactgtgctgatccttgttctgctggtgatgcccgacggcttatttggccgcgcacaagtcaagcgtgtgtaaccgatggtggtcaaagctgagctcaaggcggtattgatagcggccggaatcgtgctgctaacctttgttctctctccaagcgattttcacctcacggttctgaccgtcgccgcgcttcacggcatagccgccgttgcgctctcgcttgatttggttgcgcaggcgtcatttcgctcggctctgccgcctttttcggtatcggagcgtatggcgttgcttttaccgtgcagaacggcattccgacgtttgcagcgctggctctagcgaccttgttcgctggcgttttcggctacttgctggcccggcccctgttgcggctggatagtcattatctggcgatggcaacgctggcactgggcgttgttgcttatattgtatttggacaggcgcgtcctctgactggcggttttgaccccggcctcaacggggtgcccccctttcagctttttggcttcaagttggcgggcccccgaaagatgtactgggtgagttggatgacgctgctgctggtctgcgtcattggattcaatctggtgcacagcgcacgaggacgagcgatgcgcgcgttgcgatcatcggagatcgctacgtcgtgcctgggcgtggatacagttggcgttcgcgtgatggtattttcactttcctccgcgctgaccggactggcgggtggactctatgcgttcttcatgggctcgtttgccgcgacggcatttgaacccggattgtcgatcgacatcttgatgatggttctgatcggttcgacatccactttgtggggcgctgtcgtgggcgctctcgcgatcaccattctgcccaaccttctggatggcttcgatctctacaaacttctggtgtttggattaaccatgatggcggtcatggtgtttttcccggatggcttagtgcagagcgccgtcgatggcgtcaggaacgtggtgcgtaagccgtcggaagatgcttcgatccggaacggatcgccaccatgagccttgtcatcgacaatttaacgaaacgcttcggtggtatcgcggctgtagacggcgtatcatttcttgcacctgccggcaggatcaccgcgctcatcggacccaatggtgcgggcaagaccagcgttctgaatctcatttccgggacggcgtttgcggactgcggtcagatcgagctgaacggcgaagacattcgcggctggcccgcgtgggcgagagcacgcaagggactggcacgaaccttccagactcctcagttgttcgaagggatgacggtgctcgagacggtgatggtgggctgtcatgggcgggcgcttagcggattgttttctgtgttggcgcggacaaggaggatcgcacgagaggaggagatgcttcgcaaggaagccgaacgcgccctcgactatgccggcgttccctccagtttatggcgccgtattgcgacggagctcgcctatgggatccaacggcgcatcgagatcgcgcgcgcggtcgcgatgaacgcgacgacgtttttactggacgaaccggctgccggtctcaatccttctgaaacccatgaattgtccggtcttttgctgcggctgaagtccgatggaagatgcatgctgctcattgagcatgacatgcaactggtcatgaggatttctgaccacgtggtagtgatgaatttcggccgcaagatcgctgagggtagttcgcgcgaagtccagactcatcctgatgttctgcaaagctatctcggcatggagtcgaacgatgctcagggttgactcgctggtcgtcaattacggagtcatcgcggccctgaaaggagtttcgcttgaggtggcgcaaggagagatcgtgacgttgatcggcgcgaacggcgcaggcaagtccactctcctgaacgccatcagcaaggtagttgacatccgctcgggtgaggtgtggctggatggaatcccgctgcacaagctgcgtggatgcgtcgtcgcatcccagggcgtggtgcaggtgccggaagggcgccaggtctttaaggacatgaccgtttttgagaacctggcgatgggaggttatcgtcgcagccggtcggaaaacgcggagatgtacgagaaggtattttccatgtttccgcggctcgccgaacggcgcaagcaattggcgggactgatgtccggaggcgagcaacagatgctggcgatcgggcgctcgcttatggcgaggccccgcgttctgcttctggacgagccatccatgggcctggcgccgcttatcgtcaccgacattttcaaggtgctgaagcgcctcaatgacgaggggcaggcgatcctgctggttgaacagaatgcccgcgccgcactgaagctggccaggcgtgcatatgtcatcgccaacggtgaaatcacccatcaggggccggcgtcaaagttgcttgatgatccgcatgtgcggacaacttacttaggtatagaacactgagaggacgtagagaatggcgcccatccgcgtagtcatgttcggccttggaacggttggccaggaagttgcgcgcgcacttctgacgaagaagggcgtgcagatcgttggtgcgatcgacaagggcgcggcagtcggccaggatgttggacgtgttatcggcggatcgccgctcggcgtaacggttaccagcgatgcttcgttcatgaagcaagccaaggccgatgtgatgatccattcgacgtccaccaaggtgaaggatgtctacgagcaagtccttccggcgctcaatagcgggtgcaatgtcatcacgggtggcgaggaaatttccagcccttacgtgtacgataaggagtacgcaacgaaactcgatgaggtcgccaaagcgaacaatgtgcgggttctcggcaccggcttttggccgacctggatggatattgacatcccgcttctgctcagcgccggatctcgaaacgtcggctatgtccgctactcccgtaagtcggatttccggccatacatgaacagcgtggtggcgaaacatttcggtgttggcgtgactgtgagcgagttcgagaagcagaaagccgccggagttatcgtcgggcatgtcggatttgaaggctcctttgagcggttgagccactatttcgggtggaatatcgatatgatcgagaaaaccgttcgcccgctttatgatgattacggcgtctcgcatgccgtggagacttccgcagtggcaaaggagaaaggacgcatccgggcggaaatgtctctgcacgccgctactcggccggacatcgagagttacgatgtcatcgaaatcagaggcgagccggatatacaaatgactatctcgccggccgtgggcggccctcgcccggtggcgaacatgctggtgaatcaaattccgttctgcttgagcagcaagcccggcgtggtcatgcggcctacggtgcaagcgttcgcgttcggcgcggactgcgcatcgttgatccattcctgattccggagaaccgggctatgaaggtaatctggagcgatgctcagttggcttatgagccccatttctatctaatccgcggcaaggtcacatcgagttatgaagtcgccggtcgcgccaaaatgcttctcggtgcctgcaggcaaatggggttgaccatcgctgatgcgccggtcgcaccaagagaggcactggagcgtgtccataaacccgattacatcgagttcctccagcatgccgcccgggaatggcgcgcggagggcgggaccgagctacttcccacgatgtatccgacgccagagatgttgcaggacggtacgacgatccccaagaacgttcttggccgggccggctggtatgtggtgggaataggtgctccgatatccgaacacacctggacttccgtcgccgctgctgccgattgcgcggcggaagcagcgcgtcaggtttccaacggtattcccgtcgcgtatgcgctgacacggccgcccggacaccatgcctatccggcacgtgcgggtggacattgcttcttgaacaacgcggcaatcgctgcggaggaattgcgtgcgggcggagcccggaaggttggcatcctcgatcttgatgtccatcacggcaacgggatgcagcacattttctatcatcgttcagatatcagtacggtgtcgattcacggggatccgagctatcagtatccctggtttgtcggatatgccgacgagcgaggttccggagcgggcgaggggcacaatctgaatatcccgctaggtcgcgacactcgcgacgacgagtggattgcagcgatatcgcgcggcctggaggcgctccagtgctgcgacgtgcttgtcctcgcgcttgggtttgacacgagcaagcatgaaccgctcggcttttttgggatttcggacggtgcttacgcccacgccggcgcgctgctttcgaaagcgcgcaaacctctcgtaatcgttcaggaggggggatattgcgtcgatgacctcggccggctgcttacaaattttgtgacggggttgaaggactagtcacaatagcggcgctgcactgatgccgagaatgaatcgatttttggaagtgccacggccctttaaggcgccgcgtttctcttgctcgatggagcgggagatctcgtccggcgggatgcgagcggaacggagatcggtcaactggcactggttggcccgatcaccggtcgagtgggtcagtcttagcggacctcctccggccttagccgcaggtcgtgcggtcgttcatggctgcgtcgtcgctccattcgatgctgcccactttcgcgcgctcgtggtcggtccgacgtgcgagattgcgatgcgggcgctcatcccccgacgttccgctcctatctcgctcagggtgcggacggctctcattgaggcgccttgcgacccgcgagcgtgcagttgcagggcgcaatggcgacctctgcactctgctccacaccgcggccgaccacgaagccgccgtaccgatctccagcaggtgattcgttcgagcatagatggccggcaaattcatgttacgccgcttcaaatttcgacagagagatcccgtatgcggtttttgcgggcagcaccctagcgaacgggcggtacgcattaatcgccgaatccaataaggtcattgacattactcattatggaacgcctcagctggtagctagtctcacgaacactcgatgtttgttgactggcggcatcgaaacgtgtgcggcgcagatgtctgcggtcaaacgttgcttttatgtgtttcgaagtctgcagatctgaaagtcgacccaagtcttatcctggtgatactctgagccggtcgcgtgaagaggggagggtttgaatcttgatgtggatcgttggccttctcgttatcgcctcattgtgatcgcggcttttgctattttagtcgctttcagcttaaggcgatgcgggaaggtgccggtatccgcacggtcacgggtggtcagcggccagttctcggtgacggcacgatcagttcttcccgtcctgtacaggacatctgggatcatgcgtaccgtccggctcgagatagtacaatgccggcgccctccatcataagccaggaacggctgcgtatcgacgcgaccccctgatctacttgcggaccgccaacaatggagagcgttgcgacggcggcaacgcgcttcccatccacgacatcgccaatctgctcgagggcaagctgggcgactcgctttggactgtggggctccacagatggacgcttttaggaaaacgcagcccatggctgagagtgcatttgaatgctcgagaatacagcgccttcgagaagtcagatgtgccggcaaacccttgcagagtccatgatgtagcaagtgaagaagcgtttatgtccgccgttaactgaaaggatatgtgctccatgaccgtttatcgccccaccgttgcagaactccagcaagccgcgatcgaactcgggctaatcctttcgctcgaagacgctgcttcttttcattcgctgatgcagggacagcttgatgcttacgacctcgtagatagcatggtggcgccactccccgaggttgcttatccgcgaccgcccggggtccgtcctcaccctaaagataacccgtttggcgcatgggcggtgaagagtcgtatccaaggtgcgcccgaaggcaagctcaagggcaagcgcgtcgccatcaaagacaatgtctgcgtggccggcgttcccatgatgaacggctcgtcaattctcgaaggctatacgccggagattgacgcgacaattgttacacgcatgttggacgagggtgcggagatccttggcaaatccgtctgcgagtattactgcgcgtctggcggcagccatacctcagcaaatggcgtggtcgagaacccggttgtaccaggctacaatgccgggggatcctcatccggctcggccgctctagtgatggccaatatcgtggacatggcaaccggcggcgatcagggtggatcgatccgtatcccggcgtcatattgcggagctgtgggtctgaagccaacccatgggttggtaccttacaccggcatcttcgcggtcgaactgactgtcgatcatgcggggccgatcacccgaacggttgcagacaacgcgctcatgctggaagtcatagctggtccggatcggcttgatccgcggcaatcgggagcagttgctcaaccgtatacacatgctctggatcgaggcgtggcgggcctgaaggtgggcgtcgtcacagaaggattcggcacgcccggcgccgaagcggaggtcgatgcccgggtccgggaagctgcggaccgtctcggcgagatgggagcccacgttcattggctttcggttccgctgcatgccgcgggcgcagcgatctggacgccaatttttcttgagggtgcgacagaactcatgatgcgcggcaacgcgtatggcaccaacatgaagggggttttcctcgagagtttgctggacgctcactcccgttggcgtgaccgggccaacgaactgtcggagaccctcaagcttggaatcctgactggccattatatgtcgtcgcgaaatcgcggccgctactacggcaaggcacaaaacctcaatcgattgctgacggccgactacgacagggccctcggccaagtcgatgtgctgcttatgccaacaacaccgatggctgcgacccggttgcccgcccctggtgcttcgcgggaagaaatcattgctcgtgcattcgagatggtcggcaatacggcgccgacctgcctaacgggccatccggccatctctgttcccgccggcaaaacctcggacggccggccgatcggcgccatgctcgttgcgcgtcacctcgacgagatgacgctgtacagagcagctgcgggtttggaagcttgttatcgctgagtcggacattcgagcaggattgcggcccgattaggtcggctcgctcatacttagcgcatcgtcggccagcgtgcgcgctcgtgcttgtcgttcgtggattaatcttgctgaggaaggttcaagggatttcccggccgcaagcagatgacaccgaccgccccgcctatggcccgcgttgaccgaacactcgaggtaagccgcagcgacactctagcttcagcgtctagcaaatgatttggcagttgccgcaacgatacagtcatttcgtctatggcacgattcaatcaggcatcacgagcggcgtcgctaccgcggttgccaagtttagagatgtctaccaattatcggatctcgcggacttgagccgatcatggctactctcctggattctcatgataccgatcgtgctgttcgccgcgccaataatcaagcgccttaccagcctgattgtgcggaagagcgaggagcattgatccttggaggatatggcctgtaaagatttcgcaagttcgaaagccgagcctcgcgccggccgatctcaaccgacagttagcgtccgccgttacttagaaaaatgcggtgactggaacgtggtagctgcctgaaaacacagttcggccaaattgcaaaatacgattcttgaattcatagaagtcattttggaaatcgattgccaaagctcaaagtgtttgcaagcctttgtgcaatttgggggagtttcccccatttgcaatgagaggaatgtccggcgagcgcgccacacgagaaagaggggggaccgtcgatgcatcgtcttatgccgagacaaccggtgcctgtagacgcaacaagcggggcttgagaactgtccatcaggtacgagctgtcgatcgataaagcccgtgagtggagtctctgcgtttcgtcgagccgcggcaaggcgaccaatggaaccatctttagtgagcccgggatcttcgtaacccgagcggaccctgtattggggagcacttcagcgatgccgtttgcgcgaccgcatttcaatcaaatgctccaggctttcgatctttttcagaagatcgattatcccgctcgcggcgaactccaagttctatgccgctacactccccagacttggcgcggcaactgcttgccgcgccacttttttgtgggcgatccatggccagctctgccccggcaggtcctgcgggtcgtgccgcctgcaaagccagtacccgcgctcgacgccatgtcttgcgagtcgacgagcgctcaggtcgcgcttagcagcctacgacgagaataccagatgattccctgagcccgtccagaatagccgcgtcagtaccaaatgccacttgccggatgaccttcgaagaaggtgacgacccctgcgccggcaaggctcgatcattgaatgtcacacggcacccgccttccgggctctgttcgccgctagtcttctgtcgacacgcgccacgatggcatccagtataggatggctcatgcctttctccgcggctacaagcctcaccagcttgtcggcgcgctcgatgttaacggcgcccgtgtttacagcgcgagcggcggacgcaggtcgggacaggcttgcggcagcggctgcgtacttctcgaatggtacgagatcggcgcgtgcagcacctatcttcacgcatatttcgttgacaaagttgtagatggagcgagattcttccagattagcatggaccgcgtcctgtacggagcacatcccctcgtctgtgatggatcgatagttacctgccatcagcatcgcccatttcgccagcggtacaaaaagagattcatgaaatcgaagcttcaccggaagttcgattggcccttccggcatatcgaggctcgctgaatcaatgtcatgctcgagctgcctcagcatgccgttgcacctttcatcgtcgaaacgtgcaactttgaagttggtcggcaaggtcacttggagcacattcacgtcctggccgggggaccggatcgcttgtggatccggactgcacaaggtcacccgtcccggggtaaaatctgcccacacctccggatcggtgaaagagggcaggagagcgtcggagttaaggccagggatacgccgcatatagggcagtggggccatgttcatgatcgacatgcacggtacgccgctcgctgcgatatccttcatcaatcctcgaaccccgggagatccgtattggggctcctgcattgcaaggccgacaagatcgtagtctcgggggtcgacgccctccgtgccagacgcggtaacccggccgggcagcttgcgggaatcgagttcgactgacgtatcaccgcgtcgcagcgggagacgaattcgaaaaccctcggcattgatcagatcggcttccgcgggaagacatatcagcctgacggaatgcccgccgaaaagaatcttcgaggcaagcaacgaaccataggacgcgccaaggatgaggatgttgtacttagtcattgaaggagtctttcacggataattgcttgccgtaataaatgggagctgtcgcctcgccgtttgcggtgaggaacatgccacggagtagggaagacgctcgcctaggaatgccttgctacgatgttctccaaggcttccaagctggccaccctgtggtgaacgacgaatcctagctcgtccatctgcgtgcgcagggcacgaaacaaggtaagaggagcaacgcaatcgccttttgcgacattttccgcgatcgtttgcggggtcacccgctcgatccaagctaccgtcaatcctgccgactgcgcgccaatcgcgtcccacggatttgacgagacaaaaagtacctcggatggtttcacattcaaccggggctcaataagagagtaggcttccgggctaggcttgaagattcttttagtatcgatgctgatggttgcatccaggattgcgtccaaacctgtattgcgaaccaggctaatcagcatgtcagagctgccgttcgaaagaatagcaagcttgtagttttttaggcccagcagcgtcggcttcgcgtctggatagagatcgagattgacatacttgtccatgattgtttcgaacagcttttcatcatagggcaagcctagtgtcttgagtgtgtaggttaacgaatcgcgcgtaatcaccgagaaatcttcatagcgtcgcatcagggagcgcagccacgtatattcgagttgcttgatccgccagatctgcgtgatcagttcgccatagcccggaaaggcatgattggtcacaccagcgactgactgaatgtcgtagagggtgccgtacgcatcgaaaacaattgctttgattgtcacggccgcggactcctggcagcgctggattcgtccagtgaagagcccgtatggacttgcatcaagaacctatcgaaacgtctttcgttatctaggtctcggcctgcaagcagcgaaccaagcagggcccccatgaagcccagtggcatcgaaacgaccgtcggattgacgagcggccatagggcttcgctcccgcgcatcgcgggtcctatcaaagcgaggatgactgagctcgtcaggccggaaagcattccgcacacgacaccagcgctgttgaagcgccgccagaacagcgacaggaccagaacagggaagttcgcgctcgctgccacgcaaattgccaagatgaccagcaccgcgacgttgacaccttgggcgaggatgcctagcgcaatcgcgagaaagccaatgaccaccgtcgtaacacgcgcgacgagcacttcctgctttccgtcgactttgccgcctttgagccaattgacgtaatagtcgtgagcgatcgtgcttgaggtcgataacgtaagcgctgagacgacagcgagaatggttgctactgccaccgcggcgacaaaacccagcataagctcgcctccgaagctgcccttgccacctccaagatgctgggcaagaagcggcaggctaagattgccgcctttgtcagcagctcggatggcgtcgtggccgacgaagtcggcagcagccagcccaaagagcgtggtagctgcaaagaaagcgccggccaggaacatcacccacacgaccgaccgccgggcggtctgcgcgtccggtaccgtatagaagcgggtcatgacatgcggcagacccgcgagacccagtacataacccagacccagagaaatctgatcgaaaggatttttcaggtagtttcccggcgctagaaaccctgtcccatacttcgcttcgacgttcgaaaatagcgtcagaggattgaagtgaacgaaggacagggccatcatcagaatgattgcgccggccccgagcatcagaacggcttttacgatttgaacccaggtagttgccagcattccaccaaacgcgacgtaaatgatcatgctgatgccaacaaagatcaccgccagattgtagggaatccctgtcagcagttgcaccagcaccccggctcccgccatctggggcattaggtaggcgaaattgacgacaaccgttcccgtaatcgctgcgagcaaggaagtgcgagtttgcatgcggcttctgataacatcgccaagggtatactttccggaattgcgcagcggctcggctatcaaaaacagtaccgtgcagaatgcaaccagcggacccagcgcatagaaggcgccgtccataccatagagcgctgttaggcccgtaaacccgaggaaagctgccgcgctacaccagtcacccgccagggcaaatccgttctgcggggccgtcaggcggctgccggcagcgtagaagtcagcagcagtcgcggtacgtttagcggcccaatacgtgatcccaagggtagtcacgagaatcgcagtgaatatgatgaaggtggtgctcatgacagcggtccatagctggaggaaactgcctccgctgcgagtggatcgaaaacgtgattggctatgcgttcgtagacgaccgcaagcagccaggaaatcagatagttgagaaagattagcgcgaagcccaagttaagcggccccgcaactttaatggtcagccagccctttgcgaatcctgccaagaccgtcagaccgatatagctgaccataaagatcgcggtcataggcaccaggaaacgaacctttgcagctatgagcgatcgaacgtccgcgttcgcgacgcccgccggtgcgtctccaagcgacatgttccctccctaggtgttcctgccattgcgcgcaggttggctctcctcttgctaaagagcaggagggagcctttcatctttacgtcggcaaaggctagtgacaaaatgaataagcatgatgttgattatcggtgttcgcgattatggagatcgggcggtgaacctggatatcgactgccttcgttcattcctcgtcgtagctgaaacgatgagcttttcacgagcggctgacacggtaggtcggtcgcaatcgacgatcagccaacaaatcgcgaaacttgaaattcaagttggtcggccgttgctgtcgcgccgaaagggcagagtgttggaattgacgtcggagggcgaccgcctcgtgcagtatgctcgccggattctgcaactcaatgatgaagcgtgcgcctcattgtgcgaggatcttctgacgggcttcgtgcggctcggcgttccgctggatttcttcgggcgggacttcacagtgtggcttgcccgcttcaaggcaaagcatcctatggtcggccttgaagtagaggctaatcagtctgaaggcctgcaaaagcgcagcgcccgcggggattttgatcttgctttcttcaaacaggaggctggtgccaagcttggcatcgttgcacaacgcgaacaactggtgtgggttactgggccgaattttgcgctagacgaattggaatcgattccgctgatactttttcccgaaggctgtacgtaccgccgctgcgcgatagcgtccttgcgggagcagaagtccaagtggcacctcagctttgtaagtccgagctttgactgcctgaagtcggcggcgatcgaaggtatggggataactgttcttgcgagagcattggtatccccgcctttgcagatcgttcggcacgcccgccgtcttccccaactgccggcgatcgaactagcctattctcatggtcgtcgtggcaattctcgtgtagttgctgagctaactaatcatcttgccgacagcttggctgccgctggtacccagccgtcaccgattgccattctgtgaggcgtccgcccgactaggccggcacccgggggacaatcggcaatgtttggcgtcaacgtttgctcccgactagagccccaagcccggaggaaaccagtcgtcccaaccggttgacggtcctggtcaggctggtctcgcattaagtgagcggtgtgtgcgattttgtacattggtgtgaaactcaggagtgggcgtctgcgagatggcgccgcacgagtttggggccgaacacctcgaaagaaaccctcgcgatccccgtcgcagaagcacagatcatctgcgtggtttcctgcaagaagcgcggcaggtacatctgaaacgagccctgaagtccggacggtgagcgtttgcaccacagaatgggacgtccatccgcgagtttccaagttgcgaccgatcataaacctacatacgttgtggtgcaaaaccggtcggctgcacgagggatctggatgtgggagcgtctaaagacattctttgataccacgatgtttgctccgcacggtctctgcctgcagtgggatccggagcttctcgttgtgcacattatttcggatacggtcatagcgttatcctacttctccatcccattcgcgctcgcctacttcgtctggaaacgcagggacgtggagttcggctgggtattctgggctttcgccaccttcatcatggcgtgcggtatctcgcacgtgatgtcgatctatacgctttgggtgcctgcatacggtctcgaaggcgtcgtcaaatccatcaccgcaatcgcctctattgccacagccatacttctttggccccttgtccccaaactgctggcgctcccttcgccggcgcagcttcggctggcgcatgcgatgctcgatgccgaggcccagcagcgacgcgaggctgaagcgcggcttcttcagtcgcaaaaaatggaggccgtgggtcagttgacgggcggaatcgctcacgacttcaacaatctcctgatggtaatctccggaaacttggaaatcgctcgacgcgctctcggtcagcatggccaaacgggtctcaagagggccagccgcgcggtggaaagcgcctccgatggcgcgcaacgcgccgccaccctgacgagccgtctgttggcgttcgcccgcaagcagccgctggacgcaaaggtcgtcgatctgaacagcatcatcatggggatggccgagttcttccaacgcactttaggtgagacggtcaagctcaataccatcttcagtgtcggcctttggcgggtcgaaaccgatcccaatctactcgaggccgccgtgcttaacatcgtcgtcaacgcgagggacgccatgcctcatggcggaacgctgacgatcgagacaagcaatgccttcgtcgacaacgacattgcgcggtcgattgacgatttgcaggcgggtcactacgtcgtcatctcggtgactgacgacggggtgggtatggaggctgagacaatcgaacgcgcttttgagccgttcttttccacgaagcagaccgggcacggaacgggtctcggcctgagccaagtctacggcttttgcaagcaatccggaggtatagccaagatctacagtaagcgtggcgccggcacgactgtgaagctttacttgccacgatctctccacgaacgggaagatgaagcgagcgtgagcaacccgctccatccgcaaattcggggcatgggagaaaccatcctggtggtggaggacgatgagggtgtcagaaggtacgtggtggagacactaacggatctcaactatcggatcatcgaggcaaagagcgccgaagaggccgttccggtcttcgagcaaaattcccgcgagattgcgcttcttcttacggacatcgtcatgcccggaaggaacggccggcagctcagcgacgtcctctgcaagcagaagccgggactcaaggtcatcttcatgaccgggtactcccgtgatgctatcgttcacaacggccggcttgaccagggtgtcgagctgctgcaaaagcccttcacccaagcagctctcgcccaaaaggtgagacagcttctcggattttaaagagggcattcttctccctgcatcgatcaaattctgcggcaagttcaccatgttccgtgcggactgagagcagctgagcgcgctgccgcccaagtctcgtcttaggccttctcgcgccgcgcttggacgcggactcattaaaagaagccaaccattcaaagtcggcgagttgatagcgcattgattcgcaagtccctggctttggctttttaattacggagagacggccagacgcaacaaagcggctgctgccatgctaccttcaatcttgatgcacagtgctttgttgttggtctaacagacccgaggtcaggcagagacgcacgtttgaggtaaggaaatgatttttggcagaagcgacggtgtttggctgaatgagccggaaaaatgggcggcagagaatgatagtctgcgaatattcacggacaaagctaccgacttttggcgcgaaactcattacggttttattcgcgacaatgggcatttcctaggttttccgacggacgacgcattcaccgccgagctgcgtgttcagggcaacttccggacgctctacgatcaagcggggatcatggtgcgcatcgatgggcatcattgggtcaaagcaggggttgaactttcggatggccgcgccatgctcgcgagcgtgctgactctcgggcaatcagactgggcgactgctccgtatgaacatgaccccaacgacttttgggtccgcgcaaccgtcagcaacggagtcctccgtctgcaagtctcggccgacggcaagtcctggccgctcatgagactggcagcgttcccgaaggcaagctcttacctcgtggggccgatggcctgcacgccagaacgggctgggttagaagtcgtgttctcgaagcttcgtctgagtccgcccctcggaaaagacttgcacgacttgagctgatcatttgcttcgaagggaatgtgcctcctgggccgatggaggctgctcctgtgcggccgggctgttaatagctacacggcctagagtggagaatggacccgtgacatgagtttctggtttctccaacgtcaacgtcgctgacggacacgataccaatctgacttgaacgatagtgaaagcttcaattctgagggatcgcaggcatacgcgcgtttcgacccctacaatcagagttgactaaaacgcgcggtatgactcgtgggcttggcctattcggggcacgcaactgctgttgacaaggttctgtctgatgccttgcgcgaaggctgcggaagagaactgctgctttgtcagttgcgtgggctgctgttttatgcagcgtgcgcgctgacgcatcgcttcgcttccggcggcggagctgacggatttacttggatggagacccagtcatcgcgagacgcagaaccgctcgtgcacgccagcagcatgccgagaagctccaccttgaagtcgttctcgcccggggcttgccgccttcgacttcatttcgatctggtctctggtccgccggcgccgctcggcgagcagccaccatacggccggtaaagcccgatctccctggggcgcattcctggacgccgaggacttcggcaagtcgtcaaggcgggcgcatggttgctaccattgtacgagtgcgagaccggaagcttagccggcttgaggaacgtcgtttccggaccgcgtgcggcgtggggaaagacgcccggtgaagttcgcggacgaaaaccagtcccgcgggtttgaacgtgaatcaaattcaataggtcgcgtgttggagccgcttcaaagccggagatggcagcacgcctcgtcagaggactgggcggtagccagggctcatggtcccgacgtccgaaccggattcactactcgctaatcatcgcctcgacggacgcttcgccattcactttccggtaatcagcagaatcctagaagtaccgagaaaaggggcggcaggcgatggcgatcctccaaacgaagctcacgcaatttgctcacgagcatgacgttctcgcagagctctttgcacagttcgagtcgtcaatggctctcgtggacgtgccacgacgcaaagtcgttcttcagacgccgagattcgagagcttcgttgccgacccggaagcgtcccggttgatgtggagttgcgcggagcgggcggcaggcacccatgcggcggatctgtatggtcgcccccacaagttcaaggtcatgcctctgtcttgcggcaccgtcatcgcgatagaccatgtcactcgccaggacgcggagaagtcgaacgcggaggctcgaatcgatgcgctgacgggactaggcaaccgtctcatgctgcgcgagcgtctctctcaatcgatggcaaactcggccgaactcgcggtgctcgctgtggacctcgataggttcaaggcggtgaacgacgcgctcggccatcagatcggtgatcgtctgcttgttaaggttgcggagaggatgtgctccgctcttggcgtcggcgactacgcggcgcgcatcgggggcgacgagttctgcgtggtgctctcggatccatctcgggaagcggccgcgcgccttgcgggacgcctgatcgacctactggggagatcgtaccttctggacggccacctagtgaatgtcggcgccagcatcggcatcgcgcaccacccggagcacggacgcgatgaaagcgccttgttgaagaacgcagatcttgcgctctatgaggcgaaggcccggggccgaggctgcttcgccctcttcgagcagtcgatggacgacgcgatgcaagcgcgtcgttcgctcgaaatcgacctcaggagagctctcgctcttcgagaattttcgctggtctatcagccgcaatataatttgcgcgatcagcgggtgacgggtttcgaagcgctcctgcggtggaataacgcaagccgcgggtcggtgccccccttgcaattcattccactggccgaagagacgggccttatcgtcgccatcggcgaatgggtgcttcgcactgggtgccgggaggcggccacatggaacgagccgctcaacgtcgccgtcaacgtgtccgccgttcagttcgcgaaagccgatctcgttgccgcagtgatctccgcgctcgcggaaagcggactgtcgcctggtcggctagagctggagataaccgagagcgtcctgatggacgaccacgcggagacgctg

SEQ ID NO: 106 - DNA, 5850 bp, Bradyrhizobium colbertium
tgggtgttgttgtgcgcattgccgctgccggcggaggcattgttgatggtgatccccgtggtgttggtgctgatggtcggagtaccatatccggggattgtgaaggcgccgccgccggtcgtactcgaagatatggccgtaatgttgtgcccgtgggtatgccccgggtcgttcagcgtgttcgcgtggctgtgcgaggcgagttgcgccgtggtgagtgtgtggctttcagagccgcccgtcgcgcccaggttggtcgctgccgcaccgaaataactggaggtcaggcggctcgcagccgagcctcccatattgtcgagaccggcaatcacacggccgcgaagatcgggcacgttgaaggttgtcgagccgtcgccagagccgaaggtcgtgctgactagagagaagtagctcgcgtacgtcgtgcggctgatggcctgcccatacggcagcacgaacgagctgttcggcgccgaagtccctgtatagggcaggacgccaccaattgggatactgtaaggattgccgaagaagccgcgcaggtaaaatgcctgatcactgttgttgtaaacagcgacataaggcgtgccctgcacgaggtgtccagcaaccagctcggtgttaggcgcagaacgcagcggctttgcccccagaccgtctacattaagcgtggtggtgccgccgttgttcgtgtgcggggtgaaggcaatcatctgaccgttcagccgggcaaaattgtcgaagctctggtagctggtgactgtcagtgctgtggacgttccgcccgtgacgatcgcaccggtgatgtcatctgcccatttgcggaccgaagccatctcagcccgcgagctatcgttgatcgatgacggactttggccttcgctccaattaatctgagggtcagccgtcgcgttcgacgccgcggtctgtgaccaccatgcaacgccggtcatgcgtgctcctgacacttagcaatgacaggataggttcgcaccacgatgccacgcgcggagtccaggcgaaggggcagtggcttcatacgccagtgcttggcagggtcaaatggctcggtgtcctcgttctcgaccggcaaccactggccaccacccagacgctcaatgtcggacttgctgggcttgaagctggtggcgagcaattctccgtccttcaccagacagtactgctgctctccgacaggggagccgccgtccgcctgaagacggtcgaccaacgcctgtctaatgtagtcggatttcgattggcagcgttggctcgcggccctgtcgatcgccttcgacaggttagacggggcacgaaattgtattagctgctcgaagtggctgggatcgtccatcgctcgtcctcatgcagattgcatgagactgtcagtacgagggctacctgatctgtaccatgtcaaggctgctgatcttgcggactttgccgcttctgcgccgtcctacgcgggtacccacccatgttgcctttggatcacaatgcatcaggaccggctgcgaattgtagcttcaattggtcgagcccctcgagcgccgatgccgcgcagcgatctcaaccctaagtccgccttcgctcggtcaaaagaccgcgcatcgttctcagctgaggtgcgcttggaggcaaaatgcgaagaactcaggttgagcaaatctggtccgcgctgccgcgacaagcggacctccgtgagacccagcgcaacttcgcagaggggcgagcggactcatggaccgcagcatgcagagtcttactcaatcagctcgtcggctcgggtgaggaggcccgcggggacgatcacgccgagcgcctttgctgtcttgagattggctgccaaccaaaatgcggtcggaaattcgacaggtaggtcaccaggtcgagcacccctgaggattttgtccacaaaatagccaaggcgacgataacaccagcgcaaatcgactccgtagctgaccagaccgccatgaatgacatgctcgcgatatccgaagacggtcggaagtcgcattgaaagagcaatcgcgccgatttgctcgctacggacaaggagcagattcgtctgtagaacaacgatgacatcggccttgccgttcgcaagcgcagcgagcgcgcccggaatatcgttgggcatgttagcatccgcttcgacgacgctgaggcctttggcttggcaagctgctttcaagtccccgacctgaggcgggcccttcggatcgttcatgttggtgagcagtccaacgcaccctgccgtcggcgtaatttctagcgcgagttcaatttgcttggtcggcaatcccgagatgtagggctcgatgcccgttacgtttcctcctggtcgagcttcgctggcaatcaatcctagatgaaccgcgtccgcgagcgcgccacagacaataggtatagtcgatgtcgcctttcgggcctcgacggcttgcaacgtcgcaggcgcggcgatgatatcgggtttgaccagagctaccagctcttccatggttgctactcggtcactaaacatgtcaaatcgcttgatgacgtcaacattccgaccttgcacgtaaccgaactccgcgagacccttaacaaaattgccgagcgtcaactccaatatgaactgaggcacgtttgcgcccgcgggcgcacctgcgggcggagctcccgcccacgcgatgatcggacctttcggcgcagactgcgcgtatgagcctcgatccaactgtgttgatgcggctgcggcaatgacgcctccgatgaaatcccgccgtcgcatgtgtcctccttcaaagaccacgcctgttgagaaacagagactaccacgatctagacctatgtgacgaactcgacgcgcgtctagcgaccctttgggtcaaaatcgctgccgtgactctagccacggccttgcgcgtccgttcgatagctctcatccgtctcactataggtgatcgcgttagaggagggggcagcccggtctgtgagaaatcagatcagttcatttcgtgctcggatccttcgcaggtactattgcaagagattttcgacgtatccagtcggcaccaatgccggtgtggcgcagtgagctgaggcgcacacgagggagataattcttaatgggtaagtcgacctgacaattcgatgatcaggaacatggtttgtggtcggccgcgcagaattgctttctggttagcgcggctaatgtgcttatgtccgtagtgggttaaaattgccggtctagacagctgcgatcggtttccgctccacgcctgacagccgacgccccaacgagcaatcggctcggccgcggcgggccaattgccgacctactcaatgatttcgtccgcactgaccaacagagattgagggatcgctaggcctagcgccttggcagccttttgattgattatcagcttgaaacgagtcggctgttctaccggcaaatcgctcggcttagcgcccttcagaattttatcgatcaatcccactgcccggcgaaaataatcaggaaagtcttgtccataggatagaagaagaccgtgtgggaccatttcgccgataagggatagggttggcaacttatggcccagggcggcagctccgatccgtcgccgttcattgaaaagtagcggtgaggctagagcgacgccatcgaatccgcttcgcgcaatcgcggagaatgtcggttcaatttcatctggcgttgttatcccgaacgctttggtcgaaaccgagagcgcttgcgctgccctttcgtaagctcccctaatgcggggggctgcagggtctctcggatcaaccatgatagccatacgggataggttcgggaccagttccctaaaaagtgcgacgcgcttgccagacacgtcgttcgacatcagcgaaaggccggtcacattaccaccgggatgcgctagactttcaacgaggccattgcctacaggatcggcatccagaacgaaaactactggaatcctgcttgtggcttgcttggcttcttttgcggcgagcgatgtcaccgcaagaattgcatccaccttgctttcgaccatatcccttgcaaacgcacgaaatcgctcgggctgttcggccgggaagtggtgctcaagccgaatagatttgccgtccacatatccgaggtcactgaatgctttagtgactacatccagatagacgtcttcttcctcggcgctcgccgcatgccaaaggacgccaattcgagatactttctttgcttgttgcgcccaagcggccagcgaccagatggtcactgtgctgccgagaagcgcaatgaactcgcgccgtctcatgtcagcctctagctggaagagcaatgccaagattagcacattaggaagtgctgggacaaaccgcttccgcgaccaaatgtccgagctgggtcacaggcggccttcgcagatcgttcggctcacgtccggtcaccccctaaaagcggaacgttttggtttaggcagaccgaagcgctcgaagtaccgagcaacttccgaggtcgagtggtcgcccgcgtggtaagcagcaagagccgtcatatcgccatccaggaacatcgccagagcgacttggctgacaacccaaacgccgccgccgacacgacgaccaagaccatgctgagggcaccaattccggatcgtcgtttccgacttgccggccctcttggctgccgttgccaggctaatgccttcccgggggtcgtacggtgtgagcaccctccatgtggtctcctcagcggattgcatgctggcctccgcacagaagtacggcgcctgatgtcggcttgcgccgatacgtcagcgtcgatccggacggccgccggagggccgctgtctcctcggtcagggcaaacgcggtcccgccgcccagtaacatcgccaggcccatgagatcgtatcggcaccccggtgcgacggcatgaacaccgaacagatccagagcggtccagccgagatcgcaagcggcgcgatcccagttcgataggaagcaatcggcgtcttcgagcacctgggaccatcgatctgcgccggcccactcgggtgcttgcattcgtttcagctcctgcagaattgcatgccatccggttgggttgtcctcgaagacttgcgcgtttcgccccccttcaaaatgagtggtggcagtggggacactggggacacccggcgtaaccgattcaaatcccgaggtttttctgtccccactcgccggaggggactgtccccactcgtttttgagtggggacacgatcatttcgcgagtggggacaaaatagtccttgtgccgcagggacttctcggaagtgtccccactgccaccactgtccccactcattttcatgagggccacgatgtcccgggagaaggcttgcaagtcatgcttcatttgcatcctccaggaaggtcgaccggatgtggtagaggcgcatcttcccgtactcgggcacgcgaactgacttcgccatgtgcgagccttcgccctcgatgtagcccttctgcctcagcgtcgctgcgacacggcgcggatcgagaccggcgcagatttccttccatgccgtggtggtgacgtagaagtcccagccgtcgcccatctgctccctgaagccggcgacatcgcgcgcctgcatccccttgggcgcgttgtcctcccacgctgggatgaagcgcgacatcccgtccttgaggagaaaggtcctcacctgctccatgccggcggcggtctcggctgcttcatgcccgccgcgcgccgccagccactgctcgaagcacagggccgccgccttaacggcgtctccccgcgaccagggcaagattgccgcgcggcaatcagggtgacagtgga

SEQ ID NO: 107 - DNA, 6921 bp, Bradyrhizobium colbertium
aacccgtccactttatcgggggaagatcagcgcgctcccgttgccctcgcgaaacgtgtcaagtggcagcactggacgtccgcatgcatgttcgcttccagttcgcctaatgcgcgtcaacccggacatcgaccgttcgtttcgagcggcttttgccgcgccttgtgacctaagagcgcactgccatcgcgtgctttcagcgctcgtaagcagccatcccgctgcggtgcttcatgatgatgacggaaggacacggccttgacgggttatcgaacgtttctcgatcgagtgtgcctcgccctttttgccgaaccttaagctcggaatgacctagtctgatcctgcgcttgggtccttctgggctctgccgcgccggtcgcccgtggcaccgtcaagaccttagcaagcttttctccggtccgggcggatgtgcgcgggagccgccctgccgtgacagggcaaccacccgcggcgtacagacgaatgttgtcgcgcaagcatcgggatcgcattatttccggatgcgaaccgattgagcatcgtccagcacggagctgttgggaaggcggtcttcccagtcctgcatattgtcgatgtcctggtcggtcaggccgctgacgacaaggcggtctccgcttgcgcgaaaccgttcgacgggcagtgcgacttcgtcctggaacaatccgagaaaaccaccgctcgcgaggatcacgaatcgtgcattgccgcgcactggtttgcgcatgcgatgactgggcatgcttccgctccgcgagctagccgcctgctgctgccgagtgctggccgcctcctgtcgttcggattcgtagcggaccttcggctcttgctcggtgggccgatagacgacgcgaggttcaccggcccgttcgaacttcacttgagggcgcgcgcgctcatattgcacttgggccgcgtcgtcagatcgactttgcacctgcacgcgcgcggaacccccttgttgctcaacatggacttgtggtggcggtacattcactgacactcccggatcgcggtcctgcacgtccacctgcggctggggcatgtgaacaacgatttcaggaggcggttgatcgatggtcacggtcggagcttgctggcgcaccgtgacccgcggttggggctgctcgatgttcaccttcgatcgcgggtcagtcaccgtaactcggggccttggttgctccacgacaaacctgcgggcggtattgccgtcccgcgtgcgggattgctcggagcgcccatccgtagagctccgctgggacttggattgctggttggcagcaacatcaggcccggattgcatggtctttctgattgaccgtgccgatctcgggtgaccctccaacgctggcaggttctgttgtgcgaattgaagaaggggcgacccaccgcggccatctcgctgtgtcgctgcctggggcagactgatcttgcccgatcggcgggtgctgcaagattggcaagcgacgagtggtcaccaaagccctggcgacatcgggacgagtggcatcagcattcgcgaccgcaactaggccagacacgcggtccagttgacctatgatccatcattgacgctgcatctcaggcgttcccgagctcgcgccgggtggcagtacggcgggagcgatgttcgtctgcggggttgtggtggagtcgcatcgctgggagagccggcagaggaagtggcctcttgctgcccagtcgcgctctgcccgcgacctccggcaaggccgaccgtaatctgatcagtgccgaccggctccggtgtggagctgccatcggcagctgctacgcgccagaccttgttcccggcgtcgtccgcaacgagaagcgcgccggtgccgtcgatcccgaggccaactggccgaccgcgcgcctgatcgccgtcaaggaagccggtcaccacgtctcgtgccttgccggcgggcgtgccgttctgaaagggaacgtagaccaccttgtaaccggaaaaggagttgcggttccagctgccgtgctgaccgacgaaagcaccactccgatattctcccggaagggctgaattcagcgtgaatgtcattcccagcgcggcaacgtggctccccagcgcgtagtcaggagcgatcgccctttcgaccatgtcaggacgtggcgggtggacgcgctcgtcgacatggttgccgtagtagctccatggccagccgtagaacgccccttgcttgaccgaggtcatgtagtcggggaccagattgggaccaagttcgtctcgctcgtttaccacggcccagagctcgcgggtttgcggatggaatgtcaggccgttcgggttgcgcaggccagacgcatagaccagggatgcgccggtctgccggtccacctgccagatggcggcgcgtcccttctcggcctccagccctctttccgctacattggagttggagccgaccgacacgtaaagaaagcggccgtccggactgagcgcgagatccttggtccaatgatggttgatcggtccgccgggcaacggcgtgagcacttccggctgcgcggaaatattggtatcgccgagccgatagggataggccaggatcgcatcggcggcggccacatagagcgtatcgtcgtgccacgccacgccgaagggtgaatttaggtccgtgagcaggtcacggcgctcgtcgacttcgccgtcgcggttcgtatcacgcaagagagtgatgagattgctcttcttctgttcgccgccacctccctgcgcgtacgacatgatccaaccgcggatgaggtctttggggcgcgccaccggcttgcctggcggagtgcgtgactgaacgacgagaacgtctccgttcggcagggtatgtatcgtgcgggggtgaaccaagccgctggcataggccgtgatcttgagcccgcccgcgacagccggcgtctggccttcactccagccgaccacttcggccaccttcaggttcgtcagaagggagtggctcggtttcggcaggagaggctcaggtccaatctgttgcgaaatgtcgaaatccgtgccgccgtcgctgcagccagcaaggaccgcgacgagcagggaattgctgacaaacgcggcggcgccccgcaaccgaatgcatctagtcatgtcgtctcactcctacgccgtagtgaaatacgagtgcacggccaagccagttgctgatgaccatggcgatgatcgtcgcaacggagaggacgaggccccaaggtacaacagcgatccaaccgtctcgggcgtgagcaaggctgttgaggaaggccaacgcgaggacaaccacgccaccaatggcatggggccatgcgggtttcggagcacgcacagccgaaccgaacagaaaatcgatgaggcccgcaaccaaggcaagcacgccggagacaagtccggccaagaggagccaggacgagaactcctgccacatgagataggatgttcgccagtatacgatgtcggtgagtagcgtcagcgtgaaacagacgttcggaaactgcgcgagcatcgagtggatcggttgaccgccgattgccgcggtcacgggggtatgtagatgcgtcatcagtggtgtccatgacggttggttcaagacatccgaatgtccgggcgggcgcatcgttcctcggagcagcgagttaggtctgagagcgcaccttcaactgctgaaacatagtctgctcccttcgcgccctggatcgcgcgcgacgtcgtcctgaggattcgcgaaacctgacgtttgcgtcgccacaaatctggtgagctgcatgacgcaattgtgagccggtcaggttctgtgcagagaattggccgccgggaaggacgaattgtacggtatcgcgccgaatttcgccgacctacgaccttcggcggaagaacaagacgaaggtcacgagatcgctgagaagaagaaatcgtggttcggcgggctcgtcgcgggcctggaaagggcaattagttggagcgtctctctccaggtatcgtggtattctcgccgagggtctcgcggatccacaatttctgcacgaggaccatgacaacgacggtaagaggcgttgcaagaatgacgccgagcatgccgcccagcgctccgaaagccgagagtccaagcaaaatgagcgcgggcggtaactccactgcacgcttctgaatcatcggagtgataacgttgccttcgagctgttgaatgacgagaacagcgctcactgtccacaatacgacgctaaggtcctgcgttagtgcgaacaggactgccggcagcgctccgatgatcgggccgatcaagggaatgaagttcgtcgcacccgcaattgctccaagaccgacgggcgaaggcaatccgatcgcccaaaaggcaagcccgcatagcaggccgaccagcgtcatggatgcgagctgcccgagaaaccagaggcgaagtgctgaggcggaaatatccagcgcgtctgcgatgcggtcatgctgctcggaagggaatagcttgatcgcgccccgacgatagacgctcgggtcagccgcgagatacactgctacgaccgtgaccagcaaaagatcactcaccacgccaagcgcagtatagccgacgcgggccgctcgggacagcagctgcccgctgccttcgttggaaagagtttcctgaagctgtttgaatgcatctgcaatgcccagcgtcgcgcctgcaacattgattgcgccaggaagctgatcgaaaacccctgatatctgcccgatgatctgtgctccgaataagctgagcaaaatgccggcaagggctgccaatgacacgcagctcacggcaagtgcccagccggatgggagccggctgtatcttgcaaccgcggcggcaagtcctccgagcagaaccgacaggagaacggcagcgaagaggaggatgaataggtcagcaagcttccaagcgatgtaggcgatcgtggtcactgccagcgtgatgagtacgcggcggagaaaaatccagtcggaggcgggggcgtagctcatgtgcatgactcggttgtgaggtttcggctcgcggtgccttcagcacgcaaatgcggtcaaccgaggcgctacccatggctgatgagcgtccttcgtgtacaccgtcggccatcacactgcccggaaggcgcgatatcccaaggctatcggcggctggccgcaatcgattgtctctaccgcttgtcgctggcccactgccgctttcctgcccatgggcggaaccatcctggtccgatcgtgacacagccgtgtcctcgccaatccgaaggccggttcctgtaacgggccatcctggaggtgcatgtctgcgacgatgaataccgcgccagccccctcgtgacttccgatagcgagccctttgcgccagttgcgctcgccgtcgggcttcgcctcgatgacgccaggaaacggtggccggcagccagggcgaaccggaattgctacggcggaggaggtgtcacccagtgttaccggagggatgattgccggcgtgagcaaccgcgcgttcatgttacttcctcaatcgttggtcgcggaggaactgcggatcgtcgcgctcgttccattagacgcaaacaacgtcgacgccggggaactgacaaggagccgctctttggccaggctcgcaccgcgctccgaaggggctgtgaatgagcgatcccgcaaatgccctggtttcagtttggtcgctttgccttgcgtccggcaactcggtcgcttcagcgacgatctggtcggcgtggagcatcgcgcccgccgtgacggttccgctgattttgttcggtgccttctatgctgcgggtgtctttcggcgcgccgcagagccgcatgattcaggagcgttgtcctatgagataacggccgcggcaacggccatgttcctgctcgcgattgcggtggtgagcccgctctgccggctttccgccgcgctcgcttcggtccacatggttcagcacctcgtgctggtcgtcttggctccgcagctcattgtcattgcggctccggttcgaacggtcggagccggattgcgcggtaccacgcgcacgacctcaagcaatcgcaggcgagagcttcagtggaatcggccgttgctcgccgctggcgcttacggctttctgatctggttctggcacgctcccgcgacgtacgagcttgcgttgactagcgcgggctggcacctcctctatctcggatctctcgtgctggtcagtctctggttctggacctgcgtggttcgcgcgagatcgactggtgcggccgcgctcgctctgctcctgacgatggttcacaccggtttgctcggagcgttgctgacattcgctccgcggccgctttaccccatcatgagcggaggagcgatcgcgttcggactttcgccgatcgaagatcaacagctggccggcctcatcatgtgggtacccatgggtttgatctatctgctcagcgcgctcttggtcataagccgcggactctccgcgcagtcactagggcagtcgtctgcgacgacgggtaacgccgactggaagtaaagcccgaggccgctcttaattttggacaaagtagagaagcatgacgccagccgcaaacgttaggagtgcgacaagagcgtcatagcccatccgcaggaatgtcttgttggcccgctcgagcagaccaaccaagaagattcccgtcaggataatcccgagcgttgccgcgatcgcttcgaagcggccggcctggttcaggaccggctcacctgcatagacgaggtcggcgaggaagacgagtccgagcgtgagaatgttagtgccgaatacatcgcccaacgccatctcgtagcgtcgcagccgcaccgccgaaataatggagctcagttccgggagcgacgtggcaaatccgaccagaacaagcccgacaatgcctga

SEQ ID NO: 108 - DNA, 2824 bp, Bradyrhizobium colbertium
tcctgttcttcgacagctccggccccacggatgaggtctggtattacgagcagcccctgcctaacggccgcaagaattacaccaagactcagcccatgcagttcgacgagttcaaggcctgcacgacgtggtggacgaagcgcgaggacaacgaccaggcgtggaaagtgcaggtcaaggaattgctggatgcgggctgcaacctcgaccgaaagaacccgcgcgccaaagtggattttgagcacctgccaccggagcaacttgccgacgacattctcaggaaggagctgcggattgccgaactgatgcgagaaatcaaagccgctctaggtgcaagcgcatgaatctaagctggcaatccgtaccgctaaagcaggcgctgaaaagagtcgcgcgtttcgaatctcgcgaagacataaacgaatatgtatttgcgggcacatatagttttggtcgcggcgtattcgtgagcgaaagaaagttgggcgccacgtttaagcttcccaaagtccaacgcttgcgagcaggagattttgtctactgcaaaataatggcctgggaaggcgcttttggaatagtaccgccggaagctgacgactgcgtgatgtcgaacgctttcgttgcttacgaggcggactcatcggttgttgacccgaaatttctcgattggtacttccgagcgccatcaaactggcaacggattggacggcaaagcactggcacgaatgtccgacgacaaagtctgcatcctgagcaatttgaagcatcagagatacccctcccgccgctcggcgagcaacgccgcatcgtcgcacgcatcgagaagttggcggcgcgagtgcaggaggcacaacaagcaaggttacgtgcagttaacgagttatcggctctccacacgaagctgcttctatcgacattcgactcggtaagtaactccagcaccgagattggtgccgaatttgtcgtaacgacagggggtacaccatctcgggcaaattctagctactggggcgggtcgaatgcgtgggtcagctcaggggaagtagcctttcgcgacatcatcgacactcgcgaaaagataactgatcttggcctcagggaaagcaacgcgaaaatctatcctcctggaaccgtactgctggcgatgataggtcaaggaaagacccgggggcagtgcgccattcttcaatgcgctgccgcgaccaatcagaatgtcgctgcgatacatgtgaccaagacgattcattcgccgcgctacgtttactggtggctgtacgccaactatcgaaagagtaggtctacagagaccggcacggctcaaccagccctgtcagcagaccgcgtgaagcgaatgcttattcctctgcctgagcgcaaccgacaagaccaaattgcctctcagctcgaagctcttcaatccaagttcgacgcggtgaaagcacttcaagcccagtctgccatcgaattggatgccttgctccccgccgttctcgacaaggcattcaagggagaattgtagaatcaacatgagcactgcgaccacgcaatccgctcctttgaccgaaaaagctgccctcaccgacctcgttacatgggcagagaaacggcctgcatggcagagagatgctcttcgtcggctggttgcaggtgaaacgctcgacgataaggcgatcgctgaacttacggagctctgccttgaccctacgcgcacccatacgccgatttcgcaatcgcatattgtcgctgaaaccagcgcggcagagccgatttcacttctttcgataaagaaccccactgccatcaacgcgcttgccagccagcaggagctatcctttgaaccctccggtctgacggtaatttacggcgataacggttcgggaaagtctggctatgtccgagtcttaaagcacgcatgtcggtcacgggatgagaagttcgccatccacaggaatttggaggataagaccaacacgccgcagtctgccgaaatatgtttcgcgagaggcgcgaacactcatcaattcggttggacacctgacggcgagccacatagcgagctcccatcggtcagcatatttgactctcgcagcgcaaacatccatgtcgaaagcactaacgaggtagcctatatcccccggccaatgcgtttgctggaggcgctggcggacgcttccgactacatcaaaacggcgctcgacggcaggattgccactcttaagaatcagattccgcttgcgatttcaaatccctcactgaccagtgagacggctgctggcaattatgtttttgggctaaacgcaaagtccaatatcccgctgctcgataagcttgccgcacttggtgagcaggaaaccgctcgcctctccacgctggaaaccgacttcgcacaggaccccaagcgcgccgtggcgcgacttgagaatcagcgccgggaagtggagcgcattcagactttcctccaaactctagttggcgctacgaacgcggcggcgttcgccgaaattaatgcgctgcgaaagacccacggcgatgccgtggaagccgcatcggtggcttcgcaacagctattcagcgcatcgccgttgccggaagtaggccaagcaacctggcagaaactatgggaggccgcgcgcgcctatgctgtcaccgtggcctatcccggaaagacattcccttcgagcgaaccgggtacgatttgcgtgctttgccagcaaccccttagtgcggacgcaatcgagcgccaattgacattcgagtcgtttgtaagaagctcgacgaaggctgatgaagcggcggcgcgcgcgaagctggacgctacgcttgc

SEQ ID NO: 109 - DNA, 25351 bp, Bradyrhizobium colbertium
cccctcgtcccggacctccccgcgcccccgggccggtcaccggaccgtcgcggcgaagggcgaaaacgggaggcggaccgcgcgacgtactaggcgatctcggtgcgctcgtgacgccgttcggtcgcctcgaccagatgccttaccaaggtttttgccgatagcggctcggtgccggcgctcgagcgcctcttcatcatcgagcaggtcgccatctccttcagcgcccgcttggtggtcatgaacttgccggcgatgaccgcgatcgcgagctggccgtcgcgggcggcggtgcgcagcgaggcggtgcggagcgggcccttcggccagaacaattcggcggcctccgcgagcgtcagaagttcgtcgtcggcccagctctccggatcggggcgttcgctgacgcggcttagatcgggcttggtgcccatggccctgaagtccttaattgttatggcggcttattgaaatggctggccgggcaggaccggtcgatcgccgcccgtcgtggtgatgtcgtgtgccggatcgggtgggcgccggctcccccgctggagcgcggcatggcggacgggccgcggtcgtcgtgatgcgtatggtctcgatggtgtcgggtctcttccgcgcccgggggatcgtctgtcgatcgtcgtgcagctctggtcgggacgcgggatcttcattgcagcgccttatgggttgcttcgagttcatgctctgatagcacaaattctcggaggcgcaacaagatcatgctgtggcggcacgatctcttcgtgttgtcattaatgagaggttaagctgagattcgagatcgactggcgctcgaagccgcgtcatgccgcgcagcctcgagcttatcgctctcggtcgcactcccggcaccgaatgaatgcaaccagtgcctgcgggcggcgcgacgcgagcgcgccacgcgagctgatcgacgcgtttcgaattgcccggacctctgccgccggcggctcggctcgatcgcggtctcgcgccttccgcgatcgcgtcgtcgccgcgacggtcatgtcgccgtctcctcgaaggaacgaagccccgagcctgcggcaactcacctggggctgtacgaggcgcaaaactttcgattaagattttccgggtggtcaatttctggtcgtaacggttgatgggggacgccgtgtcatttcgaaagtcggcgctggcgggatggggcaccagcatttcgctcaatctcacaaggtagcgaaacgcggaaagcgaaccccaatcggggacagggttcagttcctgacgatgatgcatccggacgtgatcgcggacatcaagcaggttgccatcgacgagcatcgggcggcctgggatgtgatggagcaggccgcgcgggagttcttgaagcggcgacagcgtgcccggcccataacgacatgggacggctaatccttctgcgaactcaatcctggccatcgaagcagtcccatcgcaacaaatcccgaaggatttacgaggcatgggccttcgcgtggagcgcgatctctacttcaaacccgagaagccgctttcggcttatgccgacgcggccgaccgggaaggccgcatcatcgcctgaccattttcatcaccagtacttcaaaaaacgaaagcgcgatatatgctatagtggtacgtcgttgactagacgtacgtagccctgcgacgcggaagccatgctcacgaattggactttggtccctctcatccattgggccgggtgggacggcggcaacgcgctcccctcaaatcgcagacttcgccgggccccacggggcgctgcctcttcacctttctacaagggcggtaccgcgccaaagatagtcgcatcacttacatgagtacgctggacaccaagccgagcatcagcgcgatgaccgtccgccagtcgtcgcgcgaggggctggcgaccgcctcagcgaagggccagaaaccgcccaggagacaggcgaaggcaaggttgcccagaagcgaacggcgcatcatctcatgtcgccattgcatcattccttccgtgcccaatgcgatgcggaatcggcccaagccctcgagttcggcaacagcgtgagttcgggcaacgctgagcatccaagcgaatatcgcaaggacgaggtaagagaccttggagacgccgaacaggcctagcacccacacaatgagtccgacaatcactcccttgactagcgcgccgccgagcgacaacctcattccttcaagcttttgcgcaagccagcttgttttgtccgcccgtcgaggccggtgaggagcgtgctgcttgggacgttatggaagaggccgcgaccgaatggctgaagcgacggaaggccaaacgcggaagttaaaaatcgggacccgcaattatcgcccgttgaactctcggcctttctctttatgcgttgcccgttcgtgcagaccaggatttctatctcgcgggaggagacaagctgctgccaatatcgttccgccagcctggcgggactcgcaagaagagccggagcgcccggtctcatcgattgactctcgccgacattgaaggacctattgtcgggccgtgaatagtgcgggaggacgcatgtcactcagaccgcaacccggcagtccgagcatgtgacgagatggcggagagtgacggttcctgaccgtcgcgttccagcggtgaggtcgcttccgtttcggacggcagtgaaattttcgtgacgttcggttttcgcgcgctcggcgatcttggttgacagccccgccgtctgagctttttattcgcgttacggggatctgcgatctccccgcgaggcgtcatgcccaagaatcgcgtcctggtcaccaagggcgcagcatgtcagcatcgtacacctacctttcacccgacaaactgtttcgatcggtaggctcggcggccgcgccgacgcctggccgtcgcggcttggcgcggcctctcgcacatattcgacgacgccctcgcgcaggtgaacccagttctcctcctacacgaccgatgttgccgcgacacgatcaagagatcgcaagaagggccggccaacaaggttaagtgaggccggatacgggactacttctggggctgggacaaccgggagatcagacatgcgaacatcgacgatctatcaggtagcgatattcgtggcgcttgcagcgggactctcgcctgcccgcgccctgacccaagacgagcttgtcgccaagatccaagcggccggctactcgcaggtgaccgacgtcaagtcgaccgccgagggcatcactgccaaggctatgaagaacggcaagccggtgactctcgtcgtcgacagcagcggccagatcaaagagcgaaactgagatggaggacgcgcacgatgaaaagcaaaatctggtccctggccgtgaccggcctcgctctcgcctacttgtccttcgtctacatggcacacgcgcaagcgatcgattggcaaaaggtcgacgagaccctcggccggaaggccgcggtctctgatgacgtccaccgctacggctttccacgtagcgacctttcggtgaccctggacggcgtgacgatcaagccttcactggcgcttggcggatgggtcgcctttaaacctgggcacggtggcgccatggtcatgggtgaccttgtgctgctcgagaccgaaattaatcccgtgatggcgaagatgatcgcgaacggtctcgaaatcaccgccgtgcacaatcatctgctgcgcgcgagcccggcgacgttctacatgcacgtggccggccacggcgaccctctcaagctggcctcggcgatccacgatgcgatggccgagagtaagacgccattgacggtcgcgcccccggcgggcccggcggccgccgtggatctcgatacggcgaagctcgaccagataatcggcgtgaagggccaagccaacggcggcgtctaccagttcaacgtgaagcggagcgacccgatcacgcaggacggcataccgttgacgcccgtcggcccgatgggcgtggcgatcgggatcaacttccagccgagcgggggcgggaaggccgccatcactggcgatttcgttctgaccggcgacgaggtcaaccccgtcatcctggcgctgcggacgcatggcatagaggtgacggcgctgcacagtcacatgctcgacgagcagccgcggctgttcttcatgcacttttgggcgaatgacgatgcgatccggctcgccgaaggcttgcgcgttgcgctggacaagacggcgagcacgaagaactgaggcgaagacgcaaaggacgcgatccgatgtcctaccgggccagccgctgctcgccctagcgttcatgttgatctcgttgatgagagcgtccgccatggctcagaccttgaacttcgatgacgctcccgcgggaacgtcgccatccccttctggtttccgatggccggtgactacgtcgaagagctgcatggcggcgctctcgacctgaggaacgtgctttcgctccggcaagtagatctagatatcccatctcattatggacggatctggacgctgacgtaggcccggcgactgcccttacgcccagttcacggcagggtcgatatccgatcgacgcggtcgcaacggcaactgatctgaaaatagtacgggcgaacgttacagagtctttgagaaacggcagggatcgcctacaatcgcaaggtggaggtcggatcacccaatcgatgcttttctgacggtggttctcgcctcacctagaggcgcggcgcgccttggtcgtctcgacatcgcgatttcggcgatcgcaggccagggaggtcatatcgactgtcacacggcttttcgagattcggcccgctgcaggccatacttcggacatcgctcgcaaatccgcgcgggctctgcccggctgcgatgagttggcgatcgcgcggacagaacccgcgttacggccgccggggggccgcgactgggctaactgggcggctcgcggcaagggccccgctctttggcggtgatcttccagatgtcgaggcgggcgccttttaagacgttcgtcgacccgttatttcttcggcgcagagccatccttcaacgaagcgtcgtaatcggcctgcgagctattgatgtttgattgattgcctgtcgcactgctaccggttgtcgtcccgaccgtgctggttgtctcgcccggagcgtgggaagcagcgccaggccggtcctggttgccgacgtagccagattcgccggaattgcgggtttttatgcctttatccgcttcagtctgcacgctttgaggctccgtttgctgggcgtcagcagctatcggtatgactggaagtgcgaaaagcaatgccacagacaagtatcgcatggctgttctccatctaggtcccgccgcttcatcaacgtgcgcatcccagaacatttccgccaaactgatgaaaacttgcgactgcatccttgacacttctctcgccgaaaactggcaggaagagcgcaatcttcatcctttgtccgccgctacagccaagtcttgcagcccaagagcggtgcgcgtctcgcaggaacgactccgcgtcggttcgttgtggtcttctccgaacagaagggcaagataatggaccgtgaacatgtgaaaggcgccgccgacaaggcaaaaggagcgatcaaggagggggctggcaagcttacaggagacaaggacctgcaagccgaaggcaagatggacaaggctaaggggtccgcccacaacgctgcgggagacgtgaaggacgccgcgcgggacgccgctgacgccctcaagaaataagtagaagaaggtctgaactagccgcgtcggggcggctctttctttatttcacttcgaggttcggcggactcccgatgcgaaccttgcggtcggccccgtcaaggtcgatgccagcaatacaatcgaggaagtcgcatctctcttcctgtgaggtctaatcgatcgtgattgatggtcggtgctctcggcgatttgttgaagcgatgcatttggcctgaaggggtccgctaacggcgagacgctatggttggtcccgcggcccttgcctccatggggccgctctgcagcgccgcccgcctttccgcgaccgcatgatcgaacaggttaaggacgaggccgaacgcggccatgtcctcctgttcgatggctccctcgtcgtagcatttgagggtttcagcgatgatcgcgtcgacctcgcgctgcgacgccagcagatcctgctcggatgcggcaccgcggacctcggtgaccaccgcgagaagacggttgcggtagctggcgttgtcgtcgcgttcgtcccggtttagataacgccggagccaggcgaccgccgagccgatgccggaaagaagaagcagcgcgaaccagaagtagtcgctgtacttgtccagaaaggtccgctccgtcccgttgatgaccgccgcagctcccctgtgcaccgagggctccgcctccttttccgtttccggctttgtgatgcgcccggccccggcgactcgttgcgtgatcgtatcgcgtaccgcgaaaagctgccggtagaaggccgccgctttggcttccgatagttctttcctggccagcatgagatggttgacgctgatggtgtcgatcttgtcctcgggccagggcgggttggcgttgaagacgctgccgggaatctcctcggcttcgtagcgggggtgccggagtgcgatcgcctcggatgcttcgacctgaagaaacttcggtgctccgcgcgatcgggacgtcgcgacgatggcggcagtcgtgatcttgctgtcgaggggaccgacggcgagatacgcatccagcgtggtgtcctgcgccagctttgcgatctcttcggtcccgaattgagccgtggcaaccttatcgaccggcacgcccgagccctcaagaattgttcgcaggagcgcgacgttagcgccggtctttccgatgataccgaccttgtgtcccgcaagatcggcgatctcaccgactttcgcggcggccttcttcttggagtccttgcccgctcttcccgaaggggaccataacacgacgtagttcttgcggaggaccgcgagcgtctgcgcgtcggccggcatcgcaaggtcgctgcggccgacggccaactcggctttgccggcgcccatcagcgcgagcgattctgctgctcccgcggtggtgatcggcaagatcctgaccgtcctgctttcctgctcgaaggcctcggccatcgcctgaacaacctgatggtcctcactgcctgaagggccgacggcgatccgaagggtctcgggctgcaggatgtagaaaaggccggccgctgcagccccgaaggcgacgaatcccgcagccaacaagatcaggagccttcgttggcgtcgatcggcagaaccattgaccggggcggaagacgacatcggcagaccttttcgacagggtagcgctatgcggtctccgtgcggattatgaccatatcatcgagcaagccataccgacgatgcacaagaacatcgcggcggtcgcgatccagcctagccaatagaccggccccgaaatcagcagatcgcccatgaccgatttccgccgcactaagagcatcatcacggtcatgatcggagcggccagtataccgttgatgacagcgctccaatagagcgctttgatcgggtccagcgccgtgaagttgagcccgacgccgagcgcgaccgaaagcgcgagtacaccatagaacgcgacagcctccttcggctttcgcgacaggccgaccggccacttgcgaccttctccgatagcgtaggcagtcgagccggccagcactgggatcgcaagaaggcccgtcccgatgattccaagcgcaaagatcaactcggccattgctcccgcgacgggccgtaaggcttcggcagcctgagctgaggattcgatgtcggtcttgccggacgcgtgcaacgttgctgccgtcgtcatgatgatcgcgacggcgatgacgttcgacactgccatgccgacaagggtatcgatccggattcgcttgacttcctcgtcctccttctccggttcgcgcttgagcggcttcttgtccggattgatctggtgctcctcggcttcctgggaggactgccagatgaacagatagggcgaaatcgtcgtcccgaggatcgcgaccagggtggtcaggaaaggcccgttccattggagcttaggaatgagcaatcccctcagagcctcgccccaaggcacctttaaaagaaaaagcgcaatgacgtaggcgaacaagaccagcgtcagccacttcagaatggacacgtaacgctcatactgaaagaagatctgcgcgatcactgaaacagcgccgaaaatcacgacgtaaagcgtgcccggcccacctatcagaagcctgagtgcatcgcccatcgctccaaggtctgcggcaacattgatcgtgttggcgacgaacagcagcacgatcatggaccagatgacgggggcgggaaaatttcggcagacgtttcctgcgatgccgtggcccgtgacgcggccaatgcgtcccgagatctcctgggttgccgccatcagcggataggtgatcagcatcgtccagccgatgccgaatccgagttgggcgcccgcctgactataggtgccgataccggaaggatcgtcgtcggaagccccggtgatgaggccaggcccgaggcgctgcaagaagttgtcctgatctttattctcgatcggcttcttgcgcgttttcctcctcgccactcgtcgtcctcgctgccgtgtatccgattccggaacttacaacgtcgatgcaggcgaatttgttcggcgcactcttggcgaggccgactccgcccggccgcccacgctctcgggaaaaataggcagtggccctgctgtttttccggaaccttgccatcattagcgggttctcgcatgccgcatctggcggcgaggagaacaacatgaaccagcttctactgacgacggcgttggccgcgctgatctcgacgggcgcgctggcgcagtcgacggtcgtcaccaccaccggcaccggtcacgcggccgccgtgcagatcgagccggaataccgcaccaagatccgcacttacgtgaccgagcacaaggtccgtcccgtgcagcagaagatcgtggtcggccagctcgtgccgcgcgaagtcgaactcgaggcggtgcccgccgactggggaccttcgctcaccaagtatcgctatgtctactcgggcgagcgcgtgatgctggtcgatccgtcgacccgcacggtcgtccaggagatcgactaagccttcccggcgggtcgctgatcgcagcggcccgccactccatccgacccccccgccgatatcttgttttcccgtttgcgagcggccgtccatgccgatcattcgttatttcgtcttcgtcggcgggttcttgctggcgctgctcttcgctgcggatcggtacctgcccgctcccgtcgaagccgccgccgtggccgaccccgacaggaccatcatccggataaaatcggcgaggagcctccccgagaagatcgtcttcgacaccagccagcgggccgaggtgccgatgatcgcgcaggccgatccgatcccggaagagccgccgcgggaagtgcgagaagccatggccgccgtgcctggagcaccttccggcgaggcccggaaggaagcgccggcccgcgctgcggcggtcctcacgcatccgaagcggtcggcaaagctgcagaaacgaacgcccgaccggcgtctcgccttcgagcggaccgatccatttgccggcagatggtggtgagcggaagcgcgactagtattcaaaggaaaaggccgctcccttcacgtgcgtctgctctcaccagtgccggtagtgccgatgccagtggtgtcgaacgaccggataggaacccacctcgccagtgtgcttcggcaggggccgtggtggcgaccgaggcgagaccaagggcgccgaccatcagcgctgacatcgcaatcttcttcatgaaggatccttccacatggttcgagcgccccgaccgcaacgggaaaaatggcaatggtttcgccgtcccagcggcgagcgggcaatggatgctcggcgcgggggcagcttcactcgagagcatcgagcttggaccacagcagcaagctctgggttgggttcagttcatgttgcgccgcgaaagctctcgacggccttcgcttgatgtgatcgcgttaactttgttgaattcgccgcacagcgtttccgcagtaggctaagtcttcttgcgttgggggttcccatgttcgatccgggcacgacggcgctcttgcgcgccgtattcgacgaggtctgcgaagacgtctcgcgccacgaaaccgcggcgcgcacccatgtagcctcaaggattctggaagcggctaccgacggtgacacctcgcccgagaggctgaagcaggtcggacgcgcggccctccacgacgctccgaccatgtggcgataggtcgaggaaggcgggggtgaacttccaggtcaccgtgctcaagatcctggtgagctatcccggcgggttcgccgtcatgaccgatctcaagcgcgacatggcgattctggcgacgagcgggcgtgactgggccgaccgaaccaagcgccttgccgctcgcgtgccgaagctcgacatcttctcccaaggactagtcgagcgtctgaatggcggatggcggatcacggagaagggccgtgccgtgctcgagttcatgtaagctaagcctgccgagacgaggacggagagcgctgcgcccgctgtggagcccccggcttcaagtgcagcggcgtctccacctctcgccgccaggcgctccggccgaagccagcgcctgcagcgccgccgcgcggcacgcgagcgggcccgcgcaaaagcttcctgaacgcccgcttgtgcattgacgcacatggccgggaaaaaccggaaactttactgaccgtgtcgagttgccagcgatcggatcggtcgccgtgagcgcagaaatggttgacgatgtcgtgttgaagaacgccaccgagaccgcctggaacgtctaccgggctcggcgccccgatgtcggcgctcgcgacagccgacgctgtttgctggagcgccatctgcacaggagatgggaagagcgacagagcgataccgaagagcttgccgcctttggattagcctacctgcaccggcttcccaaagacgaatgttgacgtgcatgaaaatgctcgtcgcacgcgcggccatcggaagcacaaggcccggttggacgccgatcgcgatttcgtttctgatctccgcgatcatcgtaatcgtccttcgcatcgcgttcggggcctagctcgatgcggatcgcccagctcgctccgttggcggagagcgttcctccgaagctatacggcggcaccgaatgggtgatcgcctggctggtggacgagctcgtcgatcgcgggcacgatgtgacgctgtttgcgagcggagactccgccacgaaagccaagctccacgccgtatggccgcgcgcgctacgcctggggcggaaaggcgtcgatccaaacgccgcctgcgcgctcttgatcgaggccatcggcgagcgcgcgcgcgacttcgacgtgattcattcccatgtggattggctgcctctgccggtcctgagccgcaccggagtgccgtttctgacgaccatgcatggtcggctcgaccttccgggcttgcccgatgtgatcgggaccttcccaaaggctccctttgtctcgatctcggacaaccagcggcgtccgcttccggacgcgaaatggatcgcgacgattccgcacgggctgcccaaggacctgtttcgtccttcctacgaagccggtgcgtacctggccttcctcggtcggctgacggcggaaaaggggccggaagctgcgatacgcatcgcacgggcggtccagatgccgctccggatcgcggccaagataccccgggccgagaccacctacttcaagaagaagctcgaacccgagatcgacggaaagagtgtccagctcatcggcgaggtggacgaaatccggaagcaacctttcctcgccggcgccgcagctctcttgtttcctatcgattggccggagccgttcggtctcgtcatgatcgaggcgatggcgtgcggcacgcccgtgatcgcctaccgttcaggatcggtgccggaagtcgtggaggacggtgtcaccggcttcatcgtggacggcgaggagcaggcgatcgaggcgatcaagaaagtcgtgcgcttggatcgaagaaaagtccgcgctcggtttgaggaacgatttatcgcgagcagaatggcgagggaatacgagaaacgatatcgcgagctggtcgctggcaggtaacgccgccgaaggagttcggccgaaacgaaacggcccgcccgccgtaccggacgagccgctcgcggaaatggtttgtcggaatagagccgccgagcgattactgctcggtgcaaaccttggtggtcttcacggcggactcggcctccgtcttggtcttgtagacgccgttgcccacgaccgtcgtggtggtggtcgtcggcttggtgtcgacgacggtgcacttcttggtggtcgcgtcgcggacgatgtaaaactcggcggcactggcggcctgggtgccgagaacgaaagcggcgagcgcgccgcacacgatcagcttcttcatggtgtcctcctcaaggagtctgaaagtttctggtaacgaggctggctcggttgaagttccacttgttcccggactcggcgcgcgatgaaacggggctttcaggtggccggcttgccccggtcgatgacctgaaatcgcgcggtggccagtttggctggcggcacgacgaccgcgtcgaaatctgtggcttgtcgttccgcgcgcttgcccttccgcgaagcagcatctccggttcgtcgaagaaaattccacgcttggatctcgcgccaattgccacgatttcccgactcggaaccgaaggccgcgccgagggttgacgtccacatttgcgaggtttcagatgaacaagcgcttattgttggccacgaccgctgcggtcgccatcgcgacttcggcgttcgcgcagtcttctccgagcacgtcgagcactaatccgtccgcgacgcagcgtcagcaggattccacgtcgaccacgtcgccgccgacaacgtcgcccggctcctcgtcggggtccgcgcaaagcaatccttcgacgaattccgcccagacgcattctccgtcctcgaccggccagactgcggcgggccagtcgtccaactccggcggcggcatcaatacgacgcaggcgcctgcatcgaacaattcgaccaaccaggcgcagaccagacagccgtccggccagaccacgacgccttccaaccaggcgcagaccaactctccgtcgagcacgaacaatcaggcgcagagcgccaatccgcccgcctcgggcaccaatcaggcgcagtcaccgggtagcggctcgacgaacaccgcacagcagccgaataatcagcagaacacggcggatcgttcgtcgaataccaacgtgaacgcgtcggtgaacatcaacgcccagcagcggacccggatcagcgcgtcgatctcgcatctgaacgtgcagccgctcaccagcgtgaacttctccttgtcggtgggcaccgtcgtcccgcgcgacgtacgcctgcagccgctgccgcccgaggtcgtcgagatcgtgccgcagtaccgcggttacaacttcgtcctggtcaaggacgagatagtcatcgtggagccgtcgacttacaagatcgtgacggttctgccgtactccggccgctcaacggcgtcggcgccgacgcgcagcgagcggcgcaaggtgacgttcagcgaccgcgatcgcgaggtcgttcgcaagcacacaaaggcgcacccggtcgagcgcgagaagcgggtgaccaccggcagctcggtccggaccgaaatccgtaccggcgagcgcgtgcctgagggcgtggagatcgaggcttttccggaggaggtctatcgggatgctccgacccttcgtgagtatcggtacatcaaccgggacagtcggacctacatcgtcgaaccccacgagcgtcgcatcatcgaagagatcgactaatctagccaagaaaggagaatatccatgaagaccatcgcactgggactgttcgccgcctcccttctgggatcggcagcgatcgccgccccactcaacccgagcgcgctcggctcgaccgagatctcctccaacatggagcaggtccggctcgtctgcaacgagtacggccgttgtttccggacgcgcggcccgcgctacgttcagcgatactacggcggcgacgacggatacgtggttcgccggagctacggctactacggcggtcccggctcctacgaccgcggctacggctactacggcggcggaccgagcatcggtttcagcttcggtacccggagctggtgaactcaagaaggggccgctcgtagagcggccccttcgacgtctaattcgtcagtgcgggaatgagatgtctgctgttgccaggctcctgaatcaaggagcagctgctggcccgcctggaaacggatccaggtccgaacgagcgggccgagatccaggcgctgctcgccaagatcgagacggcactcaagctgctcggcgcccgggattccgcggcatctgcggtcgatgaatagagcccagcgagcgatttccccgaagtttttccgaaggacatcccgacgggaatgaaggccccagctctgggcagctagggggctatgagctggggccagtacgggattcgccacttggcattcgcgccttcgttcctcggttcggcgcggaacattcggttggtcgcagggagccgacgcagttaactcgggttgcgacccttcatctcgccgaactcctccactagccgaacgatctcctccggatgaaacggcttcttcacgatgcgactgccggggaccgggcgtggagtgacgggcgagaagccggtggcgtagatgaccggcagctccggatcctgttcacggtatcgctccgcaacctgccagccatccaactgcccgggcagcctgacgtcggtgaccagcacattcgggacccggcgtttgcaccaggccagcgcctcctcgccggtgctcgcgtgtatcacgtgatagcccgcctcgcgcagcgcttcgacgacgaattcgcggatcagagggtcgtcctcgacgagaagtatgctcactgctgactcttgacgaaacgcatgtgtctcgcatcgaacggcgcaaaggctggcgcgttcctggcttcgatggctcttgcggatgagccggtcaggtggaatggaggctcagcaggaacggctgtccgcggcaagtagttttcaatccatggacaggctctatccgctggttctggagcactcgcttccgatcgtcgtccgctacggcatctcggcgtgcacatgctcgtctgcgccgtcctgcaaatggcgcttcagaggcagacgggcgcgcctggctacttcctgttgctcccgggcgtgtttctctccggcctgatcttcgatcgaggctcgggaatcttcgcggccgtgattgccgtgggggtcggcgcctacgtcagctacgcgggcggcatcggcctcgaattcctgaccacgaatccgctcttcgccattaccgcggcggggaccgccacggtcgcggaattccagcgggcggagctccggcgggtcatgctggccgacaagaagaaggccttgctgctgcaggagatggcgcatcggaccaagaataaccttgcgatcctcgggggcatgatccggctggaggcgcggcacggcagccccgaactcgcggccgcgctcgaggccaccgcccgaaggctgcaggtgatggccgaggtctacgaccacctctcggtcaagcaggactcccgctcggtcaacatgcgctacttcctgaacgacgtcgtcgaaaaggtcttccagtccttggcgccgtcagggcccgtcgccttccaggtggtctgtggtgactttttcctgccgcacaaccatgcccttgcgatcggcatgatcgctaacgagctcgtcaccaactccctgaagtatgcctttcccgacaatagggcaggtcacgtcacggtcacgctttccaatgcggatgagatcgagctgtcggttgcggacgacggcgtcggtctggcggatgactccgcacccggcggcctggggtcgcggatcgtccagcttctcacgcagcagtttgaaggcgagctcacctacgagcggcaagatcccggattatgcgttcgggtccgcgcgaatcctcgctagttacgacgcgcgctctaggactcgcaatcgttcaagcagggacttcagggaaggcggaagctccttgtcgacgcgcaacatctggccaagccgttcgccgatctctgctgcgatcgcgcggccaggcaggtcgtcggggcggtctggattgctcatcgaagcaagctatcctcctcgcccttaccaacactcgaggtcaaaaagcgttgcggtgcccgtatcccgaatgttcacttttgaacagttccatgggaacccggtcgtccgcgccgcgtagaatcgccgtctatagcaggggcgcccggtgaccgaatctctcaccatcctcgtggccgaggacgactaccagatccaggaaatggttgaggaggcgctgaccgaagccggcttccggccgcagatcctgtcgtcggcggaagaagccgcgaccgttctgaaaagtggcatctatgaattccgggcacgggtcacggatgtgaacttgaggggcaagacgagcggctgggacctcgcgcgtctcgttcgggagcgggatccggagtttcccgtcgtctacatgactggcatgtccgccgacgaatgggcgaggctcggagtgcccaagagcattctgctcaccaagcccttcgcgccggcccagctcatcaccgccgtctcgcagcttctcaacacgggatcggcccctctctgagggaccggcttcgtgggcttcagagcagagcaacgagggcgaccatggcgaacagaccggccgccgtcacgcaccagcatgatagttcaaggaatcgcatatcgcgcccccgctcgaacttcctgcccgcgcggacgctacacctggaaccggacttccggaaccgaaactttttcgtgccctcatgaattcaggacaggggatgcaagcgaggcgcagccaatgtccagcatgccgataggcgacatggttctcacggtcgccgtcatgacaattgccttcgtgggcgagatcgcggtgttcgccctcctcggaatcttctgaggaagggcgcgccactggacgaggcacgccggcgcaccgccctgaaggagcctgctggagtaagtgcgatgtcgacggtggcgaacctgctcgcgcagaagcaacagctgctcgagcgactggaaaacgattcgggcccgaacgagcgcgatgaagtcgagagattgctcgccaagatcgagaccgccctgatggtgctggagtccaacgacccggtcgaggaaggcggaccgctgtagctcttcgacagacggacttcttggaacgcaggcagtcgttcagcttttccatcgcaggacatgcagcaaggcgctcgggaaggttgggaggagatttcgatgagagtgacggcaccggcgatcgcgtttgcattcgctgtctcagcatcggccatctcggcacaacccgtcacgtggacgacctacagcattcctcagaccggcacctcggtcgacttcccctcctcgatattcaccgaggaggcgggtcgaccggatggatatgggcagcacttccggaccgccgacggccgcgccgacatcacgatacaggccgcccccaacgtcgcgagcgattcgccagctgcgttcctcgccaaaaagcatccgccccctcgcatccagtacaaacgagtgactccccgcttcttcgcggtttccagctacaagggcgacaaggtctggtacaaccgctgcaacttcgccggccagctggttcattgcgtgctgatcaattatcccgccagcgaggagcacgactgggacgacatcgtcacccgcatcagcctttcacttcgcagcaagtagtggtccgaagcgggcgccgatctcatcggctcgaacatgcgacgacgtagggtttggcgcttccggaggcttgggaagacatcagccgtcatggcctccggagtcctacggaccgacccgctccgtgatcgtttaccaacggtgtgtataattcgccgatggacatcgagtacgaccccgagcgcgaagctcaggctgccatgacgcaggccgcggcgacgcatgggatcgagcggcagcgctggatccaggtcgcgcaggcctggctagagctcgcgcgcccgcaacaagatgcacggtctccggagccctcccatgccgggagtgagtctcgggcggagccgcctgcgatactctcacgttcgccaacgcggtgttgagaaattcgcgacccgcttgggacgcggaaggaccattcgaatgggcgcgggagcaccagttgcggcgcgccgggttcggccatcagaccgttggcggcgcggagcggaacagggccggcccggcaagcgctcgcccgcaacttccgaacgtgggcggccttcgaatgggccggaccgatagctcgccgaaacgaatgagccgggtgttcgttgtggaagtgccgacaaacttccggaggaatccatgagggaagcgcttcttgcgccgctcgttctatgcgcttggatgtccactgcgacggctgccgaaacggatgccgtgaagttcatcgttgtgcgcgatccgctcacacacaaatgctacgtcgccgaggcggaatcggcgccctctttcgcggtgaggatggatgatcgaataagcttccccactcgggaagacgccgcgataggtctgctcgggatgaaggcttgcaggcgttgatgagggcgaatacgctcgaatgatagtaacgtcggcctcgccgctgtcgttcactttgcacttgacggacggccgcaggatcaggacgttcgccgaggcggtggcgttcgtcggcagtttgtcccccgaggcaagaagtcggaagcattgggaactgtcacatcggatgctgcagaggtgcctggaaagcccggacttcctgcacgctgccacgatgtcgttgcgcagcgcgctcctgatggacggcctatcttgagcgtcgaatctggcccatggccggcgacttgtcgaactcgttggagctcgcccgtttgcaaggcttttggacagcctaagcgctagtctgaggccgggctttcgaccgccaaaacgtgctcaagcgaaggtgaacggcagcatggtcgcctggtgggggaggccgaagacagcggttcgttccgttcgaaggtcggcgggtcgtaaatgcagaagccgcgcagaataccggcccccagctagagctagagccggcggttcctctcgaaggggcgctgcgcaggctgacgatggcggccaggcccaacttcagacaatcgccacaaagtttacggacacgctttcccaattagtctgtgcgaaggccgctatgtcccaatattcgctcgatgtgttgcgtcagcgctatgtcgtcgagaaacgaccactcgaggccagcgtcgaacagatcttgcgggccgacacccgcgcgggtgcccgcgccatcctggcttcgatcgataagagacgcttcgaaaacaggtccgaagggcagcgcctccgcaagatgctccgcttcgagacccctctctgggacagccgccttcatgccgtggcaggcgtggacgaggccggaatgagccctctcgccgggccagtctccgctggcgccgtgatcctgaaacccggcacgcggatagtcgggatcgacgactcgaagaaactcgacgccgcggctcgcgaggaactcgcgaaggagatcaaggaaaaggcagagagttggtgtgtggcgttcgtcgaggtcgaggagatcgacgcgatcaacatctattgggctggcattcaggccatgcagcgcgccgtccggggctagggttgacgccgcaacacctgctgatcgacgccaagcgattgaaggagatcgacatcccccagcaggccatcatcaagggcgatgccaagtcagccagcatcgctgcggcgtcgatcctggcgaaagtcgagcgcgacacggtcatgcgaactctcgacattcttcaccccggctacggcttcgcggatcacaagggttaccccgtgccggcccactatgaagctcttgccaggctcggtgcatgcgcagctcaccgtgggtcgttcgggccagtacgcaaggttctcgggttgccgcccctgccgccgtggccttctgcatccgagcgagccgccggtgaacaggccgatcgcttcgtctagacggcactattcccgcgaccagctcttttcacgaacgacgtccttggcctttttgtcggaccgctgtccgagatagaccggctggcgcagctcgcccttgctggtccactccgcgaacttcacttccgcgaccagcgtgggacgcacccaggtcgtgacctgctcgtccttcaccttggcaggaaagggcgacttgggagtcttgagtttcatgagcttgccgtgaagctcttcgaggttctggtggctgaaaccggtgccaacatggccgatgtatcgccatgcatcgtcctcacgtaccgtcagaacgagagcgccgaagaaaggccgggttcgcctcggcgccgtgaagccggcgatcaccacctcctgccgctgcgcgatcttcaccttcagccagtccgcggtccggtgtccggacgcgtacggactatcggcgcgcttggccatgatgccttcgagatgccttcgctcagcttctgcgaagaactttgttcctttacctccgcgatgcttgctgaacgcgatcagcttgtggcgcggcaggatggccttgagccgcttcttgcgctcgaggagaggcagcgcgcgccggtcctcgccgtccgcgaacatgaggtcgaacgcgcagtacaagagcttggcctcatggcgcagggcgttctgaagcaattggaaatgggagacgccgtctttgccgatcgcgacgagttcgccatcgatcacggcgtccgccttcacgccctcaagcgccttcgcgacctcgacgtcggagtgactgatgatcttcccgttacggctgtagagcgcgacccgaccaccccggatttccgcgaccatgcggaaaccatcgaacttgtcctcgaagacccaatcgagatcgtcgaatggcgaatcggtcagcgtggccagcatgggctgcaggcgaggaggcagcgtcgattttcgggccatggtagggtctttctacacggccggcagcggccgaaacgaggaggacggaaggcgaatccgcgcggcatcaccagccgcgaccgtcccgccggcccgtaccacgcccagcaccccggacttgaacggagggcccgtttccgccgacgagagcacctgccgcttgaggccagctcggaagcggtcgataaggacgcagggggtccgcaggcctgtcagctcgacgaccgcggatggtccgagctcgaccagggtcccaaggggcatccgttcgagatccaatccggcggtggtgacgttctcgccgaggtcgccggcgccaacctcgaagccagcttcgaggagggacgggaagagttcggatgggatcaggtggacctgccggagattgggcaggcggggccggcggcgtgccaaattgcggtgccgcacgaaggggccggcgtgggcgtcgccttcgacgccgtggccttccaccaggattatgcgctcctgagttggtttgctgaagtggtgcccgcgatcggcggcgaccgccacgacgctgccctcgagcgccagatcgtggccctgcgacatcaggcggcgcgggcgagcgagcgccgcttctgacgcaggtagcgcgtgatctccgggagcgtcatcgcgttcaggacccggtcggcagggacgccgcccttgcgggccatctcgacgccccagtgcatgtggtcgagttcggggatcgagtgcgcgtcgggattgatgctcaacatgcaaccgaagtcgagggccgcctggtgccaacgccagtccaggtcgagccgccatgggtgggcattgatctcgaccacaacgtcgtgcttggcgcacgcccgcagcaccttctcgacatcgatttcgtaacccggccgccgctggagctgccgccccgtcatgtggccgatgatgatggtatgaggatcggagatggcccgaagcaggcgctgcgtctgcgccttgcgatccagcttgaagcgcccatggatgctggcgaccacgaaatcgaagcgctcgagaacgtcgccgtcatagtcgagcgacccgtccgcaaggatgtcggattcgatacccttgaggatccggaagtccttgccgaagcgcttgttcagtcgatcagcttcccggtgctgctgcgcgatctcctcaacggagagaccgccggcatagtgggcggacttggaatggtccgccacgccgaaatactcgaagccccgctggcgcgtggccttggccatggtctccagcgtctcggtgccgtcgcagaagactcgccacaccgcgcgcgtctagcgaaggcattcagccagcctcccggtccgagccttgcggcgccgccggagcaaggcgagcgccggagcggtcacttggccggcgatcgagagaggcctcgagcttctgggctgcgcgaaaatcctcaaggtgctggacattggggccgtaggcagcctccttcttgaggagattgtagatccggccggccactagttgcagatgcttcatcttgccccgcggcatggatctcgctttgcagagagctcggacagcgtaggcgcggaaatagtcgaatgcgtctgacatgatgtcagtaacgcccgctctcgccgggagttcgatgggctctccaagactggatcgcccggcgcccaggcgcaaatgcccgaagagtggggtcccgggaactcctcgccgccttcgaggttgcgagactcgttgattgaggcagattgactgtccgccgtcgggcccatcggcggcgggcttctcgtgagttgagtagcgtggcaaagcgtacaaaggcgcctcggggcggaaagtccgaggtccccacaatgccggggttcatcgaaccccagttggcgaccctgaagctgaaggcgccttcgggaccccaatggattcacgaggtcaaatacgacggttaccgcattcagctccggatcgatgacgacgatcgccgagcctacacccgcaacggctacaattggatcagcaaattttcgaggatcgctgccgcgttcgacatcaaaggccaagctattgtggacggcgaggtcgttatcatccatgatgggcgcacgaacttctccgagctgcaggcagacctcggcaggggcgatcaggatcgactggtctacttcgctttcgatctgctctggcgggacggcagagatctgcggaaggagccgcagatcgagcggaagaggctgctcaaggatctgatcgaggagcacgacctcaaggagcccgtcctctatagcgagcaccacgaaggggacggccaggcactgttcgcggcagccagcaagctgaattacgaaggcatcgtctccaagcgggtggacgcaccataccgatcagatcgagtggaggcttggcagaagatcaaggtcgttcagaagggcaagtttcccgtggtcggcttcatcaaggacccatccggcgtggccgcactctatctgggcaagaaggaaggcaaggatctggtctacatgggaaaggtcgggaccgggtggagccgaaccacctcagcgcagatccgaaaggcgctcgacaccgtggtgagcccgaagcagaagttgaccaagatcattaggaagccgaaggccacgtgggtcgaacccgagttttatgccgacatcgagtaccgcgacatcacctccgaaggtctgttgcggaccagctcgttcaaggggctgagcaaaggaacgcgccgatcatagccgcgttttcctgcggagtatgtggagtaccggtcatggatccggaacagcgagttgcgaaggccttggaagacgcacaaggcatcttggcccggcatgtcgagcccggccccagagattgcgagcaaaccataaacaagctgctcgatgtgctcgacgacgaaaccgtcgtgcaggccctcaaggattcgaagatggaaaagcccaccacggaacaactcgacgagctcaagaggctcagtgcaatcgcgcgggtgccggacgaatcagagattgtcacttcgaaggaagaagccgaaatccggatccgcgatttgaaagacaaggctcggatggaatgagacgatccgaggatgacctccagagcaaagagctcggtcggtgaagggacctggatttcggacatccggcatgaactcgatggacacgttcgatcccgataagccgtgccgcgttcacgatggtctcaatgaccagatgatcgaatggagtccccagtgggcgtcgattaacgccaacacgcgtcgaaatgggacgaaggcgtcgttgcctgggatggcctgttgctcgacggatggtctatcatcctccattcttgcggccactgagcggcctcacgcggaacccgcgaatccttgcggcttgcatcgccatcagttcgcaagaggagcagccgatggcggcagcgaagaagaggaccgcgcgtggacgcaaacgggaccgagcccgatgcggcgggagcgctggatctcaagccatggatagatagccgctgttgattgcctgatccaccgagggcgagggatcgacgggctcgccgcctacatgcgctcgttccagcttcgcagaggagtcgatcggcttgcttgatcaatgcttcgccttcagcgcgagccgctgcagacggcggtcagaatggtcctcatcgcgcgtccgttgccgagctccttccctaaagcctttcggtcgcaccgagcggcgtcgggggatgcttcggagccataccgaacgcgaactatcaatcagacaggctcgaaggacggccagcagccgtcctcctcatagctatagcgcgacaatctgggtgggaagcg

SEQ ID NO: 110 - DNA, 14371 bp, Bradyrhizobium colbertium
ccccgtgatgttgaccgcatgccgctcgagcacgagatcgtacgcacctgcgtaggccggagctgcaatcgaacacgccagccagacggcgaccgtgatcggcaataacgtatcccggaattcccgtctcatgcgatccccctcgctatcgtcccgagccacggccttcagtggctgcgcgcggcatgctcgtagacttcggtgtatttcttcgctgatcgttgccagccgaaatgtcgcttcatggctgcccgccgcatggcgccgagtcgcctggctgagctgaacacgtcgaaggaccgatagatcgcgttgagcatcggcgccaacgacgcgtcctgaaagagaaaaccggtcacgccgtcctggatggtgtcggccaaacctccggtttgatgggcgatcggaagcgacccgaagcgctgcgcgtacatctgcgtgaggccgcaaggctcgaatcgcgacggcatcagtaggaaatcgcttccggcatacatgcggcgggccagcccgtcttcataaccgattttgacgcccaccttgccgcggtacttcacggcaagcttcgcgagttcggattccagacccggatctccgcgacctgcgacgacgatctgtccgccctgccggacgatgctctccgtggcctggatcgtgagatcgacgcccttctgatgaacgagccgggagatgacggcgaacaacggtccttcagaaacggccagaccgaatgccttgcgcagggccttggcgttcgcctgtcggctaccccaatcgccgatttcgaaaggtctatccaggtgcggatcgcgtcgggggtcccagctccggtcgatcccattgacgatgccggtaagccgaccgtcctcggctttgagcctcagaacgccgtcgagaccgcaaccgaactctggtctcgtgatctcgtccgcataagtggagctcacggtcgtcacgtgcgagcaataggaaatcccagccttcagaaaggacgcccggccatagaattccatgccgtcgaccgtaaaggcgctctccggcacgccgagtggtcccagtcgttcccgatcgaagacgccggcataggcggcattatggatcgtcaagatgcttggaatggagcacccgcgccaagcgaggtaggccggcgcaagcgccgaggtccagtcgttcacatggatgagatcgggacgccatcccggatcggcgccgccaatagcgatctcggcggccgccgacgcgaggcgcccgaaccggatgtcgttgtctttccaatctgcaccacttggatcgcagtaaggcgttccatcgcgttcgtagaggctgggacagacaagtgcatataccgtcaggccatcgatcgtctcgaactggccgatttcgcagtaaggaaggccggcgaaagcgtcaagtcgtccaacgatccgcagctgcggagccgcttggagcagctcgctgtagccaggaacgagcaccctgacgtcgtgaaatcgcttgagagcacgtggtagagcggcggaaacgtccccgagccccccaacttttgcatagtcgccgaactcggaactaacgaacaaaatccgctttcgcgaactgttgactgtgacgcgcatgcgatccccgcagatgctcccaatacatagacgtctacctcgtcaaattattacgggtgcaacgccaagctcgtttcgttttgaacgccagcgcttccaggtcgcgcccgatgctgaacagaatttggtatggatcgtttgatatgcatcaagcattcaggtcttcttcgcaggtggattcggaagaagaaaccgagcgggtcgtgtcccttggcgtgatgtagctgagcgcgggtcaccgcattcgctggcattggccggatcggtcggctggcgactgccgggaagctgacggcgggatcatcgcccaacgggcgatggtttcctgcgtcatgtcgcgaccgcgctgaacggcccactcgtcgttctgctcgagcaggatggcgccgaccaagcgggtgatggcgtcttcgttggggagatgccgaccgcttcggttcgccgcttgacctgaccgttgaggcgttcgagcggattggtcgagtacagtttggcccgatgcgcggcgggaaagctcatgtagcccagcgcgtcggtctcggcctcatcgaggaagaccgcgagcttgggcactttggggcgcagctgatcggcgatgcgccgccattgcgtccgtgccgcgtcggtgtcgtcctgggtataggcggtggcgatgaaggcggcgacgacgcgccgcccactcttgccggcatgcgccagagcgtcgcgcataagtgcagggggcagcgctgacaggaggccttgagaacctttgcgaccgtagccttgatcccttcatgcgcgtcagagacgacgagcttgacgcagcgcaggccgcgcttgcgtaggaacgccgtccagaacgtctcggaccaatatccgtgccgagaacctcgcgccggccatcgcgttgtctgagacggcgcagccagaagagctgacgcatgagctggccggagttcgagaccctgacggaacgcttccggctgccaactccacgcatcactcgcactgggcgcaggcgcggacatgtcgcgggttaccctcaggaagaatcggatgcgggaaagccgcctgcccggatctgtgagggcgaaagccgaatggctgagctactcgaccacgactggcgagtgcggcttagctgttcaatatgacggccaaaacggttgccaaatggtccagcggctcggcgcagaaggtgtgaatgggtgctcgaccgagggtcgcgacctcattcatcgccgagccaaaccccgccagccacgtgcatcgccatcgaggccttacgccggcagcgccacaccaggaagcagatcgcggccgaggtcgaggtgtcacccgccaccgtcagccccgtcattcgccgcctggaattgaaccggatacgggacgttagcccggccgagccggagccgccatgaacgggagcgcccaagcgagatcatccccaaatcgacatcaagaagcacgggcgtttccagcctgtaggacccgtatcaccagcgaccccagtactccgaacaggagccccggcgctggttgggagttcgtccaagtctgcattgatgatcattccggcggcgccgcgatgctacggtgggtgatctccatcgaggaggcaaatgaaggtcacgactgaggtgctggcgtgtcgtcggcgtgttcggcgaggcccccgggacattgtatctggatcacacatgggatttgcccaaggtaccaggcctgggtgaggaggagctttgagcggtgcgtcgaagccgccgccgctcacgcgcgcctagaaatcacatcacaggcggttgcccgatggatctaaagatcagcggcgaatttcacgcaggccctttccaatcgcctcttaagggcggcgaggtcgtcgatcagatcatccagcttgcgcgcaccgaattcagcggagatatactcgttcaggcgttcctgccgaagcgccaaagttgctaaatgcttgcgggtcatgtccgtcagcgacatccgcactatccgacggtcttctggcgaaggctttcgctgcacgaatccccttttctcgagcagtttcgattgggtcgtgacaaatgacggatcaacatgcagcattttggaaactgcgttgactggcaccccggcaccgcggtcgaggtcatacaaggctgcaatcatcctccattgcgggacgctgatgctgagcgacttcgcccaaagataatggatttcctgcaggtgcacgctgatcgaattgatctcccaggcgaagcgctgaatggtgtcctgcttcctcttgccggacgccttcatttgcacggtgctgggctttccgccatgctggaaaggggattcgccatcatccctggccgcgtcacaacgtgcgcccgagcgcaacccggccaatccagcggccctccgacgatgcagcaggcggacttcgaaaacgacgagcgatctccgccttcactgtcaactcaccgcgagccatatggccaagacctctgcaagacaatccttttaatagacgtattgccgccaaaatattacttcttgttggcttcgtttatgtgaatcatggccggccaacccagcttcgcgaatggttgtctctctcgtctccagagggggaggggttagctataagcttggccttcgttcgacgcgccgctgggaggagatgctccacgcgcgcaggcgtaaagctgcaccctacggttgactgaacgacccctgcggatgtcaatgccgcttgtagagcgtgacgacgctggtgccgccaggggacaacccgaaatcaggctgtttgggcctgcccgttaagccatccaagcaacagaaccgccatggaatgatcgcggctgcggtgcaccgcgactcaacgcgaggtgatacaaaccgctcggtcaaccgtttgaggctgggcggctgtggtcggtgacgctgacccgcatgatcgacgcgagcctacacatcagaattccactcgagtcgccagcagccgtctctagatcgatccggaaactagggccgcaacccgattaaaatcattgcagtatccgatcgagatttactgccgttcttcgtatcggtcgcagtcgatgatcgccacgtcgcacccggacaatttcccgaaacggtggatcacaacgaagaaccgtgtattcgtcctgggaaaagggcggtgggacgcgccagcaaagggtctcccccgcaggcactgcgtaggtatgcccatccttcagctcgtaacggcacgaatcggctctcttgatgttgtcttgagcgtgagcatgggccaaggcagccaacgcaagaaccaccgtgagaagcgcgcgcatactctattctccctggagtcacgaacgggcctgcagctaaagggggagagaatgcagcgcgccgtctgcgagatagacggggcagggttcggaatattacgcggtcgcaatccagcatttttccgagcgatctaggaacgcagggaaaggcgagagattagcgcgcgggtgggcgatcaaaccgaccacctttcaatcgggagcgagcgatgcacaagcaagaccattcaggttctccgcacggaagtatttctccattcggattcggcgactacttcttcttcatgggcgatagggcgaacaacggctaccccggctctgacggcatggacgtcgcattcggcagaggaggaaatgatcgtctcaccggcgggccggccgacgacgatctgatcggcggaattggaaacgatcgtttgtccggcggatcgggagctgatcatctggacgggggcgcaggaaacgacgtccttgccggcggcgatgccgacgacatgctggtgggtggcaccggcaacgactacctgaacgagggagcgggacacggcgatctcgaaggagggcctggcaacgacattctcgtgggtgggcccggtgcggacgccttcgtggtcgaacccgaaagcggacacgatgtcatcaaggatttccgggcagggcccggtatgttcgatcacctggctcttcaggacatcagcccgaacgagctctcgttccaggacaccccggacggcgtcctgatcagctggaaccggggaacgagttcggtcttactcgaaggtgtcgcgaaaagcgagctcgcccaagatgacttcatgtttgccgacagcaaggagcttcttcccgtcggtgttcctgaaagcgcatcggtcgcggcgtcttcaaacgcattttggtggtcttctcacggttcgcaggccgcgacggagacgtttcaattcgacgacgtcaatctgaagaccggcacgtccgcagacgacgtattccaggcaacagcggatcgcgacttctatttcggcggaggtggcaacgaccgcctctctggaggtgcaggggccgatcatctcgccggagacgccggaaacgatgccttgtacggcggcaacggcgaaaacgaccttcgcggcggcgacggaaatgatcagctgttcggcggaaaggatgccgatatgctgatgggcgggaacggcagcgacaggctgagcgccggagccgggcacgatatgctcgacggaggtccgggcgacgacatcttggacggcgggcccggtgcggacgccttcgtggtcacgccgacgagcggaaacgacgtcatcgtcggcggattcactccgggcccgggtgcgttcgaccacatcgcgttcgaggacatcctgccgaatcaggtgagcgtgaacgatacgctccaaggcgttctggtgagctggggatccggatccattctgctcgaggggattcagaaagatcagctggcgcaggacgacttcatgttcgacagcgtggaaggcggcgccttcgtgccggatccctcgatcacatcggaagggtccgcgctgctgttccccgagaacgagcaggacttggtccatgcgaatccagtgagcgacaactggaccatcatcgcctgatcaggcatcggaccggccgagtttgcacaagagggccggcacgatccaaggtgcggcggcgagccggagcagctgctgtttgtcatcgacgaccgcaaggagaatgttcgatgtcgcttctatctcgccgtcgccataaaatccatcgggtgaacgaggcgatggcggctgcgcaccgctatccatctgaatatcgacggcgaaaaggcaggttattacagcggcttgcgcataccagtatccacacccgatcgctgcagatgcttgccgtgcgccgacgccgatgtgatatcgaaaaggtccttctggttcggctacaggacgtcgatagacaggtcgggaagctttgaatatggaaggcgcatctgatgggtgctcacggagttgggatacgacgatctaggaaggccggcggcgttcttaggatttcctgactcgatgttcgggggactgcaagcaaatctctccgcatacaagacgcccgtggagctactccttgtccgtgcccgcggccagcaatgtgcattgggcgagcgacattggatcggctcgccgataccttcctgaccaacccgatggcggcgacggaggttggcgcgcccattgtgagcatgtacatgttgaccccgatgcctttgacagcatcgtccaagcggaccaaccaagccgctctcgctgcggcgttcgcgacgagtgatttgcgctcgatctgcagggcggtcgacgcggcggtggtcgcaggcgggatcgccaaggttgctcgagctgcgaaggtagaaagaacgactgtgtactgcgcctttcgctgcgagagcggacccgcgttggacacgatggtcagagtgctacgcgttttgggattgcgtctgatcgtgaagatcgagccatacctccccggaggcatctcggctggtcccgaagacgacggctcggtcgctcgcggcggcattcagaggcgacgatttggacctggccatcgaagcgttggcgcaagccgtacgctctcatgacaatgtttcggaactggcgcgagcgacgactctctcgcgcgagaatctctatcgctcgttcgcttttcctcgcataccgcgatttcctgaacgcgctggtactgcggttggaaattgagcggctgccttcgaaagagagcggcgccgcatcgtaaccatcggccgggcggcaagttccgcggaaaggtcgccgacccacgcgaaggaccgtctcggtctcggaagcaaagcttctcgtaggaggctcaagcattgcgcgccctaggccccagccgaaggtcggttcaccgaaggacatggaacatgcgccgacgttcggacaagttcgcactggtcctacctcgcatcttgtgcgccgctggagcggtcctgttcggatgaatttcaggtcgagctggttcgggtactcgagcggggaatttttaatgccagcaccggaaaccggccgatcgctcaaagtagccttggcgcggtcgcaaacgtccggaacgcctctctcgttcagagcacgaccaccattcctgcgcgcaagtcactacgattcgggctgcggtatctgatcgagggcgctcccgcctgcgcgcgcgtggagtataccattcgcggcacgatcggcgctcaggcctaccgcgagttcatctttgaccacacgtaggagatcgtagccggtgagtgggtcttcgaatttttggcaagacggtcgaaaggtcggaagcgagacgttttgcgtgttggacgcggattccgcgccccatcggtcggacccgtcgaaggcaaattgcggcttcttgatcggacgaatggagttctggagacgggccgttgcggtaggtccgggaagtagctcatgagaggtcgcgcgccttcggttcgcggcgatgattccaataccgtctatagcggcctgcatcgctccgcagcggccgcgtgaaggccgaattcgcagcgccgcgaacgtgagctgtggccccactgccgccggtcgacccggtgcgacgcgcaatcgcgaggctggaccggatccctagggaggcttcgtgaacttatgccacttcaatgaggattgctgcccaatgccccaagcgacgatttgctcgccggatcggctggtctggctggacggcttctccgcattccgtggataaatctggaggcgatggggctcagccgaagtcgaggcttcgaatgctaccggcacgctcggcaatgaaccgggaaaggaactctgccgcgttctgcggccagaactcgtatcccaccttggtcagaagctggagatgggcgcgttcatctcacgtccgacccaaagctcatgaaaggccgcaacgagatcggcgtctgtgatatcgatcgtgccgatcaacatcttgaaacggattgccgcttcgcggcttcgaatgtcgctgccgtcgatcagcatctcggcattgctccggatcgcagcattctcgaagatttccttcaagaccgcgcgaatatggctgacgtccgatcccgtgcccactcggccaactatcccggtcatctcgtttccagccctttcgatcagcaattgagccaaccggcatcaggggatgtcattcgccttgtgcggacatcgaacgggcgatcctgcctcgtgtcaaggaacgcttcgcccgtgtcgtttacaccgctgctcgcgcgcgacggtcgccaggcgacgcgatggcgcgggcatacaaccagctttctacagacgctgagctcggcgaaaaattacagcgagtggcatagctgatcaccggagtccgcccttggagacatatggatcgcacaccccggcggcgacatgatatcggaattgcggtcgcttgcggttcaccgacgccctatgcggtgcaagctcggcgaccccacactatcgaccggaaaagcgaatgccacgaacatctccggcggcgagccgatgctccgacgcggcgacttcaagcgacaattctcccattcggtgcgagcgttccgcgggagcgccccgcgacccgacacgtttcgccgttcctgaccgcggtgcgtttccggatcgtatgactgtttggctttgtctcatcggagctggcgccggactcgcgcttctcgatgttaatacgtcggccgcttgtcgtggcgaggcgatcttttcgggagttcccgggtgggcgatggccgccgccgcaggctcctccctgcgcctacacattcaacgccgattgaggccgttcttcggtccgtacccgttgctgatgatggtcacttgggcagataagatcggcttaatcaaaggaaatggagaagcgctcgcgctcctcgaaaggctgcgtcgagcggcgatcgagggagagctcgagttctatggacaactggtcacgacgacgggcgtggagcgcgaattgaccaaagtgcctcctggccacctccaggtgtgcgcgataggtctgggcacctcgcgtgcgcaggggaggaacgaggatgcattcacctacgatccgaagcgaccggcttcaaaggcctcgcggcaggtgggtcacttccgcaatctccatgtgagcaggagcgtgctggggatcatccggcggatctgggaagacgcgcacgggtgagtcggccgccgacagggaccggcgcactggccggcaaagtgacgaaccggaaaatggttcggttacgatctcgtcgagggcggagcccatgccgaccgagggaaccggtctttcgcgaacaatccggcagcgcccgcgcgacgtcaacgcgacggcggtggaaagcgtttaccacctggagcaatccggtgtgagccgggtgccggtacacgcaacccaccgcggtagtagtccggaaacgccgatttcccacagttttcgacgcattgggatcctggcagagaatcccatgctcgccgactccctcaacgtcaacctcgcttctccgccataatccagcctcggcacagcgcgtttccgatcaattcgccgccatcgcgactctgaccgccggcgagtttcttctatggaagcgacgaggagatatccttgggaagcgaaggggtcgataggtatacaggtcgttcgggctccgtccggacctacaagcttgctattggacgggcggcgcccaatcgttccatgtgcctggcgacgtataaggcatggagcccggctcgaacctcgtgtgacggcagaagcatggagacaaaatagtgcttctggtgagcgcgtgccaattaagatcgcgacagcgtccacgtcgtccgcagacaccgaccgagctcgatcccgaagatcacgtgctgagcccggtcggcaacgaggagtggctgcgttcctactggaatgggatcgccggccggctgacccggggcatgctggctgccgatgcgtcgccgggacatcggtgattatcttggactgacgctgagaaccattcaccgcgcggtctcaactcgacacccaaaggtgttctggtcctccaggggacagatcctgtgcagtcccaagccggaattcccagcgcgagcgccacccatccctcaatgaaggcgcttcgcgacgatctgacggagatcgttcgcatactcctcaaagatccagagcgcctcgtcctgccgccccgctatgggctttgatgcggactttggcatcttgtccggcttcgaatgaaaaatctgttctgaccgattcatgccccgaccattggtcgatggcgacgcaggggagttgatccaagtcaacggatccagtcccatccggattttcttaagcgtgctcctcctctttgtattgcctagactaggagcaggcactaaaagatggtcgtttactcgcgcttccgaccctttacccggagaggagacgcccagtatctctcctctgagagagcgacaccgtacagcctcaccaacatcaagatttctttgagccccctaggaggcttgagcgtgctcgcgacacagcctcggaggtcaatgagcggcgctctatccataacgtgcttctcggcaggagctccaaagcctggggcgacgttcacacgctactctcacatcgtctctgcattttgcgagggaagacgccggctaagttggaactggaggattaaagcccctgcggctcgctgttctgcaccttcattgacaagcaatagtggacattcgaagtgggggctggattgacgcttgttggcaacgccgctcatcaggacaggctgttgaagcccgtccgctatcgggttgcgcgacagcttcctttgctgcaatgcatcaagatcgccaaggtgctgcagcaccagatcgcccagcgctgttcgcactgtgggcgggaggacagccgcaagagtattgcaccactcgatacggagccgcaagacttcgctccggctcatcggagtcaagccccagccagcgcattccgacgagtgggccgtggattccgagccaagtcggccgcctgtaccgattgaagccggccaaggattgcgatgatcccgaccgtctccgacgacgtcatcaggtcagttggcgggctcgtcgtcaagcgtctgacgtttggcggcggctttgcgtaggcactcgcccttgtgagcctgtgggcgttgtgcacgaggcgatcgaggatagcgtcggcaatggttgggttgccgatgagttcgtgccaatgctcgaccgggagctggcttgtcacgaccgtcgagccgcggctatggcgatcctccgtcatctccaacaggtcgcgttgctgctcggcagtcatcggggcaagtccccagtcgtcgaggaccagaagctcgacgcgcgccaggtcctgaggaggcgaacatggcggccgtcgccccgcgcgagggtgagcgcctcgaacagccgaagcagcagttgatagagcacggagcggttgtctcggcagaccttgctgcccaaggcgcaagcaattcagctcttgccgtcgccggtcgggccgatgatgagcagattctgatgcctgtcgatccactcgtcggcgacgagtttttggaacagcggcttgtcgagccacgcggtgccttcacgtcgatatcctggcgacggcgttctgccggaggctggcgaaccgcaatccgagcgaccagccgcttgttctcgcgctcggtcgcctcatggtcgaccagcagtgcgaggcgctcgtcgcgaaccacgttattgcgagaccaaggcttgcgagagcacaatcgccagcagtccgaccgctgcggcttcggtctcggctaagaccaacctgcaacaaggacgccccacgtatccggagcaatgcctgctcctggcggcggcgatcagagccggacgccgtggccgcaagcgtaaccaggagagcaaggacgatgccgggaactccgagaaagagaaacagcacccgggcatagagcgcgccaggacgcacgccgtcgagccgtgtggtaagattgttggcgatgacggcgctgcggcaactctggctttgagattatttgccatccgaagtgcggtaaggcgatgattggttgcttgcgccggatggggaagcgccaatcgaaccaacgcgtctcgattgcgacaagatcgatcctctgcgctcgcccgagctggatagatggacgcacagtcaatcgctcaaaccagcgaccaacgagaacgcccgggactaaaatcgacgcccttggtgagcatcacgcaagaacaatgacgtacgacgcgcccgccgcgagaagaagaaaaccagacaatagacaaattaaatatagttggtcgcgggtcatcgctgcgcctcgtatctcctaaataaggagcgcggacttgactaccttgacctatgtcaagccgagaagggtagcgggccgacgcttatctacaccagcttgaaccgcacgtgcgctatgcggttctgggcaatgcggcagccactatcgccttccgagtaggcaataaggacgcgccataccttgctcgcgaatttcatgggaggttcgacgagattggtcttctgcagctgccgaattaccgcatttatctcaagctaatgatcgatggaacgccgtcaacgccgtcacgcttgatccgcacgcctatcagacgccgcctattttgctgattgcggagatgggtgtggatttggcgttcggttggaagcggtggcttgccaatcgtcgcgcacagctctgagcagaaccaccatcgcttgtttccatctcgcgtccaaacgacgagccgtccgttgacgacaatccattgatcctatggcaacactgacacttgtgagtgagatgcggaggaaggaggtggcgatcgagccacatgacattttccctaggccgttccaggagagggcgccaataggccttgtcaatttgccacaatctcacgcctccttctttcacgaccccaaggcaatattgcggtcgggcctgtaccttctccggattccgggtcggtagcgaggcggagttattctgcagctgcgcgagccatgcgcgcagtagctccgctttgatatctcgggcggtcggcagtgaggagaaacgagacgtccaccattgctcattctacgaggctataaagccggtgaaactttgtgacgttgagggattcgatagcctcgatgatctgctcatcgcagaaatcaccgacgccgtgcgtcctgccatctgcatgacggaaagatgcgaccacacggcaaggatagagcccgaccaggaccagggatactgcgaagcgtgtggcggtaacaccttcgtatcagtgctcgtgctcgccgacctaatctaagaggccggccatgcaaatccgaatgatcttcccccgataaagtggacgg

SEQ ID NO: 111 - DNA, 3614 bp, Bradyrhizobium colbertium
gcgcttcccacccagattgtcgcgctatagtcgccgttcggcgagccccagatgagatagagaacattgtctttgatgctgttcgccaaaaggcccaagtcgaaggtcaaggagcctgcattgccgatgttgatccaattatgcgtcgcgtctgacgtgccaaaaggattccagccgcagttgctcagaccgcaggtaccattgggctggcccacccaatttacagcattgggaccagggacggcgggctgagcaaggtttgccgtgatcccgtcagatgcaccatagtttgtgaacggaataggagccgcgttcgcactgcccgagaacccaagaattgcggcgaaggccgcagcgtataagctgtatttcatgacgacctcatttaaatagatttgaatatctgcggggcgcagcttaaattcagtctttaaagagcgcaataccgaattaggaattctttaagggttcagttcccccaaggcatcacccaagtcgtggcgccgccggcctgatcgagtcaggaggtggaaatgcggcactgcgggatacttaaagaccaagggagcccagtcaccggacaccaatggtcgtttgactggttcagaggttcagaggtcgctcccgggcgttctcttgatctgtcattccagcccgcaggcacgacgcacccgcgactgataacgtcgtctgacgttcgggctcaactgctcgacctcggcgcaatcgctctcatacaccggattgccataaacaaagttgcctttgtcggcggcactcggcggcaaaccctcgcgcttgttcgcgcgcccatcgacacgcaggtcgacaggaccgttgggttgacgcagatcgacttgagctggcgcaggagccgtcgcgaacattatacagatcaagcaggcgatgaaccgatacattcttgtctccgcaaactactcgcagggacaggccgctaccgcaggtgttgttcccagtgcttttggcgtaatgcagcgaaaccagtccgacgtgcgatcggcaaacatgctcctttccgtgagttgtgagccccgcctgaagtcgcaacacacaattgattgatgcgcctgcacaacgtcgtcgcccagaaaatactcaccgcgacagagcgcgccccgcatgcgcagatcgctattgatatgtcctgcggcccgcttcccgattgctgctcaatttgatcattacggcaatctcgcgctgaataccgaagcgaaggagcgcaacaatcggagatttgcggccaggctctctaagggcaagcggtgattgctccggctttggatccgtccatgctgctcatcgggtcaggcggattcgccgggccgccccaagacctgcatcttccacttcatcttcggctggctctgccggatgcagaacctgccgtcgatgactggtaacttgagcaccgagttgggcaggttccggcagcaactttgagcgctggccgggaaacccggctggtaaacatatagccgcgcgtagaacggctcgaccgaaaccagtaagtcaatcgtcctgacggtgcggggcagcttgtccctgagatcgatcagccgatcaccgggaatgcaggcgagcaccgtcaacataagggcccagctcatcgtgcctcaccttgccgctacgccacctcgagtttagccgagaagatgctgatgatcacgttcctctgaagcgcaacgagacggtgggatcgttgcaatttcgtgccggacgatcgccggccccgcacaagagaccgtcgcattgaggttgaaaaattcaacttgaaaccgcgctgattgccaaaaactcccgctgcataacgcgccgccttatatacataacactttgatattaataatattattctcacggaactagtcaatcatactattttttcccgacaaggcctcgactaataaagttcccgaaattagtatgcgctcgatttcttcaaggaggcatcggtgttttgttctgttagagtttttctgggcgcctcattggccattgctgccgcttcgtccgcccacgccgccatagtcatccaggccgtaaatggccttggtgatttcgatcagaacgctctgtttcaggtcgcgcaaaccaatcagcattccgtcactgcaatcggaaaccagtcccacgcggatttgataacgatcaccagcaatgatgcgctgagtacgaacgccaacggccaagccaagatcacagcgttcaatgtcgcattcgatgacctctccttcgtccctgcgggaacggttacaggctatagcgcggtgctgttcaacatccaggccccaaagctggacaagaacgaggctccgaccacagtgagcttcagcttcaacaacggagcctatggagatctgacgcttggcaacaacgtctatgatttcgtcctgaaggacggcggcagcaacttctttctggcgaccgtggccgatggcagcgtgattacgcaaggctccctaatcaccagccgcaacatcgatgcgttcgaacaggttagggtcgacatcgcggcacccgtgaccgctgttcccgaaccctcgacctgggccatgatgatcctcggctttgccggcgtcggcttcctggcatatcggcgtcgcagccaggctgctgccaacccagcgtagcctcccagcatgaagatcgcgatctaaattgaagagaccgccgtagcaggcggtctctgttgctgttgcagctgctccaagaagccttctcgtaccggtccacggaatgcccaaagaccagggcctcagccgagactatcgagcaccttaggctggcgagtgagcgacgcttcgccgtccgaaggccggaaacgaacgcagcaaacgatccgagttgtcgttggtggcttcgttctgctcgcaatccaagtcggcgataacatcctcgaacgcagagatcgtctgctggaggacagcaatttgcgttagctcgtcgtctccaatcgggcccttatgatttctgagcgcaacgaccagctcgcggcggcgctctttcaattgaaccagcggcaatccgtgatctggtggatgatacatctggaaccctcccctgccaacttgctcaactttaagccagatcagctgaaaacgaattgaaacgactggtcaaattttagattttcgccgttctgagccagacgagatcagaacaccgggtgctgagctccttctcgtgtaagcgcctggatcgtttagcccccgccctgacctcccgcagagccaatccaacccgctggagcatctcacgcgatgagcaacgatggatgcatagggcccctgggctgctccaagctacgatgacaccagctcactgctgaaagaagcaccgccatgtgcgagacggagcagacgcatgaccctgccccgcagatgccgccagccaaagaggctcgagcaggcttgctcttgttgaggcccttcttccgtcatgcggatgagccactgccttccgtgctgaatgcctgagaactacctcagtaaggttgactggttaggttaagggctaaatcgagttgctcgatcgcacgcccccgctatgtctcttcctatgaatgcggattccgacgaagtcgcccgggtgta

SEQ ID NO: 112 - DNA, 2574 bp, Bradyrhizobium colbertium
atacgcgggccgatctgcgtcgtcaccaatttcgcgtcgattgggcattcgagctgccggacggcagtcgcttcaccgatccgcgatggcatcggtggctggaggatgcccgcaccttcctatggtcgcttcgcgtcgatcctcctgtcggtcgccggcaagctcaggccagatcgcttgtgacagtggccgtccagctgcgcttcctgatccgatggatggcgggccggggcatgcacgggttcgacgagttggacaccgatacggcaaaagagttcatgcgatccgtcacggagcgacgcggccatgcaggcatgccgctccgaccgggcacccgtcaggcatacgccaatctattgatcggcctcttccagcaaagagccagactggcctgcccaccgagcgagcatcccttcgccgatgagcgcgctagccggttctccggcttcggccgccagaccatccagcgcttgccccacacgccggacgacatcgccgttgcgctcatctcggcagcgatccggctgatcgggcaaccagccgccgacgtcatcgcgctgcgcgaccgcgtcgtgccgtttcgcaaggacgatcctggcccaacgcctttcgcccaccgccaggccgtccgtgcgctcgtctcctcgttccgcttttccacgatcgagggcgaggaggtcgcctggcaccctccgttgacccgcacaagggagttgcgcctgctgatcaaccggattcaggaggcgtgtttcgtcaccatctcctatctggtcggcgcgcgcgtgtcagagattctctcgcttcaagcgaactgcgtcgaagagcgcccatccgccgatggcgccgaatcctttagctatctccgcgggcggatcttcaagaccgccggcactgacgccggaacgccgcatctctggccggcgccggcacccgtcctgcgcgccgtcgaggtcctgcatcatctgtcggagccatttcgcgctgagacaggccgatcggagctctggctctccctcgctggcaggggcgtcgtcgaccgccgcccgccggaggtcccgaccggctggtctctcatcatccggctgaaccggaggttcgctcccttcatcgatctgccttgtcagggtgacggcacgccctggcacctgaccacgcatcaggggcgcaagactttcgcccgcttcgtcggcaagcgcgatcgcaccggcctgcacgctctccagcatcacttcgggcatgtgacccgcatcatgaccgacagcgcctatgtcggtaccgattttgatctgagcgagctcgtggacgcacagaccctcgaagagacgcgcttcgctctcgaggagctgctcaccgcctcgcgcctcgccggcaatggcgggcgccgtttgtcctcccgatcgcgtttccgcggccgcacgcgcgacggcgagctcgccgcctacatcaatttcctgatcgaagacagcggcatgcggctcggcgtctgcgattgggggtattgcgtctaccgtgtggagaccgccgcctgcatgggcgacaatcgtggtccgaacgcgctctggcgcacccagagcacctgcgcaagctgcgccaacttcgccgtcaccgagcgtcatcgcccggtctggcaggcacgcctcgaccgcaatctggcgttgatcgccgatcgacgcctcgacgatccaagcctcgcgctcgccaacacgcgcatcgccgagtgccaacgcattctgtccgatctttccgccgcaggagaaggccatgcccaagagatccaccgcaaatccggatgatcggcgcataaaggccacggcggagaagctgcgcgcggcgctcgatcgattgacgaatggatcctcagaacaacccgccgcttcgatccgacgtttgaccgtcgctgcgctcgcgcgcgaggcgggcgtcggccgcaacgccatctacgccaatcaccgtgacatcctcgacgccctcatccgagcccgccgacggcaaagcgtacctgatcggatcaccaccatgggcgacacactcgtcgaacagcgtggtgtaatcgacaacatgcagcagcagatccggcagatcgtcactgagaatgccggcctcctccaacgcgccatcgaggcggaacgccgtgccgagagggccgagcgccgcagcgcccacttgaccaaggagatcgttgtcctgcgcggtcccgcagtgctgcgaacgtcgagcgaatgacctcgtgcgtcgcgggtgccgttctcgtcgcggcggattcacgagcattaccttggatccgctccgaagcggcggtatcacggcgccatctgcacgaacaatcgagccttctccgttggatcggggtcgcgggatcaacccgccgtaccttcgatcgcgctactgttgccgcggtgatgtcgccgtcgcggcggtagtgagggcctttgagcaatgctctcctgttgggttgcttagcccacgtccataccggcctttttctgggggatcacgcgccacaatacgctcgctgcgctcgccgacctttacccgcaatggctcgttcgcgatcttcttcccctgccgccaagc

SEQ ID NO: 113 - DNA, 4103 bp, Bradyrhizobium colbertium
agatttttcattgtgagcattttcatcccgaagttgcggctcattctgattctgaacagcttcttgggaagtagcgacagcttggtttttagtgagttgttccattctttagctcctagacctttagcagcaaggtccatatctgactttttgttaacgtatttagccacatagaaaccaacagccatataactggtagctttaagcggctcacctttagcatcaacaggccacaaccaaccagaacgtgaaaaagcgtcctgcgtgtagcgaactgcgatgggcatactgtaaccataaggccacgtattttgcaagctatttaactggcggcgattgcgtacccgacgaccaaaattagggtcaacgctacctgtaggaagtgtccgcataaagtgcaccgcatggaaatgaagacggccattagctgtaccatactcaggcacacaaaaatactgatagcagtcggcgtgtgaatcattagccttgcgaccctcggcagcaagaaccatacgaccaatatcacgaaaatagtcacgcaaagcattgggattatcataaaacgcctctaatcggtcgtcagccaacgtgagagtgtcaaaaacgataaaccaaccatcagcatgagcctgtcgcattgcattcatcaaacgctgaatagcaaagcctctacgcgatttcatagtggaggcctccagcaatcttgaacactcatccttaatacctttctttttggggtaattatactcatcgcgaatatccttaagagggcgttcagcagccagcttgcggcaaaactgcgtaaccgtcttctcgttctctaaaaaccatttttcgtccccttcggggcggtggtctatagtgttattaatatcaagttgggggagcacattgtagcattgtgccaattcatccattaacttctcagtaacagatccaaactcatcacgaacgtcagaagcagccttatggccgtcaacatacatatcaccattatcgaactcaacgccctgcatacgaaaagacagaatctcttccaagagcttgatgcggttatccatctgcttatggaagccaagcattggggattgagaaagagtagaaatgccacaagcctcaatagcaggtttaagagcctcgatacgctcaaagtcaaaataatcagcgtgacattcagaagggtaataagaacgaaccataaaaaagcctccaagatttggaggcatgaaaacatacaattgggagggtgtcaatcctgacggttatttcctagacaaattagagccaataccatcagctttaccgtctttccagaaattgttccaagtatcggcaacagctttatcaataccatgaaaaatatcaaccacaccagaagcagcatcagtgacgacattagaaatatcctttgcagtagcgccaatatgagaagagccataccgctgattctgcgtttgctgatgaactaagtcaacctcagcactaaccttgcgagtcatttctttgatttggtcattggtaaaatactgaccagccgtttgagcttgagtaagcatttggcgcataatctcggaaacctgctgttgcttggaaagattggtgttttccataatagacgcaacgcgagcagtagactccttctgttgataagcaagcatctcattttgtgcatatacctggtctttcgtattctggcgtgaagtcgccgactgaatgccagcaatctctttttgagtctcattttgcatctcggcaatctctttctgattgtccagttgcattttagtaagctctttttgattctcaaatccggcgtcaaccataccagcagaggaagcatcagcaccagcacgctcccaagcattaagctcaggaaatgcagcagcaagataatcacgagtatcctttcctttatcagcggcagacttgccaccaagtccaaccaaatcaagcaacttatcagaaacggcagaagtgccagcctgcaacgtaccttcaagaagtcctttaccagctttagccatagcaccagaaacaaaactagggacggcctcatcagggttaggaacattagagccttgaatggcagatttaataccagcatcacccatgcctacagtattgttatcggtagcaagcacatcaccttgaatgccaccggaggcggctttttgaccgcctccaaacaatttagacatggcgccaccagcaagagcagaagcaataccgccagcaatagcaccaaacataaatcacctcacttaagtggctggagacaaataatctctttaataacctgattcagcgaaaccaatccgcggcatttagtagcggtaaagttagaccaaaccatgaaaccaacataaacattattgcccggcgtacggggaaggacgtcaatagtcacacagtccttgacggtataataaccaccatcatggcgaccatccaaaggataaacatcataggcagtcgggagggtagtcggaaccgaagaagactcaaagcgaaccaaacaggcaaaaaatttagggtcggcatcaaaagcaatatcagcaccaacagaaacaacctgattagcggcgttgacagatgtatccatctgaatgcaatgaagaaaaccaccattaccagcattaaccgtcaaactatcaaaatataacgttgacgatgtagctttaggtgtctgtaaaacaggtgccgaagaagctggagtaacagaagtgagaaccagcttatcagaaaaaaagtttgaattatggcgagaaataaaagtctgaaacatgattaaactcctaagcagaaaacctaccgcgcttcgcttggtcaacccctcagcggcaaaaattaaaatttttaccgcttcggcgttataacctcacactcaatcttttatcacgaagtcatgattgaatcgcgagtggtcggcagattgcgataaacggtcacattaaatttaacctgactattccactgcaacaactgaacggactggaaacactggtcataatcatggtggcgaataagtacgcgttcttgcaaatcaccagaaggcggttcctgaatgaatgggaagccttcaagaaggtgataagcaggagaaacatacgaaggcgcataacgataccactgaccctcagcaatcttaaacttcttagacgaatcaccagaacggaaaacatccttcatagaaatttcacgcggcggcaagttgccatacaaaacagggtcgccagcaatatcggtataagtcaaagcacctttagcgttaaggtactgaatctctttagtcgcagtaggcggaaaacgaacaagcgcaagagtaaacatagtgccatgctcaggaacaaagaaacgcggcacagaatgtttataggtctgttgaacacgaccagaaaactggcctaacgacgtttggtcagttccatcaacatcatagccagatgcccagagattagagcgcatgacaagtaaaggacggttgtcagcgtcataagaggttttacctccaaatgaagaaataacatcatggtaacgctgcatgaagtaatcacgttcttggtcagtatgcaaattagcataagcagcttgcagacccataatgtcaatagatgtggtagaagtcgtcatttggcgagaaagctcagtctcaggaggaagcggagcagtccaaatgtttttgagatggcagcaacggaaaccataacgagcatcatcttgattaagctcattagggttagcctcggtacggtcaggcatccacggcgctttaaaatagttgttatagatattcaaataaccctgaaacaaatgcttagggattttattggtatcagggttaatcgtgccaagaaaagcggcatggtcaatataaccagtagtgttaacagtcgggagaggagtggcattaacaccatccttcatgaacttaatccactgttcaccataaacgtgacgatgagggacataaaaagtaaaaatgtctacagtagagtcaatagcaaggccacgacgcaatggagaaagacggagagcgccaacggcgtccatctcgaaggagtcgccagcgataaccggagtagttgaaatggtaataagacgac

SEQ ID NO: 114 - DNA, 1291 bp, Bradyrhizobium colbertium
gaaaaatctgtccacggagtgcttaatccaacttaccaagctgggttacgacgcgacgccgttcaaccagatattgaagcagaacgcaaaaagagagatgagattgaggctgggaaaagttactgtagccgacgttttggcggcgcaacctgtgacgacaaatctgctcaaatttatgcgcgcttcgataaaaatgattggcgtatccaacctgcagagttttatcgcttccatgacgcagaagttaacactttcggatatttctgatgagtcgaaaaattatcttgataaagcaggaattactactgcttgtttacgaattaaatcgaagtggactgctggcggaaaatgagaaaattcgacctatccttgcgcagctcgagaagctcttactttgcgacctttcgccatcaactaacgattctgtcaaaaactgacgcgttggatgaggagaagtggcttaatatgcttggcacgttcgtcaaggactggtttagatatgagtcacattttgttcatggtagagattctcttgttgacattttaaaagagcgtggattactatctgagtccgatgctgttcaaccactaataggtaagaaatcatgagtcaagttactgaacaatccgtacgtttccagaccgctttggcctctattaagctcattcaggcttctgccgttttggatttaaccgaagatgatttcgattttctgacgagtaacaaagtttggattgctactgaccgctctcgtgctcgtcgctgcgttgaggcttgcgtttatggtacgctggactttgtaggataccctcgctttcctgctcctgttgagtttattgctgccgtcattgcttattatgttcatcccgtcaacattcaaacggcctgtctcatcatggaaggcgctgaatttacggaaaacattattaatggcgtcgagcgtccggttaaagccgctgaattgttcgcgtttaccttgcgtgtacgcgcaggaaacactgacgttcttactgacgcagaagaaaacgtgcgtcaaaaattacgtgcagaaggagtgatgtaatgtctaaaggtaaaaaacgttctggcgctcgccctggtcgtccgcagccgttgcgaggtactaaaggcaagcgtaaaggcgctcgtctttggtatgtaggtggtcaacaattttaattgcaggggcttcggccccttacttgaggataaattatgtctaatattcaaactggcgccgagcgtatgccgcatgacctttcccatcttggcttccttgctggtcagatt

SEQ ID NO: 115 - DNA, 30386 bp, Bradyrhizobium colbertium
cccggacgtgggagctcataccggttaccataattcgagcgatggcggcgttactacgacaacgttacgccgcgctcctcgctcggctatcggccgccggcaccagaaacgatcttcccgccagcatctggcctggcctgtgcttcgctccggccaggccaaatgctggccgatcacggccggactctaacatgagccgtggtaccgctccgtggggcaggccaatctaacgcccgtgcgcgccgtggtatccgagcgaggccgatagttcggctgcggtatcggcgacgagttttccaagtgctccatttggtttcgcgtcgacgcgtgttgagcgaccaaacactgtcagggccatgatcaacttgccggtgatatcgaacaccggtgcacttacggcgccgaagccgtcaccaccgccgtctgacaggcaagaataaccgcgctccttgatttcacgcatcattccagccagagacgcccgttctttcggtacgttgagacggcccgaccgtcggttctggtccaactcgcgctcgattgcggtggccgtacgaaccgggtcttcgtaggcacaaaacaagagccccgtcgcggaataggtcagcgggcagtggtgcgacggcgccatggtactcgccaggtcatgccgggcctcgacgaccttgatcatcgtagggcccttttcgccccagacggctagcgccgctgtctcgccgacctgatcgacaagtgtgtgcagcgtcgcttcagccacttgcaacggctcgaagcgactgaaccccttgagcccaagctggaaagctacaggtccgaggtcgtatcgagacgtcgccgcatcctgccgcgccaatccgacgcgcatcaaactgacgagatatcggtgcgctttggcagagggcatgcctgccctctgcgccagatcggccaatttgagcggcccatcggcctggatcagtgcgtgaattagatcgccagcaacctctaccgattggatgccgagttgtgtcggcttgtctgcgccaggcgcgttttccggcagaggttcggttgagcggtctaccatgagtgtccttcacagcggcaaagttgcctaatccgacaggcttgacagcctggctcgcaggaagcatcattacagaataggaagtttattacgaattgtataactatcgaagatagtacgaacaatacgagacgtaactgtgcgcagcaacagttgatgctaggggagagaggcagatgcacgacggatccatttctggcctgctggccggcgatgtcgctgtcgtcacgggggcggcgcagggcattggagccgctatcgcccgcggacttgccacatccggagcctcagtaatcgtcgtcgatcgatacgccgagggtgcctgcgcaacggccaacgcgatcaaggctgtgggcggacacgccgaagggtatgggctcgatgttgcggaccgtgctgcgtgctttgcttttgcaaccactgcaagggaggtgttcggtgatgtggctgtgctgatcaataatgcagggatcacgcgccgcaccgcacccgacgaccctgaatttctcaaccacctcgacgcgcagattgccgtcaatctgaacggcactgccaacatgacgatagctctgctgccgcagctgcggcgcaccaagggacgcgtcgtcaatgtcggctcgattgcttccttcgtcgcctatcggaattcggccagctacgccgccaccaagggcgctgtcattcagctgaccaaggcgctggcggccgatctggcagcggacggggtacgcgtcaacgggattgcaccaggtgtcattgccacgcctatgaccgaagggacgcgcgctaatcccgaggtgatggcccggtttctgaatcatacgccgatggggcgcgtaggcgagcccgaagagctcgtggggccgacgctatttcttgcctcacgcatgtcctcctacgtgaccggtgtcatgctacctgtcgagggtgggtatcttacttcatgaacgccaccaccataaccgcttgtatcttgtattatggatgatctgccatggttgcctcttccaagcacgcgattccaaatgaaacccagcattgcgatgtgttggtcgccggctccggcgcaagcggcatggttgccgccatcgttgccgcgaagaaggggctgaaggttatcgttgccgaaaaggaagcggtgttcggtggcacaacagcgttatcgggcggctatctctgggtgccgaacaatccggtgagcatcgaagctggggtcaaggacagcaaggacgcggcgctcgcgtatatgaagcacgaatcgggcaaccactacgacgctgcgagggtcgatgcatttctcgacgcaggtcccgagatggttgccttcatgcatgcgtatacgcaggtgcggttcgaagcggctcccgcattctcggattaccatccggatgcgccgggtggcacgccgggcggtcgctcgatactgacgcaacctgtcagtgcgacaattctcggatcggatattgacaagctgcgaccgccgcggcctgagctaacgctctatggcctcgcaatcggctctggtaaagagctttggcacttctatcgcgccacgcagcggctggaatccttcctctacgtcgccaaacgtttggtcaaattcgggttcgaccgctccgtgcggggccggtcgatgctgttgaccaacggcaatgcgctggccgcgcgactgtttcggtcggcgtgcgaactcggcgtgccgatctggctcgacagcccggtgagaacgctcatccgaaacgacagaggccatgtcgtcggtgcggaagtgctgacaccaaaaggcaggcgccgtgtgctggcgaacaagggcgtcgtactggcctgtggcggctttccgtttgattttgccaggcggcagaccctctacaatcactgcgccggtgagagcgagcattggtcggcggcgagtcctggaaacactggagacggcgtacgtctgggcgagtcggttggcggcgaggtcgtcaaggattatcccaacgcgggtgcctgggctccgaccagccttgtgccgcgcaaggatggtaccaagggcccgttcccccacttcatcgaccgcggcaagccgggcgtcatcgctgtctcgcgagccggacgccgcttcgtcaacgaagccaacagctatcatgatttcgtgcagggcatggaatgtgcgtgcccttcggaccaaccggcggaggcattcctgatcgccgatcaccgcaccatccgcaaatacggtcttggccatgtgaaaccggcgccgctacctcttcaaccttcgatccgctccggctacctgatgcgcggcaacactcttgccgagcttgcatcagtggcgggcattgaacgaaacgctttcgaggaaacggtcgcccgctggaacgcggacgttccgactggcacggatactgccttcggcaaaggctcgaccgcctacaaccgttttcacggcgatccagaggtcaagccgaacccgtgcctcgcgccgatcgcgaccggtccattctacgctgtgcgggtcgtccccggcgatatcggcactttcgcaggcctcaaaaccgacgaacacgcgcgtgtgatcggccctgacaatacgccgctcaaggggctttatgccgtcggcaatgacatggcgagcgtgcttggcgggaattattccggcggcggcatcacgctcggaccgggcatgacctttggttacatcgcgggcctccatgcggccagcgaacgcaactgaagaccagtatcgagaaactctaagggaggaaacccatcatgacaacatgcagaaacctgctttccgccggtctgggcctgactatggccgtcgctttattgggagcagcgcaggcccaggataaggaaatccgcattggtgcgttgatcgcagcctcggggccaacggccttcatcggcgcatcacagaagaacgccttcgagatgctcgtcgaacagatcaatgcgcgcggcggcatggccggtaacaagatcaggccgttcctctacgacaccgaaggcaacggcacaatcgcggcccagcagttccgccgcctaatagattcagacaaggtgcatgttgtggtcggcccctcgacgaccggcgaaagcctggcgatccgcgcggtcgcaaacgaaaacaaggtgccgctcgtcagcttcgcaggcgcggaagcggttgttgtgcccccaaccccttacgtcttcaagactccaccgaccgaccgcatcgttgccgagcacctgatttctttcatgaaggtcaagggcgccacctccgtcggcatcctgtcctccgccgatggttttgggcaggccggtgccgcagtcgtcaaagaggtagccagccaactcggactgaaggtcaacgcagcggaagagttcggcccacgcgataccgacatgacgccgcagatcctcaagattcggtcgagtggcgccgatgcgatgctgatctggagcgtcaaccccggtccgaccatcatactcaagaacgcggcggccattggctacaacaagccgatctacaacagctatggtgctgcctcgccgcagctgatcgagcaggccggcgcggcagcggagaagtcttacgtatcgtccatgcgtctgctcgcgcccgagagccttgccgcaaacgatccgatgcgcccagtggtgaccaaactcgcggccgattacaaggagaagttcaaagccgacgccacgaccttcatcgggcatccctcggacgcgatgctgctcatcgaggaagcgctgaaaaaggctggcgggtccccggatcgcgagaagctggcggaagccatgcgcagtggcatttccttccccggcgccaacgggatgtttcgcttcactgacgccaaccacaacggcctcgaccgggagtcgcagtcgatggtgatgctgcaggttcaaggcggcaagttcgtcaccgtgaagtgacctgcagggcgggcggtcttgcaatccgtccgtcagcgaccgaagcaaagcctggaggtaaaatggataccctgctgcaaatcctgatcacgggcctcgtcgtcggctgcatttacggcatggcggcacttggtttcaccattgtgtacaatgctaccaaactgatcaatttcgccaacggcgaattcctgatgctcggcggcgttcttcttgcctgcgcggcgcaggccgccaaactgccgatgtcgctggcgctcctgctcgctgtagcgggtgcggcgcttaccggctggctgatgcagcgctgcattctcgatatggcgatggcgcgcagttccgatccgttgacgctggtgatgctgaccatcggcgtggcgctcgccttgcgcggggcagccgcgctcgccttcgggcgtgaaatcacgttcgtgccggaattcgggcttttgccgctggtgttgataggcaacgtctacattccgagccaaggcctctggatcatcttcgtcctggcgctgaccagcaccgttttgtggtacatgttctcgaaaaccatgttcggcaaggcaatgcgcgccgcgagtcaagaaccgagggccgccgccctttgcggcatcgagccgaagcgcgccgccgccatcgccatgaccttggcgggtgcgctcggtggtttggccggcgcgatgctcgccccgatatccgcagcgttctacgaaaacggcatcttccttggtctcaagggcttcgcggcggctgtcgccggcgggctgggcaaccccatcggagctattgtcggtggactgttgatcggcgttgttgagagcctgtccgccggatacgtcgcctccggcttcaaggatgccgtcggttttatccttctcattctcgttctaatccttaggccgcagggcctcgtcggtcgcgccatcgttacacgggtctgagccatgaccacttcgacatcgaattccaacctccggcatgacgcggttatcctcgcaggccttgctgtggttcttacgctcgcagaactagcgctgaccagccagttccatcgctcgattctgatcctgtcgatgatccacgctatcgcggccattggccttacgttgctgctgggctacgcagggcaggtctcgctcggccaaggcgccttcatgggcattggcgcttatgcggcggcctttgccctgcagaagctggcgctgccagcgcccgtggcgctggtggctgcggtgctattgccggggctgctcggcttcttgatcgcccgaccgatcctgcgcctgtcgggccacaatctcgcgctgggcacattggcgctcggcgccgtgtttttcgtcgtggcggcgcaatggcgcagcgttaccggtggcctcgaccccggtatcgtcgatctgccgagtctggcgatcgcgggtttcagccacgagcgtatactctacattctggcgggcatctcgttgctgtcggcgatcgccgtcgccgtatcactcgtagacgggcggttcgggcgcggcctgatggtgctaagaacatccgaactcgttgccgcttgcatgggcgtcgatacggttcgggccaagtctatggtcttcgccatcgccgccgctttgtccggcctgtctggcgctcttctggcgctttatctacgctcattcaacgccagcgccttcggtgtcgggctctccatcgagcttttgatgatggtcatcctcgggtcgctttcgaccgtctggggcgcgatcttcggcgccttcgccatcatagtcctgcccaacctactcgaaggcttcgatcacgccaaacacctaatctatggtcttgtcatggtaggcatcatgatgttcgctccccggggtcttggagaaacgttgttccgccttgtcacccgcaagagaagcgtcgcatgagcagcacgcctctggcttcgatcaagggcctgtcgaagcgattcggcggcattgcggccgtgtctgacgtgtcgttcgacctggtcgccggggaagtcacggcgctgataggtccgaatggcgcaggcaagaccacgctgatcaatctcgttacgggtgttctcgcctgcgacggtggcacaatcagcctcgaaggagaggacatcaccgctcggccgacgcatcagcgcggcacggccggcatcgcgcgaacgtatcagaccccgcagatagcgcatggcatgagtgttctgaccaacgtaatggcgggcgcttaccggttcggccagcatggcctgttgagttccgtgttccgaccctgggtggtcatgaaagaaaatgacgaaatggctgctcgcgccgcgcagtgtcttacgcgtgcgggcgtcgccgagcagtggtggcagcgtctggcgacggatctgccctatgggcttcagcgccgcgtcgaaatcgcccgctcattggcgcaagatcccaagctgctgttgctggacgagcccgccgcgggcctcaatccaagcgaaacggcggacctgtcgcgtctgctttctgagatcgccgcagatggccgcgccgtcctgcttgtcgaacacgacatgggcatggtgatgtcgatttcctcgcatatcgttgtggtgaatttcggtcgcaagcttgcagagggtacgccgaaagacatcgcatcgaacaaggacgtgattgctgcctacctcggcgcggatgaggcggtggcctgaaatgaccgagcttctctctattgccgatttgaaggctggctacggcccggtcgaagtgcttcacggcatttccatcgccattcgaaaaggtgaaatcttctccatcgtcggcgccaacggcgccgggaaatcgacgcttctcaatacgatttcaggcttcaacccgatccgctccggcgccatcgtgtttgacggacgaccgattgctggaaccgctccagcaatgatcgcgcgcgctggcctacgtcatgtgccggaaggacgacgcgtttttgccgagatgacggtggaagaaaacctgtctctcggcggctatggccagccgcatgctgaagtcgccgatcggatcgaccggatttacgagctgtttccgcgcctcgtagagcggcggacgcaggcggcgggcactatgtccggcggcgagcagcagatgttggccattggcagggccctggcggctaaaccaagggtgctgatgcttgatgagccatcgatggggctcgcacctcaggtcgttgctgaaatattccgcctgatcttgcgcatgcgacacgaattgggacttgggatacttctggttgagcaaaatgccaaagcagcgctgcgtatcgcagaccgcgcctgcgtgctgtctctggggcagatcactctgcgcggcgcaggcgcagatctcttgaatgatccgagtgtcgtcgaggcgtttcttggggggaacgcggctacttgatggaaacccaccgcatctccgagtcaggaccggatcgcgaactgcttggatcgctgcgtgctcttacaggactggatacccccgcaaccatagagcgtttcgagaccgagtatccgaatgcaactttctgggcgacgttcggtcaatccgaagcctcgggcttggcgatgctttcgccgtaccgcgaccgtccgaaatccgcgggccggccgctgttttggcgcagcatcgcggtcgtcgatggcgatgaccgcgcgaatccggccggcgaaatcatcgacttcgtgaacggacaaatcgctcgctacaaacggccgaagcacgttgtgttggtcgataaacttccgaggactgcgggggcgacctcgatcgggctgctgttaaatcagcgcacggcagacgtagcggtaaaggtaacccgccacgacgggctgcctcatccgaccgcggcagagaggcgccgaataccatcgcgccattcccgctgtagccgcgcgcagagttctgcgaccggaatgatgtcgttgacgccgccgactccctgtcccgcggtccagatatccttccacagtttcgggctgatctcgcgcgcgacgttgaagctgctgtggtccttcgggttgtcgtacgggcggttcagcgtctgggcgagaaagctggcgccggccacccgcaccggcacagacggcaatgatcccgtcggcgttggcgtcgagcgccttcttggcatgcttcatcgtggtcgcgtcgtggaacaccagcccgccataggtatgtatggcgtcggtcagttctcgcgtaattccgagggtcgtgatgacgatgggaatttcatgacggatggccgcggcgaagtctgccgcgtgccgaggattggtggagtgaacgacgaattgcgcaccaaagggcgcgcaatgttgcccggcgagccggccgcgtatgtcggccagccacgcttcgaaaccgtccgtcgtgcgctggttgagcaccggaaaggtgccgatcacgccagcttgacaggtctcaacgaccagatccggtcccgagaaacatcggcgctgccatcaccggaattttgagatgccatcgcagtcgatcaggtagcatatcggatgccgattgccagaggaaacgtggtcaacgcgactgcatgcgggcgcctgcatccagatcgagcgtggtcgcgttcaggtacgagttctcgacgatatgttgcaccagccgggcaaattcccgcggttgtcccatccggttcggatacaggatcatgcgatcgacgatcgactgagagacattgtccggaatgcctgcgaccattgcggtatcgaacagccccggcgcgatcgagactatgcggataccgtgtggcgccaagtcgcgggcaactggaagcgtcaggccgattacgcccgccttgctggcgctgtaggccgcttgaccgacctgcccttgggatgcagcgcccgatgccgtgttgacgatgacgccgcgctcgccaccctcggcgtcaggggtgttcctggtcatcgcgagcgcagcgaatctgatgacattgaaggtaccggtcaggttgatcgcgatcaccttgttccacgtcgcgatcgggaacggctcgccttttgatacggtcttggcggcatcggcgacccccgcgcaattcactgcgacatgaacgccgccgaacgcggcgacgaccgccgcgatcccgtctttcacgctgctctcttcggcgacatcgacgacgcgcgccaggcacgcatcgccgaggttcgactttagtgcctgcaattttttctcgtcgcgatcgaaaccggcgatacgcacgccggccgcggcgagcaccttgcaggtcgcaagccccagtccagaagcggcacccgtcactacggcaatcttgccatgaagctccatgaaatatcctcgttgtcttctatttgctcaggatggtcacgcacgccaccgcttcttcgataccgtgcagtccgccgccattttcggcgatcgcgatccgcgcgccgtcgacctggcgggccccggcctcatgacgcagttgcgcgacaagttcgtggacctgcgcgaggccggtggcgccgaccggatgccccttcgactccagccctcccgacggattgaccgggacgcgcccgccgatggcggtttcgccgcgttcgctgatggcgccgccgtcgccaaaggcgcacaggccgagattttcgatctggatgatctcgcccatggcggtggcatcatgcacttcggcaactgagatatcgcccggaccgacgcccgccttttcgtaagcgcgcctggcggcgcgtgcggtgcaatggttttcgacgtccgaagggtcacggtcgctgccggtctggaccacggatgccagcacccggatcgcgcgcgaccgatcgatgccatagcgcttcagtcccgctgcagttgtcaccacaaccgccgcggcgccgtccgataccggcgaacacatcggcagcgtcaacggataagtgatcggcggcgcgctcagcacctcgtcaatggaatagggcgtacgaaactgtgacagcggattttcaacggagtgtcggtgattcttcgccgcgactgcggcgatctggcgctgcgtcgttccgaaacgcgccatgtgaaagcgggagaacgccgcataaacatccatgaatacgctgtagggcttgtcggacgttgtgccgggcggcggatcgatgccttcgccaagcttcatgagccgctcgccgatttcgtccttgcggctgatgtcccaggcgctgtcgaatgacccgaacataagctcgcgatccctcgagaacatcttctcggcaccaaccgcaagcgcgacgtctccgtcgcctgctttcaggaaggtgacggccaggttcagcgccgagctgccgctcgcgcacgcgttctcgatgttgacgaccgggatctgcccgatccccatcgaccgcaacgcgatctgaccgcgcaccatgtgctgcttttccatgtgtccttgcgacgcgttggcgaagtaggcggcttccaatgccgtggtcgcgaggccggcatccgcgagcgctgcgttgaccgcctccttcgtcatcgtcttgatgtccttgtcgagcatgcggccaaacggcgtcatgcccacgcccacgacgtatacgtcttccatggcggcggctcccattctcaggttatattctgtgcccttagcgacagttcggacagcacttcctccgtgtgttcgccgaggccaggcacgccccgcgtcggtcccggatggtggccgtcaataatcaagggttgcgcgacatagcggcgacgcctgccatcgctgtcggccacctcgccgaacagcccccgttcgatgaagtgcgggtcggccgcgacttcgtcaattgcgctgacgggaccccaggggattcccgcggcgtcaagcttgtcggcccattggccgcgtggcgcggcggcgatggccttgccgatgcgcgcaaccagttcgacttcccgtcgggttcgttgcgcgcgtttcagatcagctacgtcctccatgccgatcagcgtgcaaagcggccgccagaaccagtcctcatgcgcgatcgacagcgacagcagcttgccgtcctggcattcgaacagaccataagcgggctctgccgcgatgtcggcgagcggctcgccgttcatcgccgggccaaccatgaccgacatccacgataccagcccgtcggtcatcgacacgtcgatatacgccccctttcccatgcgcgcgcgcgccagcagcgccgcaagcacgccgagcgccgcaaacatccccgatgaaaggtcgccaaccgcgatatcgctcggaagctgcgtcgaacgcgttgcggcctgggcgtgcaggaatccggcgagagcctggtaggagagatcatgggcgggtcggtcgcggtaggggccggtctgtccgaagccggagatcgacgcatagaccaaacggggattgatcgaggccatcgcctcataacccagccccagccgctgcatggtgccgggccgaaacccttccagcaggacgtcggcagaagcgacgagatcccggaaccgctgcttgtcgccgtccgccttgagatcgagcgccaccgagcgcttgttgcgattgagcgcggcgtggaacgccggaaactgccgcgcgggatctccgatgcccggacgctcgacgaggatgacgtcggccccaagatcggccatcagaagcgtcgcgtagggcccgggatattgctcagccaggctgacaatacgaataccctcgagctgcaacatgacgatgtctcttccccggatatgcagagcctaagcttgcagattttattcgttggtctataattttactgactaaattattaattgacccaaaagtcaaatacttgttgtcgaggtgagaacagtgacgacgtctgaaaagatcaagccggagcaaagcgttctggtcgaagttcgtgccgatgcggtatggatcacgctcaatcggccgacggcgctcaacgcgattacgcccgacatggtggcgggaattaccgccgctctaacgcatgccgatgatccggcgatcaaggccgtggtgctgatgggcaccgggcgtgccttttgcgccggagccgatttgaaatacgtcaatagcgcgacgcagggcgatgcacccgccgcgacgcggttcctcgacgccgtcctcgacatgatggcacgactggagacctgtccgcggccggtcatcgccgcagtcaatgggttggccctagcgggcggcctggagttggtgctgtgctgcgatctggttatcgcagcgcggtcagcgaagcttggtgacgcgcatgccaatttcggtctgctgccgggcggcggcagttcggtgcggctgcctcgaaaaatcggtccgacccgtgcgaaatatctgctgtttactggcgatttcgtgcccgccgacgatctggttgcctgcggtctcgtcaacgaggtcgtcgatgacgccgaactgacggcggcggtcgagcgcttggccgccaagctcgggtccaagagctcgctggtgctccgccgcatgaaggcgctggtcgccgacggtctcgaacaaccaaaggaggttgctctcaggctcgaattgctcgcaagcgaagtccacgcccatagccacgatatgaaagagggacttgccgcattcgagcaaaagcgcaagccgtcgttcatcggccgctgaaacgctttctgcgcctcaattatccgagccatcgcttgcggcgccgatagtgcttgatgttccgatagctcttgcgcacgccttcgaggttgaggccgagatagaattcgcggatgtcctcgttggcgcgaaggtcggccgcgttaccttccagtacgatgcgtccgtcttccatgacgtatccgaaatcggcgaggtccagcgcgacgcgggtattctgttcgacgatgagcagcgtcaggccatcttccttcaatgagcggagaacgccgaacacctcatcgaccatcatcggcgccagccccaacgacggctcgtcgatcatcatgagcttcggattggccatcagcgcgcggccgatcaccaccatctgctgttcgccgccggacaaatagccggtcgtgcgcgacttcagcaaggcaaggcgcttgatccggtcgtagacgccatcgagccgccgccgcatcgccggcgctgaaggctccatatgaccgccggcaatcaggttctgctccacggtcaggtgactgaggacgcggcggccctccatgacgtggacgatcccgttgcggacgatttttgccggatcaccgccgtcgatccgcgagccctcgaacgaaatcgtccccgacgtcaccttgccgtcctcggtcatgaggaggttcgagatcgatttgagcgtggtcgacttgccagctccgttgccgcccaagagcgtgacgcaagaccccttgggcacgacgagcgtaatacccttcaccgcaaggatgacgtcgctgtagataacctcgacattgctgagctcaagcatcgacaactccgcggccggagcgctgtcgcgctccggctggttcagccgggttaccacttcgcaatcgtggggaccggcacgttttcagcggcgataacatatttaccatccttgatggtcgcgacgttgacggtcaggcccttgaccgggaatggcgcctcattcgtataagtcaggtttggcagaatgctgaaagtctgatcggccgaaatcggtgtcgtcagcagcgcggtgcgaaccgcctcgccagtgactttgtcggcgccgaccttgcgcgcagccgcctcgatcgcccggagtgcgaccagcgtctgattgtagcccatgacgctcgcgacggaccatgtcgcctgcgacttgtattttgcgacgaccatctggtggaagtcgtgggctttggtcttttgctcagtcggcacggccatgccgtagacttcatagtcgccttccaggtccttcatgccgccaacggccttacctgaggcaatcaggccgttatgcgaactcatcatgatcggaatatcggccttgccgagcgcctgcagcgcacgcttggtcgccacaaccgcggccgtgttggtctggatatcgataacttgcacgcccttgcggatcaggcggccaacctgggtggtcagatcggtcggctgaacttcggtaaaaatggtctcgacgatttcagccttgtccgggttgtccttggcgaacttctccgcgcccttggcaatatcgacataagccggcgaggcttccgaggaaatgatgccgactttcagcggccccttgatgccgcgggtgctgcggaaccattcgaagaacccggcagcctcatggccataagttggccgcgggttgaagatccagggatcgcctttccaagcgaacccgtaaccggccgtcgacatcaacatgggcaccttgtccgccggaagccgaccttgcagcgcggcgacgtcaggtccaccgacgccgagtacggccaccggattgagttcggccttgatgccgggccaaaggctcgcagtctgcgccgcgtcgtagcgcccgtcaaagtccttgatcccgatcttgatgcccattcccttgccgacttcttcgttccaccaatcgacagtggcgcgacgggcgccgacaaggtccttcatgatgtcggcgtagggtccggtaaagtcggcgatcgaggcaatattgtaggtcgtctgcgccgaagcgggcagcgcgagtgtgacgaccgccactgccgcggcgcctgcgatccatttaaaacgtctgctcttcatctctacgtcctcccggttctgttatgtttcatggacaccgccctgcggcggcttcgctacgttcagtatggaaacggccatgtccgatacgaccgcttcaggatattccagcgatgcatcaggccgcgcggctcgaagatcagaaatgctgcaatgacgctgccgagaaacacattcatcagggaaaatacgacatcgccgccgatcgaggggaattgcgagacgacggatggcccgagcgacacgaaggcctcctgaatgcatttgatgacgacgacgccgacgagagcgcccgtgatcgaccccattccgccgacgattatcatggcaataaaccatatcgaattgaacagcgtgaactgatcgaccgcgacaaagcgaacgaaataagcccacaatccgccgccgacgccggcatagaatgcgccgaccaagaacgcggtcgccttgatggccacgacatcaatgcccataatgccggctgcgacgtcgtcgtcgcgcacggctacgaaagcgcgtccgtaccggccccgcaccatgccgtaagcgccaaaggtcatgagcgccgcgacggcgagacagagataatagatcgagatatccgtcgcgaacgcgaatccgaacaggctggcagggtcgagcgtcaggccgttcgaaccgccaaaccatggcaggttcagaacgaagaaatgaaacagcgcctgggcggcgatcgtcgtcagcgccaggtagaaccccttgatgcgcaccgccgacaatccgaagatgaagccgaacacagccgcggaacaccccccgagcgggatggtcaaccagaacggaaaccccagtttcgtggccagaaaaccggtcgtgtaggcgccgacgcccataaaggcggcctgtcccagattgatctggccggcataaccggtggtgacctgaaggccgaggacgatcaccgacgagatcaatatcagcgtcgagatggcgagcagccgcggtccgaacaggatcggcagcgccagcaggaaaatcagaaacaaggctagggcaatctgctgcggacgcgtccgcaccaacgccgcatcgcgcgcaaaactggtggcgaaaatgccggccggatccatcgctcaaaccctctcgatcgttctccacccgaacattccggtcgggcggataaacaagatgacaagcatgatcacgaacgggaataccgagccaaccgctccgccgaccaccgggtcgacataggccgtcacaagtccctgcacggcgccgacgatcagaccggccaacaagactccggcgatcgactcgaatccggcgagcagggccaccggcagcgccgaaagcccgatgtccgacgccaggaaattcagcgacttgccgctgaggtagatgatcgcgccgagggtcgacaatacggcgcccagcgcccaggcgaaagcgatggagcgtttcaccgagattcccatcgacaacgcgacctgatgatcctcggcgaccgcggtcattttgagtccggcgcgggtgttgttgaagaaccacgacaggcccagtccgacaatcaccgtgatcacggcgccgatcagcagtgaccgcggaatcaggatgtcgccgatgatcaccggcttcaacgcgaagatgatcggaaacggccggacctgcggtccgaatatcaaaaggatgaggcccctgatgagaatcagcaggccgatcgtcaccatcaccatcgcgaaactggactcgccgacgagacgcgaaaaaaagatgcgctcgatgataagcccgaatatcgccgataccgccatcgccagcggaagcgccacgaacagtggcagtccggtttggatcaccatccaccagacgatgaagccgccgaacacgacgagctcgccttgcgcaaagttgaacaccttcgacgcgcggtagatgacaatgaagcccatcgcgataagggcgtaaaggagccctaccagcgaaccgttgatcaggtaattcagaaagtcgatcatcatgacatcccggccattttgcgccgcgcctgcaccgccgtggcgaccagaggggccgcgtcgacggaatgaatcagcacgttggccgccatcgttccgcggcgtccatcctggtaggtgacggggattgagagcgccacgcgatctttgccggcgtagaggccgtcgatcaattctgcatagcgttgcaccagaaattcacgtcgtagcttgcgcgtgcgggtcaattcgccctcgtccggatcgagttccttgggaaaattcgcaaatcgccggacttgtgcatgatcgggcagaaatttgttgatgcggacgatctcttcgcggatcaaatcggctacggctgtcatttgcgagaggtcggcgaatgtcgaataagccagcctgcgttcctccgcccaccgcgataccacacccatgtcgatattgatcaacgctccgatgtagtcccgcgacgcgtcgccaagcgtcatgatgtccttgatgaacggactgaagcgcagccgcgtttcgatgaattgcggtggatagctttgaccggaactcagcttggcgagatcctcgatccgctcgaggaaaaccaactcgccggaggtagtgacggaaacagcgtcgccggtccggtaccatccgccatctattcgttcggtggtcttgtcgggcttgccgaaatagccctgaaagaaagatccaccgcgtacgagcagttcgccgtccggtgaaaccttccattccagcgccgctgttgcggggtgggcttcaagccagtggccgacggtttcgaggtcgtagcgttcgcccttgtgaatcgtcatgatgccgatctcggtcgaaccgtaaatattgcgcaagggtacgccgatggcgtgaaacagccggaacacatcgggcgccatggttgatccgccgctcagcgcgaccttcacgcgcgtcaggccgagcttgtcgcgcaacggcttcagaaccaaagtctccgcgatcggaaatgccaagtgggctgccaatggtaccggcttgccgtcgagccgagcgacgttgaccttgcgtccgatcttgacgccccattcgtaaatgcggcggcggattggccccgcgtcgagcatctttgcctggatcgtcgaggccaggctctcccattgccggggtgcgaacaccatcgcctcgaccgcgagttcgcggagattggccagaacctgctccggcgactccggaaagttgaccaccagcggcaaggtgacgccgatcgtaacaccgaacaattgttcggtgacccaggcaggcgcaatgtaggtgaggtaatccatgcccggcgtcaggtcggtgccgttcaccaatcgatgcgcgttgtcgatcagataacggtgcgtgataatgacgcctttgggacgccccgtcgtgccggatgtgtaggacaggatggcgatgtcgtcaggctggcccaatgcgacaaggctatcgaacaaccccggctcggcggcgttccgcttgcgtccctcgtcttccatgtgctcgagcttcatgaggctcggctgccggtaagaccacatgccggtatcatcccagtagatcagcctgcgcaatgtcgggacgctgccgagtactgcgagccccttgtcaatctgctcctggtcctggcctacgaagtaaaccgcctgactgtcgttcaggaggtactcgatttcaccgactgtgaggtcggggtagagcgagacgaccttgccgccgagcgagagcacggcaagctccatccaaaaattctcgggctcgttttcgccgatgatggcgaccgtctcgccgcgcgcaaacgacatcgattgcaatccaaccgccaggttgcggacgcgctcgagcacgtcgccgtaacggaactcacgccagatgccccgatacttgtgacgcgcgattagccgctcgggctccgccgtggcccggtcgacgaatgcctgcggcaatgttttcattggtgtggcggctgaggtcatttttcgcccaggtaagctttcatgaccagcgggtcccgctgaatctgggcgggcgttccggtcgcgatcattttcccgaaatctagtacgtagatgcggtccgcgaggtccatgaccacacccatatcgtgctcgacgagtacgacggggatgccgcgcgcctcgcgtacgtcgaggatgaaccgggcgaggtcttccttttcctcgttgttcatcccggccatcggctcgtccatcagcagaattttcggttcctgcgcgagcgcgcggccgaggtcgacacgcttgcgcaagccatatccaagtgttccgaccggctgatggcggatcgattcgatttccagcaattcaatgatttcctcgacgacctcgcggtgctgcgcttcctccttttgggcccagtgaaaatgcacgaaggcctgcaaaatcgaactgcgcatatgcatgtgccgcccgatcaggatgttctcgatcacggtcatgccgggaaagatgtgcgttccctgaaacgtccgcgccaatccggatcgcgcgatttgatggacgcttcggccgaccatctgctcaccatcgaacacgatgcggccctgctgcggtcgatagaagccgctcatacagttcatcagcgaggttttgccggcgccgttggggccgataaccgcaatgagctcgtcgggcctgatctcgatcgagacttcgttcagggcgacaacgccgccgaacgacattcgcagacggtctgcggtcagcatcggccgcataccgctcacgttgggctccgcatgggtcgccgcttcggcgctcatgtctcctccgtagtcgcgcagtcgttcaaagcgcgcgcgtagttattttcgttgcgttatgaccaatcaggcataatacttacttgcaagtcaaatagatttttgacgcttttcatgcgaccaattcacggcgtgaacgaatgctgggcgaccccaatcttgctgtgcaactccgcacccagctcaaattgcccgttctggttgggccgatgtttctcgtatcgggtcccgaccttgtcatcgcttgttcgcaggccggcgtcgcgggctcttttccgacccttaatgcgcggtcgacggcaatcctggatcaatggctcgcgaggatcacggccgagttgcagccggacgcggctccctatgcagcgaacctgatcgtccatccaaccaacaccaggctggcggaagacgtcgatctggtcgtcaaacacaagtcgccgctggtgattgccagcgtcggacatccgggtcgtgttgttgccgccgtaaagagctacggcggcttggttttctccgacgtcgcctcgctcaaacacgcccaacgcgcggcggaaaccggcgttgatggtctgattttgttgtgtggcggctccggcggcaacaccggttggctcaaccccttcgcattcgtcaccgccgttcgtaaattcttcgccggaccccttgttctcgccggggcgatctcgaatggccgcctgatccatgttgcggaagagctcggcgccgacttcgcctatgtcggtacgccctttatcgcggcgacggagagcatggcggcggatgattaccggcaaatgctgatcgatagcaacgccgacgacattcagctgacggccgaagtcactggccttcccgccaacatgctccgcaaaagcctcgaacgcagcggcttcaggccggagccgaagcatgacggtttcaatctcctgaaggagatcgagacgctgaaggcatggcgggatatctggagcgcggggcagggcgttggcgatgtcgagcgtgtcgagccggctgcgggcgtgatcgaccgcatgacgcatgattacgatgcggcgcgcgcagcaagccagcaacgggccgcgcgcaggttcgcttcagtcggcagtcaatagctcgcgggacggctctcgtccgcttttgccttaacggctcaaggtgggggccgatcccacggatatacgcaatatccagcaaccgcgggatacgctcttaggctagggcgaaacggcgtggtcgagaaggtctgtaaaaaccttcgcgatctccgcgccgcttttcggtccgtccttatcgaaccaccgtgccatccagttgaccgcacccatgaagaaaaacacggtcaattttggatcgacctgccgtatgctgccgtcggccatgcccttctcgataatcgcctgcatctgatgctgcgccttgtcacggcgcgcggcgacgatcttgcggttggcgggatcgagcgcctggaattcgacgaggacggcgcaatcgccgatctcgctgttgtgcgactcgatgaattccttcgcaaacgaaagcagaatttcacggccgttcctgccggtcttgtacgcgtgctcgaacgcgcgatcgccgagatcctgcgacagcatatggcactcgaacaggatttcctgcttgttcttgatgtaataatagagcgcgggcttggtcacgccaagcgtcttggcgacatcgtcgagcgacgtcgcatgatatccttgcgagctgaatgcgcgcgccgcctctttcagcaaggcggttcgcttcagattgaattgctggtcgcgggtctgaacggtgtcgttccacgcggcaagctgacggtcacggccagacaccaccactcctagaatttcattgcgagaacagcagcgctgatcccggcacaattgagctgattcggtcagcttttatcaacgcgaatacccatcgcaagtcaaagattgcgggcgatgatgagtttctggatgttgctggtgccctcgtagatcttgcagacgcggacatcgcggcagtaacgctccaccgggaaatcccgcagataaccgtatccgccatgaatctgcagcgcctcggagcacactttctcggccatttcgctggcgaacagcttcgcgatggcagcctccttcatgcagggcaggccggcctcgagcaggcgcgcggcatgaatatagtattgtcgggcgatatcgacctgcgccgccatgtcggcgagagcgaagctgacgccctgcagctccatgatcggtttgcctgcgacctcacgttcgcgcgcataatgtatggctgcttcgagagccgcctgcgcgattccgaccgcctgcgcagcgatggcgatgcggccgtcggaaagacctgacatcatgatgccgtagccgcaatcgagcgtgccgaggatgttttccttgggaacgcggaggtcgtcgagctggatctgggcggtatgcgcggtccgctgcccgagtttttcctcaatgcgactgactatgtagccttttgcaggcggctcgaccaggaaggtggtgaagccgcgcttgcctgcacccggatcggtgcgcgcgacgatgatcgccacgccggcctcgctgccgttggagatgaactgcttggtcccgttgatcacgaaatcatcgccgtcgcggcgcgccgaggttcgaagtgccgatgtttcggaaccagcctgcggctcggtaatcaggaaggcgccgatcttgtcgccggaggcaagcgcaggaagcagtcgctgcttttgctcggcagtgccgtttttcgcaatgacatgagctgcgccgagattgtgaacgtggacgatcgttccgaccccgccgtcggcggcggaaagttcctcgatggcgagacaataggcgagaaagccagatgccgagccgccgtattcctcggagacggtcatgcccatgaaaccctgggcgccgagaactctcagctcctcggtcggccacgccgaggtgctatcacgctcggctgcagttggggcaaggacatcccgtccaagttggcgcgccgtgttgcgaaccatgcgctgctgttctgacaaaaacggctccgaacctgtatcgctgaaatgcttgttcatggtcgcatcccatccgcaattaaggccgcagagttgcggcatgcaatttacgagaggatacattaatttacccgtgggtcaaatttcggtcatgcgcgcgccggttttcaaatgccttcaactcgttagtcgaccctgaagaaccgggatttcaggctgacatgagccgcagtccgaggctgggccgagctaggattttgaacagcagaaggctcagccggttgatgaggcggcggaagttttatccgacggcagcaaggacggaattggtggcgttaccgtcgcgataccaaaggtaattgcggcccattcggggttcggatttgagatggccgatcaccggctcgacgacggaacgaacgccggctgtgcatctcgcgcttgatctgtggcgttacccgccgcttctagcctgacgtaaacaccctgaacttgtaatccggcggggcgttgtggcccgataacccttgtcgaggagaatgcgcgcgatggtgttgccgatcagcgcctctatctcggggatgacggttgcgagcgcgtggccgtcatagcggttgccgggcagcgccttcgcatggatcacgaactgacagccatcgggtggcatcgttgcctttgcaatgtcgatctggcgggcgcgcgaggcaaagacggccgcaacctttggttcggcgcgttgggcggcggcctcagaactgcgggccgcgcagctcatggaccaggatggcgtcgtgctcggcggttcggccgccattaccttcgccataatggaccagagcacgtcctgtgtttcgcgccgaccggagcggcaggggcgtcggccttgtcattccgaccctgctgacctggccgggcagtttgtcttgttcacgatatcaaaggagagaaatcaaaggagagaactggaatctaacctgaggttgccgcgcccggcatggacaacgcataccgcagcgcacgataagccactttgcggccggtcgacggtgcgttaatcaattgagcaggccagatgtcgatccgaccaatcaaaacccaccacacgttcgaggtgatctcggatcagatccgcgacgaggcccgctcgggcgtcctgggaatgggcgaccgcctgcccaacgagcgggacatggcaaaggctcttgccgtaagccgacacgcccttcggcgaagcgctgcgcggcttggaatctctgggcgttagtcgcttgtgtcggcgcaagcttatccgtcaaagccgatcacgtggctgataccgttcccggcgggcgggccgaccgatgtgctcgctcgtgccgtcgcacccaagctcagcgaggctctcgacgttaccgtaattgtggagaatccaccaggcgccggcggtggcaccgcaatggtttcgctcgcgaaggcgaagcccgatggctaaccgttcgtagcccggcccccagcatgcaggggtccaggcggcacgccaaatagccgcgttcttgccgcaggccggcggctcgatccaaaagacgttggcagacaacaagcgtcacatggcggatggggataatgatggatattggcatatcccgtgcatttctgcagaagggggaacccgtaacttcttgacgtccggcaagacgagctagatgatatccctaacaatcgttagaaattcgttggcgaggagtcgacggtttgtgcggcgcggtatggtcggggttgcctgagccgaacagccgcgatcggcgtgagatggaagaactctgtggatgagagtggcgtccgcccaaacgtggcggctcgtcgttaggaatggaggtccgagtatgagagatcggcatcccgtcactgattgggcaacagacttcgaccaccttgacccgcgatggattgaagacccgttcccaatctgggacgagctgcgccgatcctgtccggttgctcatacgagtcggttccagggtgtgtactttcccacgcgttacgaagatatccgtcagattgcgtatgataccgagcatttctcttcacggcgggttcaggtgcgcgagacgccgccccccgtgaaatcgccggcgcctccgatcacgtctgatccgccgcatcatcgcgccgcacgtatggtcctgctgcctcagttcacgcccgaagccatcaacaagctgatcccgacaacgcgcatgatctgcaatgacctcatcgatcggtttatcggcgacgagacgtgcgacgcagcggtggattttgcccagcatattccggtgcgtgtgattgcagggatgcttggcctgccgccaagcgatggggaaatgttccgtggatgggtgcatgggctcgttgaggaagccatcctggacgatgccacgatggtgcgtaccctgtcggaaatgaccgcctacctgctggatcacgtggagcagcgtcgcaggtcgccggccgatgatctcatcagttatctggccgccgatcggattgatggtgcgcctttgacggacaaccacatcctcggcaccctccgccttctgctcattgccggtatcgatacgacatggagcgggatcggagcttgcctatggcatttggccaaaacgcccgctgatcggcgccgcctagttgctgagcccgcgctgatgcagacggccattgaggaattcttgcgggcctattctccggtgaccatggcgaggctcgtcgccaaggacacggtcgtaggtggctgcccttacgagaaggggcaaatggtgctgctctccttcccggcggccaaccgagatcccgcggttttcccggacgccgataaggtcattattgaccgcaaggcgaaccgccatgcggccttcggcctcggaatacatcgttgcgtcggttcgaacctcgcgcgcatggaactcaccgttgcggtcgaggagttcttgaagaggattcctgagtttcacctcgccgattccaaagctgtcacgtggtccgaaggtgcggtcaggggacctcgaaagctcccactcctgctcggatgaccggcacgccagcctgggcggagcgttgggctcgtcttccgatcgcatataggtctaacaggatgcccagcatgacaccgaaagccctgcgcggccccccgcgcgaatctgggcggacagcttggatctgtgggcgcaagagacagaggaggcggcaaccatgaaaacggcgttgtgcaagaagttgggtatcgaattcccgttatttgcgttcagtcattgccgcgatgtcgtggcagaggtgacgaacgcaggcggttgcggcgttctcggcgctgtcggacacacaccagagagcttgaaaatcgaactggactggatcgactcgcgtgtcaagggccggccctacggtatcgacctgctgattccgaacaaaatggaggacaagcagggtgaccttgcagaggctgagctgcagtcgcggattccggacggacatcgaaaattcgtgaacagcctcctcgagcggcacggcatcgatacgtcggatctttggagcggcgagtacgacaagcgcacggccgacagcatgcgggaggcgggagccgcaaagcttctcgacgtggcgttccaacatccgatcaagctcttcgtcaatgccctcggtgtgccaccgaagtcgatcatggaacgggcacggtcgaagggcatcctcgttggcgcactgaccggagccaaagagcacgccatcaagcacgccgaggcgggggtcgatatacttgtcgctgccggcaccgaggcgggtggccattgcggcgaggtttcgacgatggtactcgtccccgaggtcttgcaggccatcgagccttacgaaaacatcgatgttttagccgcgggtggcatagcaacaggccggcagatggccgcctgcatggcgatgggcgcagcgggcgtctggtgtgggtcggtttggctgacgaccgtcgaggccgagacgacgcccacggtcaagcagaagatgctgaaggcgacgtcgcgcaacaccgtccgttcccggagccgcacgggcaagccgacgcgacagttgcagtcggcctggtcggatgcctggggcgccaaagatgcgccggagcccctggcgatgccgcttcagggactactcagtcggccgcctatggccaaggtcgataagctcgcagagagcggtcacgacggcgcaaagaatcttgcggcatacttcgtaggccaggcggtcggcctgatgaatacggagcagtcggcacggtcggtcgtcgccgatttcatgaaggattatgcggaagctgtagaacggctttcgggcacgttgcatgagtaggtcgaaggacaccacgccaatcgtggaagtcaaccacccagacttgcaggcggcgcggcttgttgcggagcggcgcgttgggaccggtattgcttacgtacgcgcggctcaagtgagatcatctaatgtcaccgacggttgatccgaagcatcccgatttcatcgccgaccagcacgcggcctaccggaggctccgcgcgaatgcccccgtctgctggagtcattcgctcagaggctgggttgtcacccggcatgacctcgtcagcaacattctgcttgatcagcgcttttcggtggagaagttcacgccttttgtggcgacatgtccggacaaatgcgagaaaagatcgagatagtgacgggcgtgctggagaattggatggtttttcgcgaccctccgcagcaccagaggttgcgcggagcgctcgcgaagtatttttcgcccaaggagatggagcggttacgaccgcgcgtgattcaaatcgtcgatgagttgatcgactcttttgctgcaaatggccgtcgagttgattggggagtttgccgtaccattgccgacgagggtcattggcggagttgttcggagccggggagcaccgtatcgccaaattgaagcagtgaggggcaggcaacggcggagcgattttcgtcaaccgtgccgaacaaggtgcccctattgtgccccaactttgctggggcacagctccagggattcgattgctaagtctttgaacagaaaggccggatggtggacgcacaggggatcgaaccttggacctctcccgtgtgaagagccgccgcatcatcgggacggcttctggtaacgctcttggaaagatcaggcggcaagtttggtgcggatcttgtcgcgtgattaccggcgccatcagatgaatgaattcgatcaaaattgcaggatgatcccttacgcgcgttttcctatcggcaccacgtttccatcgctccgcggcaccagggacacgactgccgctcttgcgaggtcttccaaggcggtcgcaatgtatttcgcgtagtgccgctcgatcattttgactgaggtgttgtgcagtttggcgacctgttggatgggcaagccctttcggagaccgcgcacgatgctcgagtgccgcaaagcatagggaatcacctccggcataccggcgcgctggcgaatggccttccagggacgtgcaagttcgcctcttttccacggaccgcgttcagacttcttccacgcgataccgctcggctcctgttcatggatccatcgctcgaaaagaggtgcatcgcttggccgcccagcgattgcgggcaagagcacctcaatcacatcgtcgcccactgggaccgggtctgagccactattgccgccgcgccccttgtaggagcccggcaccatcagacgtcgtgcagaaacctgtacgtcacccacgcgcattcgcctcacctgggcataccgcgcgccggtcgcggccagacacacgacgatccggtatagatcgccatcaaatccttgctcctgatcgacttcacacgcagcttgaaggatggcgccaacctcttcatccgtgagaatctggttatctcgagcaaccgacacatgatcatcatcatcgacccgctcggctttgaagccggccttcacaatggcgaggaacgtcggatttagtttcttccgatctgcggaaagccggggccacgcggcatttagtgcggccttgaggtcattcacgaaccgctgcttggtcgtgacctttaagtccttcggcaaaccctcacgccacgttatcaagtcgtcttctttcagggcatgcagttgcactgatgcgagaggagcagctcccgcagcttcctgattgccgcgcttttcttgaccgagaacgtagcgccgcagcttggtaccggcgtcggatcggacgtcgcgacctgttcggcgtctttctcgagcgtcgcgttccttgatgtaggattcaacggccgatcgcacggtaggagccgggcccgccgcctgcgacgcggcctctgttctggctcgagctacggcctcccgagccgttctcacggcctgttcgaaggtcagaatcccttcggcgcgcttgtcattgatgtcgtttgtgatgccgacttgcgcctgcttgtagttaccgccttcgtggtgattacgccagcgaacaagccaaacgccgccccgttttcctttacgatagcccagatgcgcttccgcatcgaggcggcgccaatgtacgccaagctcgagcctagagcgcgctttagccgtcgtgatctgagcctcggtgagtgtctttgacatagcgttcgccgattttacgtcgaatatccgttgaatataaacccatgtacattggcgaacaatactggactatgggcattcaacctattgaaattattgaacgtcggcggacggtggcgaacggagaaggactcattatttggccctctcaaggctgaaacaggggttcg

SEQ ID NO: 116 - DNA, 4191 bp, Bradyrhizobium colbertium
aatttttctccattaggcaggtttccaatatagcaccgcttgcccgggatcaggaacctctctccttcgaccgattgacgtccaggagggagacggccggtcgcactacccctctcaaaacgttccggtctgggcgggcgcgagccaacactcttaatcccaagagcgtccccaaaagcaaccggctgacgtctgtcgccgagatcgaagaattgatggtgccgttcttttggccggcgactatgcagcggtaaaagaaggcctccacttcctcaagaatgccctcgacgatgcgagcgaacgctgggtcgtgtggagcgacttccagtgccgaattgacaaggaagcagccttttcgagatttgtcttcgcatgatctgcttatgatctcccggaaaaaggcgaggatcgcctgcttcggcggcaaactggcctcaaacctctccattctgtcacagacggtctggtccttgtagtgtttgagagcgatcgagaaaaggttgcgcttgctcttgaatgcgttgtacaggcttgctccggttatgcccatcgcgcccgagagatcacgaatcgaagtcgcttcgtagccaaaccgccaaaatcggtcggtagccgcagcaatggcagcttgctcgtcaaattcgcgaggtctcggcatgtttttctacctgttcgcgcggcctcgggtcctgatcactatctttgtccgtgacccgttctgacctctatgtcacgaaaacgtgtggtgcgcacgaagttccgacggccaagtgccagtatttgtagcctgacctagcgtgacattctactgccagacgtcgacgcgctctctcgcggtacccctgctcccaccgttgaagccgaagagaaagcggaggccatcggactttgttcgcgaatggagcaacgtcgcgccgagacgagattaatcgaacaatgagtttgtacgcgtagaccattttgcaaaccacataggcgacttcaaatccgaaacgcccaatctgcaacagcggcttttgagatgttggggagtgatcttccgcccataatagatcggttgatctaattcagccttgatctcgaacgccccgggttgtaggctcctcgacatgagcaagcgagcgcccgctaatcgcaagttcgatcacgcgaaaccgagacaccatgcgacctggtagcgatcgcgacaagagcggcctctctcctgacaaggtggagaacatctggggcgtatcagcgctcgccagcggtctcgggtcggacggcttcggtgctgctctctggccggtcgagcacggcgtcgtggaaaggccagcgtgcgcgtctacccacgtggtctcggtttggactagcggttcgacgatttccgaactgtatcttgatggaaatctcagattccgccggattcgccggcgcggcacatttcagctggctagagctggcgaagacgtccgcgttatcctctctgaaacgagtggcacttgtctcgatctctatgttcctaagaagttgttggattccgcagccagcgaagaacttggtctgggatcttattccgtcgagctactgcccctcaaactcgagacagacggcgtcatcacgagggtagcagacgcggtcgcgcgcgagatccttaaccccggaacggctactcggcttgccatggacagcgctgtcatgcagctaggcgtcagcctgatcagaaactggtcgaccttgggcaagaacgtgcgcgtaggaggttccggactcaatcctgcacaggttcgcaagacgctctcttatctccaggacacgttacatctggatatctcactcgagagtctcgcgggaaggctcgggctgtcgacgtttcattttgccagagagttcaagatagccgtcggtatgcctccgcatcgctatcaaatgcaactcagacttacgaaggcccgggagttaatccaaaacactcgaatgagcgtggccgaagtggcgaaagccgtgggctatcgagacccgggtttcttttcgcgagcctttcggcgcgagttcggcctcgctccaggagctttccgtcggtcttatctggcgagcgatcatgaagctggatcctagattgacggatcaccgtttgcgagtcgcagcttcgcaggtggtaggccggcacagccgtggcagacggcggtccgacaacaagcaccaagcatgaacgatctttctatacggcccagcgcggccgccgacatcgacgcgatcgggagaatcgcagaaacgaccggactcttccccgccgaaatgctgccagacatgatcggcggctatatcgacggcggtaaagccgatctctggctcaccgccgaactcgctggcgtgcccatcggctttgcgttctgcgagccggagcgcatgacgaacggcacctggaacctgctcgcgattggggtcaccccggagcgacaaggtcagatggtcggcgcccggcttgtgaagcgccttgaagataacctccgggctgcgggtcaccgcatcctgctggtcgagacgctcggcacggccgagttcgcgcggacgcgcgcgttctacctcgcgaacggtttcacggagcaggcgcgcatccctgagttctacgacgtcggcggcgacaaggtggtgttctggaaacgcctttgaggcgtcaagccggaagcgccgaattccagaggagacctccggctgttgcggttatcgacaaaaacgcctacgcgtccgcatgcccgcgatgacgcgcctgtccaagaacagcagcaatgttgccgcggcgggcagctcggggccgaggtgcctgacgacggcgccggcacgatcacgcacgttcgtcagcacggcgtgaacctcttcgggatcgaaaagcacgacgtcggccacgatgtgcgccgccttgtggatcgcggcccgccgggaacgggcttccgcgctgcaaggaaggctgtgggacgcctcggctgaagtcgaaacgttaagaacggatctcgagaaagctgaagcgaagtcgcgtaccgacgcgctgaccggcctcgcgaatcgaagggctcaaatcgttgatccggaacgccatgatcaaagctctggacgacggctctcctttgagcatctttctgatcgacatcgatcatttcaagcgtttcaacgacagccatggccaccaagtaggggaccgggttttacggctggtcgcggactgcgtgcgccagagcatcggaaaagccgatctcgtcctgcaaggtgtgaccgtcgtacgggttatcgggtagcgcactggcgtgcagcacgaacaggccgccgggcgcccggcggttgttggtgtcgatgaaggtgcagcggccccatcatgaagcgggtcgcgatgcccggccgaccgttctcgctgcagagcggcgcgacccgccgtcgatccagtcccattccaccttgccggcgagctgaaccagctcgtgcttcatattgatgatctggtccagcctggcccggaacagatcgcccgatcctgtcgctttgggcttcttcggtcgcatagccacctccgatgcgacacggaatcatggttggcgattcatcctgaaaatgaaattgcaaggttctaatgcccgaagcatcaaagccctgcaatcccaaaacactccgcaacgacaaatgcgattccagctcaattgcttagtcgctcttcacggacgactacgtattggaaggtcttcgcctagagccggccacagatccgacttcaggatcgtttcgatccggatcgagcctcccatcgtgctctgcaggcagctagactgcctgctcgcccgaaatcgccttcggcttgtagccgcctatctgaccaggcgacgctgccggtctcatcgaccgcttcatccagccaacgacggtgctgatcgcgaacccaaactgcttggcggcccggttacgggacatcccgccctcgatcgccggccacggcacgcttacggagatctagagagtacggcttgcccatccatgctggcctccttccagccagcatggtgcatgatttgggagttctaaatcgattcagactaaagccatcccgctttagtcgacactcagtgtacccttgcttcgattgggtgctgatcttgcgcattagtacttatcttgcgaattaacggcaccttcgacccccgtgggtcggtcaaaatcccccgggta

SEQ ID NO: 117 - DNA, 16818 bp, Bradyrhizobium colbertium
ttgcgaatgggacgtagacgtcgcttacggcgcatcacgccgtcctcgatcttcggccagcggaaggtcccatcctcgagcctcttggcgaacaggcacaggcccgttccatcccagaacaccagcttgatccggtccgcccgcttggcccggaacacatagacagctcccgagaatgggtctgctcccatgctctcgcgcaccagggtcgcaagaccttccatgcccttgcggaagtctaccggcttggtcgccaccatcacccggaccgcacccgacgggccgatcaccggctcgccttcagcgcctggacaatcgacgcaatcatcgccgtgtccgctccacgaccggctcggatcgtgatgccgtcgacttcaatctcgatgaccccgtcatacgccttggccttgcagcgcgccgctttgcgctctcggtgagcagtcggcgcccgcaccacggcatccaccattgccggcacaccggacttcgtccgcttcggaatgaccgccagctgcttcgcgcaactgacgtcgccagccaaacagctgctgcggtgacaatccatgccgtcgagccacggaacacaccgagtcaccactcgtgacgatctccacgacgatccgtgccttgtcctcgtcgctccacttccgccgacgaccggctccggtgaagtcctcaagccgccgcaccggctccgtgatagcagtatgtactgtgttcattctaagcctaacggtccgaacaaaccgcagactcgcagatcaccccgtcatccggtaggtggccgctgaacagcccttacattagacagactgaatcactgatacctctgcgtcgcaaccgctgccctttttcaacaaaatcggtcagaagacgactacgttcaatgtcggcgacatccgagggactcagcgcgacgcgatggcgacaccagcacgcgatttctacttaaggatgttgaagcccgtgtgagctcttctattgccccgatacagagcgagagcgcacgccctctgttacttcgttgaccagcattgcaaagcgccgtgacagaccgtcatcaagtactccccatcgacgcattacttctcgctgctttcgagatacacactccgcgaacgatgcatcatcgacgaaccgctcaagctgcacacgaaaatcagcaagcaagtccacgtggatgaccccacctaccccttcataatcatcatagcggtatcgataagtatcatagttaatcactggtatgccgcaagcgatcgcccaacgtatcgtggcagatatcgaggcgacatacagatcgcatagcggaatcaactctgcggttggttgcatgctgcagcgaatattcccaccagcaaacgacgaaaacctatcggctgaggcgcgcgggtgcggtcggatcaaaacgttggcccgattccccagagaccggaagctttcaatccaagcatctgagagcgtatcatagcttgaaaactcaaactgcccgtcgtcttccccgccaaactgattgggagggaatccgcaaacaattagaggacgatccggtacaaaactgtacttagtcataagttccaggcgaagccgcgctcggtttgctgcagctcggtacagaatcgcgctgtgtatatcgcccaccactgcaagctggcttactggaaagccaagctgcacgtatctgtcgcgttgagactcgctatcaagcgcaatctttgccgcccgcccgcggttcagaatccagggagccggggaagactggccgagagcttccagagccagcgccgtgaatgccggcactcgaatcagatcctggccatcaagtcggtagcgccattttggaaagatgcgcacgacaagccgagacaggaagtcgttgaccggattcagcttacggtggcggtagaatttggctggctccaaagggtttgggatcgtgaatggtacgataacgcttgggataccctgtctgcagccttcattgatgactgttgtcgagagtgtttcgacattatcctccaccagaaggatcacatctgggcggatcttgcggagaaattctcgtagcgtcttcgctctctgccgtgcccagattagctcagcagcaatagccaagattgaaatgcgccttatccaagagcgagcctgacggagcagtgaaggaggattgcgcaatatgagataaagacgcctaatcgtggagtaaatgtacctgagcaacttagaacgagccagtacgttacgaaaaccaaacaattcgattctacggctcgtcagcgcggcggctttccttttattggtcccttctgatgaatttcttacgtgcttagatggaacaaataggccgtctcgccaatagatttcgctgttcgacaatgtctcatcaatacgaacacctctctccagcagcattatgatatgcgcgcccagctcaacgcgcagcatctcggcggcggcagcacaatgcggaaccgcggtagttgtgtctgcatagcacagcacgcgtaaagttcgcatcgactctttttccggaactcgcaacccgcagttcgcttctgctccaattcaaacggaggcgcgctctcattcgacattcacagctgatgcctcatcgtcgtcaatgagattcagcgcctgagattcgatcatttcccagtagagcccgcgcttccgaatgaggtcgttgtgatttcctgcctccacaactcgtcctccttcgagcagaaagattgtatctgcacgcctaactgtagagaggcggtgagcaatcacgatcatagtcttccggcgagaaagactctccagctgccgctgaattgcccgttctgtcagggtatcaagagcacttgtggcctcatcgagcacaatcacgtccggatcacgaacaaacgcccgggcgagcgctaacctctgacgctgcccgcccgaaagccgagagcctcggtccccaagtattgtatcgtatccgtcaggcaatgactcgatccagtcatcaatcgcagcgagccgagccgccctgcgaagctgatcatctgcaacaggtcgtcgcaggccgaagttgagattcgcgcggatggtatcgttcagtattactatgtcttgagtaacgacacctaggcgggcccaccacgatgttatggccagatcattcaggtcacccccatcgactaaaattcgcccagagttgggcctgtagagacgggtgattaggttgatgattgtcgacttgcccccgccagaaggacctacaattgctaccgtgtgccctctgggaaccaccaaattgatccgctgaagcacgctgggcccttcagccagataggaaaaactcacatcttcaaattggatagcattcttgaaagtctcaagtttaatgcttccgtcacgttcacgagatttctctgcggccgcaagaaatgcgtcaaactccctgaaggcgtcaagatgaatgataatgttattccgggaaatactgataatactcagggggccaagtatgcgaaaaagtaatacaaagaaaatgaccagaactccaactgcctgcgcggcagtttcggttcgaagcatccctaccgccattacgatgaagcaaacaagcaaccctccaaccgtactgaagaacggaaccgtcatgttctcaaccgcgacagttagatcacgagccttctgcaaccgtttaacactagattccacgtcgcgccgcacatcatcgacagcaccggccaggcgaatcagcttcgcaccgttcaacgtttcgaaaaagatctggctgaatagctcagtagcgcgcgaaagttcttgaccgacgctacgaacgaggttggttgtgagtgctctgaatgtcaaagtcgctgcgattacgtaaactgtcgccaggacgacaagcagcggcgagacaattgataacaacacgatataacttgccacaacggcagtgttcgctatgagagtcgcaaagaatcgaagggcgataccaatgcgagcaggctggctgatcatgacattcgtcacagccccggcccccaaggtgtcagtaaactgcaggctggtatccacaaacgccgaataggcacgaagccgaagatgaaaatcgatccggtgcggaattgcgtagcccacaaactcttgggcgaactgaagtccccctctcagcaggacgacaacactcatgaggccgccggcccataataaacgctgatcgactggaaggacatcaaacagttcagaaaagcgaccgacgaccgggatattggcgaatacatttgtttcgcccatagtctgaagcagtggaactagcaagaatacgccaaagctctcggttagagagccaaacaccgcgagcaatacgaatgataccaagagtccagaatggctcttgctataacgcaaaagtaaattcagcaaatccctgtaggcctgcaatttacccgacaagtacaacctcaatccaaacccctatttggctgacgagaacacctagtgtagcatgaactggatgataacttgttccaagagttctttcgcctctctttgagagtccgttcgagacccgacttatctccatcccaggatgcggctcgatcgtacagatagaaccttcgtcgctcgcaacaacaagccctgacgggtttaagaggcgcggcgaggccgtactatttcaacgcccggtgcaactaagcctgtggcgggcggcttgccgaaaattgcgttgagagagtggcagttccaatgttgaccaatgcaaacctcgcataaatacaggccggaagttgatggtctccgagcggtagctgttctgcctgtggtcttgtaccacggtcacgtcccgggattcagcggcggataccttggagtcgatgtcttctttgcgatctccggctttttgatcacacagattctgctcggaagtctcgacgaagggagtttgtcgatgcgcttgttttacgagcgacgggtcagacgtcttctacctgcccttttcctgatgcttcttacgagccttgcggtggggaccgtcattctgccgccgccacttctcgtaaaccttgcagagagtaccatcgccgccgtattctttggagctaatttccactacctgcagaccacgaattacttttccgcccctggcgagctacttccgttgctccacacttggtcgctcgcagtcgaggagcagttttatcttctttttccgatcgctctagcctggatccatcgctatgcccgcaaaatgctacagttgatcctctgcgctgcggcaattttatccattatcagcgcttatcgtgagaaccaagttgatgcagcgcggggcttttatctgcttcagttcagggcctgggagctcttggccggagcggtccttgcaactttgccacgcaagcagagcaacctactcccgccaatcgggctattgatggtccttgccgccatctttttactaggcaatcgagctaactccggcatcgggtccttgctggcggtctccggtacggtgctcattctcggctacggcggcaccgatttcgcatcccggatcctatcactgcctccattggtctatatcgggtcgatttcttacgccctctacctttggcatcagcccgtttttgctttcgcaaggcacgcgctgataaacgcgccaagccccacaacggttacctctctcatccttttcgccggccttttggcggccctaagcactcattattttgagcagcctctgcgcagagcagctaccttccgcagcgttgcaactgtatctagctctgccgtggcgttgttaatgactgcttgcttcctgaccagtcagacggaaggttaccctcaacggtacacagcgcaacaactcgccctccttagtgcgcggccagagcgtggagttgcctctgttgacggcaaatcatgccgtaggccgattgcggaagcttgcgtgattggagccaaggtagtcccaacctttgctgttgtcggtgacagccacgcggatacgctgacagcctcccttagcaaagtgttagcccagcacggtttagctgccttcgtatacacgaaccctggctgcccatttatcgcctcggtgatcgaggtgatcgatctctaccattgcggcgagcttatgaaccaagttcttgccgcactgaagcttcatgacatcaagaacctcattgtcagcgatcgtagcacggcctacatagctggaacacggtttgataacggcgagggtggggtcgagccaggagcgcccttccccgtcgcaccggtaggattttctggcgcagatcaagagcggcaagaagcaacactcgcggcaatgcgatccacgttaattgagttgctcgacaccggaataaatatctaccatgtcatacccatcccagaagtcggctggcacgttccacaaacgttagcgaagctcgccgcgagacgtgcgcctccaattacgaccagcgtacatcggtacttggaccgccatgcaccagtattgaagttagcagccgaactctcgacgaacgcgcggtatcatccagtttatcctcaccgcgtgctctgtgaccacgttagatgccgaacggtgcttgatgggaaggtcctttataccgatacagatcatctaagctccgaaggagccgccttaatcgtgccagagatcgaaaagcttctaaaggagaaccctgtcggcccttgatgccgccagctcggaaagattagaaggcctttgctttccgaggagatataccgctagaacagtctaacacttgtgagccacaccaaggttagacgtacacgatcgctcctgcatgagcgatgctcaccaaatgtccatcagctgcgtagttgtacactgtgacatcccctcccgagtatttcgtgtaggctgatgtcccatcatacttctcaacagtaacgtattcgatctggccggctacgctgtagccagatatggcttctttccagctctgtacatgctgcggatcatatgtggtcacgagaagtgagtgattcgctccattattaggatagatagacacagacgtcagatgatcttcgctgtcgtactgcgacaccgccattttgaaattatgcatctggctggagttatagtctgtaagtgtggaagttccgtcatccttctttacgctgaggtgatttagacggtcttcagcatcgtaaccaaagacctgataagtccaagcttggtcattttgaacatcataaaccacaacttcccgatcgggagtaacttgagctgccaatgtgccactcgagatctggacgtcggcgaagtgaaaattctctacgcctgtgacggtgtcggccccatcgggtgacccaaaacgctgatcgacgatggtgaaggcctgtgtcgtcccattgtaggaaaccgtatagttggcgcggatcccggaatacagggcggtgtctgtgcctgagctgccattgatggtgtcgttgcccgcaccgccggtgatcgtgtcgttgccgccgccaccgctcagcacgttggcgatggcattgccgatgatggtgtcgttgccggatccaccgattgcattgtcgacgtaggagcgcgcgtcaccgttgtagagataggcgttgtagacgttgcctgatgcataatggccgttgccgagataggccagctgcactgaggagaacagcgaggaggcaccgggattgaggttgatgctcaggttggtcgtgtagttcgacaggtcgtaagtatcgacgccaccgccgtcccagatggtctcgtagatgcggttggccgaaccgccgacgccatcgccaggtgcaagctgaccgacgccgttgataaactgctgccctgtggtagcattccaggtgtaaacggtgttgccgctctgggtggtgtagtcagcgccgtacatcgtctgcagcgcgaggatatcgttggccatgtaggtctgcgaatatccgtacgcttcgttcgtatagccgcccgtcgtcgaagcgccgacatagctgcgatagctcatgacggtgtattcgctgctgtcatgcgcgctcggcaccgccacgttgcccggtccaccggcgtcctggctgtgcttgaggcccaaggcatggccgagttcgtgcagcgccgtggtgaagtagtagttgccgagcttggccagcgagaaattgtattggttgccaaaccagatgtcgccgcctgacgcataattcccgggatagtaggcgtaggcggtcggattggctgccgacgactgcgcgatcatcaaatcggcgccattcgtgcccgcatattggatgtcggcgttggtgtagccgaggatcaaccccatggcgtagttgatcgcggcctgaatttggctaggtactgaggcaaagcccgatctcgtcgtctcgctgttcccgccactatatggattggcgtagtcgctgggtgcgtccggaaagctgtaggtgatcgcgccggaccatttgtagcccgacagaaggccgtcgatctctgagttattggtcttggtgaccgtgaccgcggtagccaaagcgaatctccaaagcagcaagtcccctttgattcggggagcgacacacatgattctagcttgagagttgaacgtttggtttaaattgggcaagcgcactcggacatcatcgataacgaggtgttagccatcaaatcccgtagtcgtacggggcacgcacgagagctcgatccaacgacgcgcccgtcatttgcagggtttcatgaaaagacgtttactcccggccggcctgcttggcgccgtagtcgcattcggtgggctggactctcaacccctcggaggagtgccggccatggcgaagaaagccaattcggacgccagcggcggcgggagcagcacggcggggcgcgcaccttcgatgccaatggcccgcgatcccgccgctgcggtggcagaggaatacgaagcagcgcgtcggaagggaacgcgggaagccttcgaactcttcatcgcgcgccacggcgattccccccttgccgagcaggcgcgggccgaattgaaacgcctgtcgcgctgagcccgccccctaaggcatggcatttcggcaggccgcatcggcgccgcgccggcttgtcgcatgatctttcggcactatggtaggcccgcaatctgtcccggagcctttcatgcccattccgcatgcctcggaagccctctcgcggttcactgtgctcgatctgacccgcgtccgctccggccctacttgcgtgcgacagctcgcggactggggcgccaaggtgatcaaaatcgacgcgctgaccgaggacgccgccggcgagcagccgggcggaccacgccgtggttccgacttccagaatttgcaccgcaacaagcgggcgatggctctgaacctgaaggacgagcgggggctcgccgtattcaagcgtctcgccgccaaggccgacgtcgtggtcgagaatttccgcccgaacgtgaagaagaagctcggcatcgactacgacagcctcgccgcgatcaacccgcgcatcgtctatggcagcatctccggcttcggccaggacgggccctatcacaagcggcccggcttcgatcagatcgcgcaagggatgggcgggctgatgtccatcaccggcgcaccgggcgaaggcccgatgcgggtcggcattcccgtcgccgacctcaccgccggcctgttctgcgccatgggcattctcacggcgctgctggagcgcgaggtctcgggcaaagggcaatgggtgcagacctcgctgctgcaggcccagatcttcatgctcgacttccaggccgcacgctggctgatggagaaggaggtcgcccagcagaccggcaacaaccatccaaccagcatcccgactggcgtgttcaagacctcagacggctacatcaacatcgccaccacgggcggacggatctgggagcgctgcgcgcaggcgatcggtgcgccggagctctatgctcatcccgactatgcgacggcccctgcccgctccaagaaccgcgacgcgctcaatgccgaaatcgagagacgcacggtgacgaagtcgacggagacctgggtccgcgaactcaacgaggctggcgtgccctgcggaccgatctatgcgatcgaccagatgttcgaggacgcccaggtcaagcatctcggcatcgcacaggacgtgcccaacgaagagggcaggcacatccgcctggtcggccagccggtgaccctgtcgcgcacgccgagcaggatggtggcgccaccgccggagtttggcgagcagaccgaggaggtgctgaaggagttcggcctcagtgcggacgagatcgagaggcttcgggacgccaaggtggtatgaacgtcacgtgcccggcgctggccgggctttgtttcccgttgccgtcgatcaccgccagaataatagcggaagctgcagcgtcgtgagccagccgatcagatctttcgaccaaccaccttgaatgtgccgccggagccgatcaccgacagacgaaaggccacctcggcacgaccgccgagcacgagcgcgatggtgaacggccccagcggaatgctaatcctcttgaaaatcggacccatttacgaaggcgagcatcagcctcgtctcaagcgccgacccggttaggacctcagcaaatagctttatcacccctcatcatgagaatgaacagaacaaaaaatgcgttcgtcgggtgaaagacactgccccaattcatcatcacgaaaacgatgaccggaaagcatgcacaagcccagaaatctctcgaataggctgctctaataagaaaggtggtcaagtaacctagaaataggagagcactgattccgtaagttgctaacaggcgagtcggaaaactttccgagcccgaggcctcaagccctggtacgaggttgtaggagacatgatccaggagtcggaaatttcccaagcccattaggtaaggactcgaaacgaatatcttcatgtgttctttccaaagccacgggcggtacagttgctgattaatcgcgaacgagtcgaggtcgctcgcgctcctcaagagcaaacgagacacgataggcgaatcttggactttctcgaggaacggtgcgattgcgagttcgactgctatgctcgccagtatgactcctagcgcggtgaaaattaagagcaccggcctgggtcgcaccttcgccaaactcgcgaatagggaaaaatagatgacagcggcaaccagcacggtccgaacgaatccgaacaggccaaaatagcaagcgaccgtcagtgcaattatgccttttttgtcgtgttgcttggtcgagcgcgtcaagatcataagcatgaccagcgacatcgtcgcggagttggcgatatgagggaagaatgacgtccgccaaggtccgtagcctgctgaggtctgccccggaaatagaccccagggattaaggttagttagcatggcaacgatcacgcccattaagagcgtgccaaggaagatgtcggtgagtgtgctgactgtgatccgagtgctctcgcatccgcaccacgcagtgacccagaccattagcaatagctgagcgagcacctgtagatcgccccgggccagctggtagccacctgcacaaagcaagaaggcaagcagtagaataccgcgtccgagaagcagcctaaagatctcgcggatacaaaataagggcagcgccaaagcaaaaaggaccaaggcccaataaatcgacgagaaacgttcaatggcagcgtcctggccgaccaccatttgaatagcgatggaattgatgagaaagaataccaaagaggtgctgcttccggcgcaaggcttcgtcattttcgttcgccgttctgggtcaagagccgtgccagctcatcattcaactggtttttggcaaagtcgtacgccgtgtagccctcgcttgtcctgtctgatcggcgagctccccgagaaagcagaagcttgacggccgatctttgcgaagatgccgatgcagcaatgagaggcgttactccaagcgagtttgccgcgttaatgtcgacgccccgtgccaggagcgtctccatcacaatcaaatcgccgacgcgtgccgcgtcgatgagttccatcgggtccgatggcaaattgtctggacgttcgaaaaaggggtgccacttgttcgacggaatgaaggcaaaagcatacgtcgtcatagccagaccgattaggccagcccttacgaagatcgctggatcaagaccaatagccttcaaccatggcattgggcggcagcgctgtgcgagtacccacgttccgatgaagaacagcagttgagtaatcataaatgcctgggcggcgccgaccagcccgctctgcttgagtagacaatacgttatagcgatatttgctaggccggcgcttacggtcacgatcgccaggtaagtcgtgcggccggcatagaagatgtaggtcgccacgaccaggtacatgccgccgaaagcttgcccgattgcgatataaatgaagattgcgccggcggcctggaatttcggtccggcgagcgcgctgagaatgaatggcgccgacaaaccgaacgcgattgcgaacgcaagaattccaatgaagtaggcgtaggtgaaccgcacaatctgatagtcatgagcttgatcgtggagcctcaggttctcgatcaggtgcggagagtaggctcggttcagggcatcgttgacgagataaagaatcatgcccaactgagctgcgacgagatagatcccggtcgaggcaactccaattacgtttgcaaccagaaagcggtcggaaatcatcatgagcattccgcccgcagcgtgggggaccagcggcagaccgaaacgcaatgcatcgcgcatgtagactgcgccgtgaggaaggcaaatccaaccactacgcctcatggtgtaaagcgcaaaacaagcggccaggatagacgcgagcaccattccggaaacacggccctgccaacctagcccgagaataagcgctaagatgaacgatgctgacagatccatcgctccctgaaagcttctcagagcggcaaagctcagcgctttcttgccagattgccagattgaaagctgtatctggacgatgaagttgcaggcggaaaatgcgactgcaatcagaagccaacttccggggagtgtgaggtacaacttaagccaatcgagagtggcccatgcgacgagcaggctggcgctgctgctgattaacaaaatgatcaggcaggagccgacaaatcgcgggaaatcgatcgtatcttgatcgaaatatttcatcgccactgcgccatgcgtgctgagccccgtcatgatgccaaagatctgcgccgccacagagaacatggcgatctgcccgtattcatcgggagaaagggcgcgcgtgagaattggcagaagcacaagcggcgccccggcagacaggccggttgccaagagatagacgatggacgaccgaaagagagatgctctcgaaagaaaggagagtctcacctcccgatccttcctgcgcatcggcgtgatgcacctctaagcgctccccaggattcgcagattggcattgagatcacccgacatgatcagccgcccgctaatctgggcgagtgcactcttcgctcacaatcagccctcacgtcaaccgcaagtgggccatgagagctcattttgtgcacgcgtcccttcctgttccttcctcggatcttacctgctgaacacgtccgcggactgacgatcaaaccttcggctagagcatgcggtaggacctcatcgtggagacgaagcttcgtcggagcagcttctcgctcactccgactgcttcctgtctgcggctgcgggaggctacaatctggtacttaggtgggattattctccgggtaaggtcatctcagagccgattgccaaaattccgtagccacgaagattcgatggtcttattttgagcttccgagttactcgctgacttgccacgacgaacctccgtcgccccataacccaggcacatatagcattcccgatcgcctccgatatgaagatgccgaccctatgaccagtagaggtcgttccgagtgctcgaagcagctgctcaccgaagagcacgaccccaagtcttctgtccgattttcgcctgcaagatcctttaggggaagtgaaacgctgcctcgctgcaccttgttgtcgcatcatcgggtcaaatgccaccttccagcaccagaccccggcctcatgatcagccagggtctactctgcgtcatctacactgctccagcgattggatctcgccggcctgctcgattgccatcgaggatacgtatagcttcgccttagaaggacgcagctgcctagccccaaaccgccgtgggcgacgcgaaacgaccatcgaagctccgccgaacggtcgtaagctcgacattgtcggcgagcttctcgggtatctcatcatttgcagatatttgcgtgccctgctccctggacagtcgcttgtagatgcggccgttcatgcgggcctaatccttggcttcgcgcgtatcgcttacgcaatcagcgaatcggtcttgacgcgatcgtggccgctacaatagtgaacatactctcggcgaagcaaggtatcagctcgcccgtcctgctaaagcgctcgacaagccagatcataaacgatcgttgcacctaaaccgctgttggtgcagccgcttagtgggatcaggacgtcgtccgctgcgcccagccgacgcgcccgactaggccgtcaatcaccggccaaaacagtagcagaatcgccagcgtcgtaatcgagccgaccaggccgttcgaccagaacaccttcaaactcccgcctgagccgatcatggacagccggaaggcatcctcggcgcggttgccgagcacgagcgcgagggtgaacggcgccagcggaatgccgatcttcttgaagacgtagccgatcacgccaaatccgagcatcagccagatgtcgaacatcgcgttctggatcgcataggcgccgatcgcgcaggacaccacgatcattggcgccaccgccgcaaacggcacgcgcaagatcgaagcgaagatcgggacggtcgtcagtaccagcaccaggccgacgacattgccgagatacatcgaggcgatcaggccccagacgaagtccttgtgctcgacgaaaagcagcggcccgggattgagtccccataccatcagcccgccgagcaggatcgccgccgtgcccgagcccggaatgccgagcgccagcatcggcagcaacgccgacgtgccggaggcatgtgcagccgtctccggcgcgaaaacgccctcgatgcggcccttgccgaagctttcgggctccttggcgaagcgcttggccaggttgtagcccatgaacgaagccgcaatcgcgccgccgggggtgatgccgagccagcagccgatgaaggaggaacgcagcagcgtcacccagtatttcggcaggtccctccagacgccgagcacgacgcgcagcgaaatgccagcagcgtgtccgcgcagcgccagccgttcctccatcgtcagcaggatctcgctgatgccgaacaggccgatgacggcgaccaggaagttgatgccgcgaagcagctccggcgagccgaaggtcatgcggagattgccagacacggtatccatgccgatgccggcgagcagcaggcccagcgacatcgagatgaccgtcttgtgcttggcctctcgcccgagaccgacaaaggagcagaaggtcagcagatacacggcgaaaaactcgggcggaccgaacttcagcgcaaaggacgagatcatcggcgcgaggaaggtgatcagtagcaccgcgaccagcgagccgatgaaggacgatgtgaacgccgccgtcagtgcctccgccgccctgccctgctgcgccatcggatagccgtcgaaggtggtcgcgaccgaccaggcttcgccgggaatgttgaacaggatcgaggtgatcgcgccgccgaacagcgcgccccaatagatgcaggacagcatcacgatcgccgaggtcggatccatcgtgaaggtgagcggcagcaggatggcgacgccgttcgggccgccaagacccggcagcacgccgacgaagatgccgagcaccagcccgaccatcatcaggacgagcgtcttccacgtcagcaggaccgcaaagccgtggagcaggagtccgaaagcttccatcgtgcgggcccgctagcggccgagggccgcttcgagcggccctttcggcatgatgacgtcgaaggcaatgtcgaaggtgacgaacatgatcgccgtgaacacaagagcggtgagcagcgacttccacagcgtgatcttgccgacgagccgcataaagcccgcgatcaggagaaagctcgcgacatacaggccgaggaactgcgtcaccaggcagaacagcagcgtcggcacgaacaccgccatcacgcggcctgcctgcgcgcgcgtgacgaaggtctcgcgcgtcgcgcgatgcgagacgagcgtcgcgatcaggccatagaggctgccagagccgagtatgatcgagagatagaacgggaagtaaccaggctccggcccagtcgcgtcccaggacgcgccggtgcgccaattgtcgtaaccgagcgtggccgccagcgcgagcagcagaaggcagacgacgatctcgaccgtgccggaggagacgacggacggggaatcgtcttcaggcgctgtcggatcgtcgacgacgatttcgatatcggtttgggacatgagttgagcgaatgctgtggccaatcccctctccccgcccgcggggagaaggttaaggt

SEQ ID NO: 118 - DNA, 40729 bp, Bradyrhizobium colbertium
gcgtcgtgacgcaagccgagttgctcgaccatctctacggcctgaatgaggaacgcagctcgaatacgatcgaggtctatgtcggtcggctgcgacgcaaaatcggccgcgataccatcaggaccctgcgcggtctgggctacaggttcggctgatggtcagaagtctgcgcgcccggctgctggttggcgttattctcacgaccgtgacaggtatcgctgtcgctggcgtttcgatttccgcgctgttccgggcgcacgtcacggagcttgtcaatgccgagctgatcggtcatctcgacgagctcgaaggtctgttggcccgcacggccgacggacatgtcgctctggcacaaaggctcagtgatccgcgcttcgcgcagcccgggactggctattactggcaggtgagcgatcgcaacggcatcgtcctacaatcagcctccctcgaaccgcaacggcgttttccgccacccgcgcggggggcggatcggcagcttactcgctcagtcgaagctggcccggctggtgagccgatgatcgcatatgagcgaccgtggcagaccgctgaaaacggttacgtgcttcaaattggcgccgaccagcggatcgtcgatgatgtactgagacattttaatcaggcgctggccctgtcactcggcacactggcaatagccctaattggggccggcacgttgcaggcctggtttggtctgcgtcccatgcgccgtctgcgcgacgcgctgggcgacattcgcgcgggcaaagcagaaaccctgcctggtgacttcccgtccgaagttcggccgctggtcgatgatctcaacgctctgatcgacgccaatacccagatggttcgccgcgcccgcacgcaggcgggcaatctcgcgcatggcctgaagacaccattggccgtgctgacggacgaagcgcgccggctgctcgcgagaggtgataccgagggcgccgcggtcctgactcagcaaacagggcggatgcagcgccagattgatttccagcttgcccgagcccgtgccgcagccaacgccggcctgcctggcgtcatcacgcaggtcgaacctgccttcgcatcaatagccgcggcgatgcggcggctctatgctcatcgtgagctgacgatcgtccatacagccgagacggaattgcttgccgccgtcgatcccaacgaccttgacgagatggtcgccaacctggtcgataatgcctgcaagtgggctcgtggtgttgtctcgatcaaggctacgcgcgataccccgacggggcagctccttattacgatcgttgatgacgggccaggcatcccggctgatgcactaaaccgcgcgttcgccccaggcgagcggctcgacgaggccaaaccgggaagcgggctcggactcgcaatcgtccgcgatctcgccacactgcacggcggctctgtcgaactatccaatggcagaaatggaggccttcacgcggagttgcggctcccatcagcctgacaagttcaacggcgtctaggttgggcgagtttcatcgtggccgcgtcgtccgcgcaccattcgacctgagcgattcggcgcgctcgaaatcagcatccgcgccgctctgatctccagcgttcgctttcatcgttccgcgttcgaacaagaaggtcggattcttcggatcagccttgatgaccagatcataatccgcgatggcacgatcaaagagtcctttacgcccgagtgccttcccgcgattataataggcaccgaggtagtcagtcctcagttgtacggcgcgatcgaaatcagaaatcgcgcgatcaagctctcccttgctcattaaagcaacgcctcggttgttgagcgcgacatagtagtcgggggacaaacgaagtgctcgatcgtaatcctccatggcacggtcgatatctccactcgaccgcagcgcgacaccgcgattgttataagccgccgccaactgggtgatcatccgctcgcctgcctggataaccgctgtgcatccccggatcgagcgatcgggtacgatttcggccgcatgcacgcacgagtcccaatcctcgtcgctcaaagctgatgtgggcgacgagttaattgcaaagtacgcaataaatatcgttgtgctcaataacgtaagagcacaacgcttccagcgggtggttcgcgctaggatcgatgcagttcgtgttctcgtatacagcggcgtaatgcaaatgagcaaagagtagcctcaagtacgtgcattatattattcccagtttgttctctaacaatcctgtctgaattttccctgacaatcgacgtttgagacatccgatctggtcgcttcccgaacgagagtacacccgtcgagtgctatagagattaccaagcgagcgccgtgcgtgccatccgacagggacagatccaagactcccggactaagcctcagtctggtagcatgaagacatcagcggtgtttgatgtactagcagcggcaatcgacgggacgggatggatccggactcggtcacgggagggcaacgaggagccgctatccggaagaaatcgtcctgcaagaattgaacatcgcgctctgcggcgctgccaacttgaatgacctctgaaatatctggaggtcaatacggcgaattgctctgcaacggcgctccgcaaatatgcaagatatcaacctaatattaagttggcgcgcccgacacgattcgaacgtgtggcctccaccttcggagggtggcgctctatccagctgagctacgggcgcatcgatattcagatagtgtccgagatcgaccacggtcaatcgcgaattctagaatcgacatggctcaaacgacgcgggctaaagcctcgccgatcatcgccattcgtactccacaacctcctttcggtttgcttccgtggtgcttccgcgacctcgaatgcgattttcgtgcttccttcgagtttcgccaatcgcttggtttcactcgttttttacgacaccctcgaccatcagaaagagcttgcatttgccttcggagggcaacgctctatccagctgagctacgggtgcagagaggcttcatgtagccgattggcgcggggcgggcaaccgcttctcgccggatcggactcaagccatcttgcgccggaagggcgccggaaccgctgcggcctcccggccgatggcggcgaactcggccaggacctgttcggcgcagatgacgcggttgcggccgagccgcttggcgacataaagcgcctcgtcggcggcgcccagcagccggtcggcactgccgtcggcgctaacgggaatgtggctggcgacaccgacactgagggtgacatggtcgccggcgcccagggcgccgtgggcgatctgcaaggccatgacggcgcagcggatcgcttcggcgacgctgcaggcggcgtcgcaatccatgtccggcaggatcagggcgaactcctcgccgccgtatcggctggcgaagtcgagcgggcgcatggcgtgccggctcacggccgcggcgatcgcgcgcaggcattcgtcgccgctctggtggccgtggtggtcgttgaacagcttgaaatggtcgacatcgacgaacagcagcgccagcggcttctgcgtgcgctgggcgcgggcccattcgctcgtcagcatctggtcgaaggcgcggcggttcgacaggccggtcaatccgtccttggtggcgagctccttcagtgccatctcggcgcgcttctggtcggtgaggtcgcgcagcgtctccaccaccgcgatcaggttgccggcctcgtcgtggatcgggccggcgtcgatggcgaggtagagctggctgccgagcttcggcatcacgcaccaattctccgcggaaaagccgagcccgttatggccgcgcgcagcgtattccgaatagtattccgggagctgctcgggccggtcgagcgcgacgaggtctgcgaggcaggggcgcttcgtctcatagaaggcctgccagtgcttgctggtgccgatcacttcggccgcggcgacgccggtcagccgctcgcaggccctgttccagatcacgacgcgacgttgcgggtcgatcacgaaagtcggcaccaccaggtgctgcatcagccgcaccgcgtaggaatccgcgacgtcgaccgctttgcgtgatcttgtcatcaagccaccgccgccaccggcccggtatcgccgccgaacagctttcgcacctcgctggccggcttcggcgcgctgaacagataaccctgcatctcggtgcagccgagcgtgcgcagcatctcgcgctgcgcttcggtctcgacgccttcggcgacggtggtcatgcggctggccgcggcgatgttcaccacggcctgcacgatgacgggcgagccgctcgcctccgcgatatcggcgacgaagcagcggtcgatcttgatcttgtcgaacgggaagcgcttgaggtagctgagcgaggaatagccggtgccgaaatcgtccagcgcgatgcgcacgccgatcgaacggagctgatgcaggatcgagagcgccgcctcgtcgtcgcggatcagcacggcctcggtgatctcgagctccagccggcgcgggtcgagcccggaagcggccagtgcgcccgcgatccgcagcgccagcgtgtcgcatttgagctgcaccggcgagacgttgaccgcgacgcgcacatgcgtcggccaggtcgcggcctcgttgcaggccatgcgcagcacccagtcgccgagctcggtgatcaggccggtgtcttcggcgaccgggatgaactccgccggcgaaaccatgccgcgctcgggatgacgccagcgcagcagcgcctcgcagcccgagacttcgcccgagcgcaggtcgaccagcggctggtagtgaatctcgaagccgccgtccaccagcgcctgccgcaggtcctgctccatgctcaatcgcgccttggcgctcgcatccatctcgggctcgaagaagcggtgcgtgcgtcgcccctcggccttggcgccgtacatcgcaagatcggcgttcttgacgagctggtcgagatcgtcgccgtcctgcggcgcgagcgcgatgccgatgctggcgtcggtggagagctgatggccggaacaatgatagggctgtcggattgccccatagatccgtttcacgaacgagaccacctcggccggtgactggaccgcggtctggatgaccgcgaactcgtcgccgccgagccgcgcgatcaggtcgccctgcttgagacagcttcggatgcggcctgcgatggccttcaacagctcgtcgccgacgtggtggccgagcgaatcgttgatgcccttgaactcgtcgacatcgatgtagagcagcgcgaactgatccccgtcggcgacctttgccagctcgcgttcgatctgctcccggaacagcgtgcggttcggcaggtcggtcagcgcatcgtaatgcgccatatgcgcgatcttttcgtcggcgcgtcgacgctcggtgacgtcgtcgatgacatggatgaggtagcgcggctctcccgtttcgtcgggaataccgatcctggtcgaggtgatgtagcgcagacccgtaccaggcatctgccaggcgtgctcgtccttgaacaatcccttggccgaatttagcgcgcggctgtcgtcttcggtgatgcgggcggccggcgcctcggggaagacgtcaaaggcagtcctgcctacgacttcctggcgagaccggccgaagagctgctcggcgacgcagttgagcagcagatattggcgcgtgcgtgcgtccttcacggtgatctgcgaagggatatggtcgatgatctcgcgcaggaaggtgtggttgcgatcccgctcctgctccagcttgcggcggtcggtgatgtcttcgatcgtggccacccacccgccctgtgcgagcggggtgttgatgacctggaaggcgcggccattggcgagctgatgaactctcgtggagaccctgccctccgcgacgatcctcatgacctcggcgcagaatgcctcgacgtcgccgtcgaacgcgccacgctccttgcgatggcgcatcgcctcgcggatgtggcagccaggcttgatgacgtcgtgggacaggccgaacatctcggcgtaccggcggttacagatgacgatgtagccggcggcgtcgtacaggatcagcccttgcgacatgttgttgagcgccgtgtcgagctgcatccgctttgcttcgatccgttcccgggcctcacgattctgacggctgatctggcggatgatgaaatagaggatcagtgcgatcaccgccgccgaaaatccggcggtcgcgaccaggaagccggtctgctgccgccagtcgacgagcgctgcgtcggtggtggtggtggcgatgatgacgagagggaagtgcttcagcgacgccgccgagccgagccgttgctcaccattgaccggactgttgccgcgcagcgtgtgctggccgccctcggccaacaccttctgcatcagcggcccatccttgaagttgcgcccgatcagctcttcgacgtgcggatagcgcgccagcattttgccttcgcggtcgaacagcgagattgccgtgccctcggcaagcgcgacggacgcgaaatacttgtggtagctgtccggatcgatccggcgcaccattgcgcccaggaacgacccgtcggcgctgttcaaccgtcgtgcgacgacggtggtccatttgcctatgatgaagctgcggacggactccagaatgaccggttcggattgcggattggtcttgaaggcctgaaagtagccgcgggaggaaacgttgatcttcggcagcggttgagcccgcgaccagctaatcagctcgccatcggcgtcatagatggcgatgtcaccgagataggatacggagctgatcttgctgcgcagcatctggctggtggcgggacctgacatgcgctcgcggaacattgcgggcgaggtgatctcctcaaggttcatctgcgcgatcagatcggcggcgacgacgtcggaatcctcgaactgctgatcgaagtgccgcgcgatcagctgcaccgtgttttccagctcgcgttcgcggttggcgagggtgcgttctcggaattcgccgacggccatggccgtgacggtgaagatgcccgcgaccagcaatacgccgcacagggtcagccacaggacaggaccacgccgcgtcaaggcctcccagccgttcctcgcggctagagacattccggcggtcaccatggaaaagacctggcgcattccctctccttggagggagaggaatacaccgcacaaatggcgcaaaccttaggaaaaccagttacctaaggattaatccagttgcgcagcctggccgcatgcatcggagcgggagacgcgtcacggttgtgcggcgcgcgcggcaaccgacgcgctgcatcatgaatccccgcttaatgcgatctgccgccgctcttgtctccggcgggattgcgcagccgccccaccacgccggtcgggaagaaatagacgctggcgatgaacagcagcccgagccacagcagccagcggtctggatgcagcagccccggcagcagcggcaggcccgcttcgcccgctgccgtggaggcggcacccatcagcgcctgaagatagttctgggccaggatgaagatggtggcgccgatgatcgcgccgtagatcgtgcccatgccgccgatcacgaccatcagcaggatgtccagcatgatcgagaagctcagcgacgtatcggggccggcatagcgcagccacagcgcgttcaggatgccggcgctggcggcgacgagggccgcgatgcaattggcgtaggtgaggtggaacacggtgcggaagccgagcgcctcggcgcggaaacgattttcgcggatggcctggagcacgcgcccgaatggcgagttcacgacacgcagcagcgcgaggatcatcagcgccgagacggcgaagaccagatagtaggtcaggatgcggccgttgatctcgaagccgaacaggttcttggagatcagtatcgtgccggggcgaagcagctcgggcagctggaagctgcgcccgtcctcgccgccagtcagccaggacagctgcgaggccagcacctggaaagccgaggcgaccgcgagcgtgatcatggcaaagaagatcgcggccacccgcagcgagaacagcccgatcgcgagcgcgagcagggcggccagcggcaggccggtgacgatgccggtggcgaccgccgcccagttcggccccattccgtacagcgcgatcgcgatggcgtagctgccgatgccgtagaacatggtgtgggcgaacgacaccgagccggtatagccgagcaggaggtcgtacgaggcgaccagcgcggcgaagacgcagatcttggccgcgacgttcagggccttggcccccggaaacaggaacggcgtcgctgccagcgccaggatgatgagaatgagaacgagcgtcagaacgcggctgcgcggcggatcgcctgagaggatcatcatcggctggtcaccgcatagaggccgcgcggccgccacatcagaatggcgaccatcagcaggatgttggagacgagggcgagtttcggcaccaggaagccgccgtaattggccaccatcgccaccaggatcgcgccgatgaagcagccgccgatcgagcccagccccccgatgatgacgacgatgaagatgagcacggtgagctcgtcgctcatcgaggcgtgcacctgctcgcggtagagcgcccacatcacgccgccgaggccggccagcgccgatcccgtcatgaacacgccgaggaacagccggcggatgcgatagcccagcgcctcgaccatctcgcggttctcgacgccggcgcggatcaggaggccgagcttggtgcggttgagcacgagctggatggcgatgaagacggcgagcccgatcagcatcgccagcacccggtatttggcgatggcgacgtcccctatgatgaaggagccgcgcagcgacgtcggcagcggcatcgggatgatctgcggcccccacagcgcatacagcgtctgctcggcgacgatcaggccgcccgtcgtcatcaggatctgcttcagatgctggccgtagaccgggaggatcaacacgcgctcgacgaccaggccgagcgcgcccgaaaccgccatcgagagcagcgcggccggccccagcaccgcgaggttcatccagagcgagtcggcctgcacggaagccgcgaacggggccagcaccagggttgcgatataggcgccgacggcgatgaaggcgccatggccgaaattgagcacgtccatcaggccgaacaccagcgtcaggcccgaggccatgatgaagatcatcatgcccatggcaaggctggcggcggtcaaggtcagccaggagctcggcgatccgatcagcgggatcatgagaagcgcgagcgccaccggcagcaggatcggcgcgagatcgcgcttcggtttcggcagcggatcggttgcggcaagttcagtcactgatgcgtctccaggctcaggccgagcagccgctcctgcagcggcacgtcggcggcgagcgccgccatctcgccgcgatggacgatggtgccgttgtccatgaccagcacattgtcgccaagctcgcgggcggcgaagaaattctgctcgaccagcaggatggtggcgcccttgcgcttgatctccttcaggcactcgatcagcgccatgacgatcgccggcgccagccccttggtcggctcgtcgatcagcaggagcttgcgcggctcgacgatcgcgcgggcgatggacagcatctgcttctgcccgccggagaggcttccggcgcgcgacagccagaaccggcgcagtgccgggaagaagccgaagatccagtcgagctgggcatcgtcgagcggcccgtcgcgtgccgccagcaacaggttctccctgaccgtgaggtcggagaacaccgccatgctctccggcacatagccgacgccgagcttcgcgatgtccggggtggcaaggctctcgatgcgcttgccggcaaggctgatttcgccgcttgatgcctgccagagacccatgacggtgcgcagcgtcgtggtcttgccggcgccgttgcggccgagcagcatcgtgacctgaccttgtggcactgcaagatcgatgccctgaaggatgtggtagcgaccgatatgggtgtgcaccccggagagtttcaacagatcgctcatgctgcaccctcggtggcattcttgggtgcgacgccgagataggcttcctgcacgatcggcgaggcgatcacctcggcaggcttgccgtccgcgacgagctggccgttatgcagcacgatgatgcggtcggcgagggagcgcaccacgtccatcttgtgctcgacgaggagaatgatcttgctcttgtcctgcttgagctgcgcgatcaggttgagaacgacgggcacctcgtcgatgctcatgccggcggtcggctcgtcgaacatgaacactttcggctccagcgcgatcatcagtgccacctcgagcttgcgctggtcgccatgcgacagtgcggttgcggcgccgccgcggcggctgccgagcgcgacctggtcgagaatggcgtcggcccgtgcgatcaggtcgcgacgcaccatccagggtcgcagcatgtcgtagtgagtaccgctagcggcctgcaccgcgaggcgcacgttctcttccaccgacaggttcggaaacaggttggtgagctggaaggcgcggccgaggcccgcgcgcgtgcgcatcggcgcggagtgctgggtgatgtcggcgccgtcgaacaggatgctgccgttcgaggcgcgcaattggcccgagatcagattgaaataggtggtcttgccggcgccgttcggccccacgatggccgtgagctcgcccggtcgaaacgtgcaggagacattgttgaccgcgacatgaccgccgaagcggatggtgaggtcgcgggtttcgagggtgagcggcatgggtgtctggaaatgatgaagctagatttatccgcagtcgcggtgcgctccctcccccgcttgcgggggagggtagggagagggtgtttccgcaatgggactatccccgagaggagaaagccctcacccggcgcttcgcgccgacctctcccgcacgcgggagaggtgaccaaattaccgcttgttcttgaccggaacgtccatgtcctcgatcttcagctcgcgcacgggctcgagcaccgcccaggcgacgttcggatcgaccttgaccttgaagtgatacatgctctgcagcgcctgatggtcttccttgcggaacaccatcttgcccttgggcgtgtcgaactccaggccttccatcgcggtgatcagcttctcggtgtcggtcgacttcgccttggtgacggcggcgacgacggacatcgcggcggcgaaaccgcctgcggtgaagaagtccggcggtgcgttgaagcgcttctggtgctcggcgaccagccagtcgttcaccgggttcttcgggatttcatagtagtagtaggtcgccccttccatgccgggcaggctcttataggccgcgagcgccggcaggatgttgccgcccgttgagagctcgatgccgtagcgcttcgggtccatgtcctgaagcttggccagcggattgccggcgccggcccatatcacccagatcaccttgcggccgggcttgtccttcagcgcgtcgaacaggcgctggccgacagcggtgaagtcggtggtcgaggtcggggcatattcttcggctgcgagcgttgcgccggtcttggcgagcgcctccttgaaggctgcgacgccgtcgcggccgaaggcataatcctgcgccagcgtcgcgacggtgacgccctgcttgccgatcgccaccgcgttggagatcgcgtcctgcgaggagttgcgcccggtgcggaagatgtagcgattccacttctcgccggtaatctggtccgcgaccgcgggctcgacgatcaggatcttcttgttctcctcggcgacggggagaatggcgagcgcggcggccgacgaggtcgtgccgatcgcgatatcgaccttgtcatcctgataggcttcggcgagtgcggccttcgcaaggtccggcttgctctggtcgtccttggtgatgatgacgatcttgcggccgtcgagcgtcatgctgcctttggtggcgtattcgaaacccatcttcaggccggtctcggtctgtttggcataggcctcgagcgggccggtcttgccatagatcagcccgatcttgagatcctcggcccgtgcggaggagcccgcggcgagcgcgagaatggttgttgttaagatgagtgatcgacgcacgatggtcctcctgatctaaagtttctcggcaacagcgatttgcacaagcttacgaacattgcaattgaaccttgcggtggagcgggcgctggctttttagcatgcatcatctttgggcctgcctcgctgcgccagcctcgacttggcgccagtccgactgcgcttcttccgcgctctcgaagatgtgcggcgcgacgccgcgtttctccagagcttcgccgagcttgatgcgcaggaagcccgacgtcgtgtagcgcgacacgccggaatagaagcgatcgacgaggctgcgcaccatcgccgaataatcgtccatcagttccggcaggatggaaaaattgtcataattgacgatggcgtagacccggcgtccgagcggcgccaggcgggcctcgacgatggcggcgatggtgtcgatctcggccttgctgcgcagcggatagcgttccagattgacgaagaacaggttctgctgctcgtccagcgtgaagcgctggtcgagcgggatggtgagcaggcgctcgcgcaggtccatcaggccttcgcggaagatgcgctcgtccatcatagccgggtcgcgcgggatcagcggcttgaaatccatcagccgcagaatgtcacgctcgatgtcgatacccggcgcaacttcggtgagctcgagcccgtccgccctgagctcgaacacgcaacgctcggtgacgtacagcgcgcgctgcttgcgcgcggcggcaaacggaccgctgaaggtgacgtgctcgacgcgatcgacgaacttgcgcgacttggcttcgtcgaggatgacgagcttgccgtcattcactttgatgcgctgcttgcccgcgccgaacgttccgacgaagacgacctccttggcgttctggctgatgttgatgaagccgccggcgcccgcaagcttcggcccgaacttgctgacattgaggttgccggcgcgatcgacctgggcaagcccgaggaacgcggcatcgagaccgccgccgtcgtagaagtcgaactgatagggctggtcgatcaccgcctgcgtgttgatcgccgcgccgaaatcgatgccgctcgccgggatgccgccgatcacgcccggctccgccgtcagcgtgatgagatcgatgatccgctcttcattggcgacggaggcgatcccttcgggcatgccgatgccgagattgacgacgctgttggccttcagctccagcgcggcgcgccgggcgatgatcttgcgctcgctgatcggcatcaccggcagcgaggccgcgcggacgcggatctcgctcgaaaaagccggattgtactgcgtgccgaaagtctgccagtggttctccggcctcgacaccacgacgcagtcgacgaggatgccgggaatcttcacctggcgcggattgaggctgccggcctccgccacgcgttcgacctgggcgatgacgatgccgccggaattatgcgccgccatggcaatggccagcgcctccagcgtcagcgcctccttctccatggtgagattgccgtcgggatcgcccgtggtggcgcggatgatcccgacctggatcggaaacgtcttgtagagcaagcagtcttcgccgccgatcttgatcagctccaccatgtcctcggtggtgcgtgcgttcagcttgccgccgccgtgccggggatccacgaaggtgcccatgccgacgcgggtgatgtggccgggccggcgcgcggcgatgtcgcgaaacagatgcgtgatcacgccctgcggcaggttgtaggcctcgatctggttcgcgatcgcgagctgctgcagtctgggcgcaaggccccagtgcccgccgatcacgcgccggaccagtccttcatgcgcgaaatgattgaggccgcgctgcccgccgtcgccctgtccggctgcatagaccagcgtcagattgcgcggcttgccctgcgtgtagggcgcatcgccctcatgggacagatagagctcctccagcgcgatcgcgatctcctcggcaaagccgatgccgacgaagccgccggtcgcgacggtgtcaccgtcgcggatcagcatgacggcctcggccgccgagacgaccttgcccttctcggaattgcgcagatagggcagagctgggtgatggctcacggcgttcctcccgatccctcgaccgtatgccgttgttcttgtgcgttgatcttagcgtggggagctgccctggaacagcttgctcccgcgcgagaagacggagatagcaaggtccgcgccagatgccgctggttcgcggaaagcggccgaagttgcggcaattcccacatgccggcgtcaaagagtagcccggcaccgtgtccggattccgagactccggacagtttcatgtctcaaaactcagacgggagccgacccggaggcgaggccgaacttggcgagcttcttgtaaaaggtcgcgcgcgagatccgcagcatcctggcggcctcggtgatctgtccgttgctggcagcgagcgcctgctcgagcgtgtgcttctcgaactcagcctcggcttcggcatagggcacgacggccgccgcggagcgtgcgggcgccgccggcctgacctcggcaccgacaggaaggatgcgggcgacatcctcgccggtcagtcgcccggagtcgctgaggatcagcgcgcgctcgagaatgttacggagctcgcggacgttgcccggccagtcgtagcgggcgagcgctgcaagcgcgctcggtgtgatcttcgccttgacgtagtcgcccgacgcgctgatgtcgtcgagcagccgggcgcagatgtcggggagatcgccgaggcagtgccgcagcggcggcagatcgatcgagagcacgttgagacggtagtagagatcggcgcgaaatgcgccgtcgctgacgcgcttgcgcaggtcgacattggtcgcggcgatgacccggacgtcgaccttggtgatcttgtccgagccgagcggctcgatctcgcgctcctggaggacgcgcagcaacttggcctgcaattgcagcggcatctcgccgatctcgtcgaggaacagcgtcccgccgtcggcgatgcggaatttgccctcgcgccccctgcggtcggcgccggtataggcgcccggcgcggtgccgaagaactccgactcgatcagcgtgtcagggatggcggcgacgttgacgctgacgaacggcttgtctgcacgtgaggaggcgttgtgaatggcttgagccagcatctcctttcccgttccggtctcgccggtgagcaggacggtgacgctctgtcgcgccgcacggctcgcgagctccttggctcgcgctattcccggcgttgagccgacgaaatcggcgaaggtgaaacgcgcggcgcgggcgctcgacaattgccgccgcgccagccgcagatcgctctcgagctgggtgacgcgggcgagcagcggcttcaggctttcgaggtgatcatagagcacgaagccgatcgcgccgatcaccgtcccgttctcgtcctcgatcggcatgcgcgtgacgacgagctgctcgccgccgagctccatgatgtcgagcaggatcggctcgccggtctcggccaccttccgcatcaagctgttcgggatgacctcctcgatcgatcgtccgatcgcctcgctggtctgcttgagaccgagcgcagcaaggtatttttcgttgacgtagacgacgcgtccgctgcgatcgatcgcaatcgcgccctcgcagagcttctccagccgctcgaacagcgtctccatcgcgcgtgcacggagataggcgggatcgctgatcgaggaggagggagcggacatgacatatcccaggcggcgtccgcctgtgtatcagcaaaatgccagcaatttcaaagaggaaatgacgctgaagccagctccgcaatcgcggtcgtcccgggttcgcttcgcgccacggaacgacaatggtgtgtgttgcgccgctccgcgtcctaccttcgatacccgctcgcccgggaatagccctggcgattgtgttgcaccggccggctcgccacgctgatccgcgcctcgctggaggccggcgttgcgagcttcagctcctccaggaagatcggccgggagaagtaatagccctgcgcgtagcggatcttcgttgccgcctggagataggcgagctcctcgtgggattcgaggccttcggcgatcaccgtcatgccgagcgcttcgctcaaggactcgatcgcgcgcaggatgccctggctgcgcgggcgcttatggatgtcggtgatgaaggagcggtcgatcttgatctcgtcggcggtgatgtcggcgagcgcggagagcgaggaatagccggtgccgaaatcgtcgatggagatgccgacgccgagcttgcggaacatcggcaggatctcggtctggaaatgattcttggcgacgaaggcgtcttccgtcacctcgatcatgaaacgctggggaaagccggtctcgtccagcgcctgcgcaaagctgcgcatgaactcgggattgccggcctgcttggcggcgacgttgatgctgatggtcgcttccgcgccgaatgtgtcgttgatcaggtcgatcgatttgacgatctcggcgagcacgagatgggtcagctcgtcgatcagcccgagctctccggcaagattgatgaacgagccgggcgcctggatcacgccttcgtcgtcgcgcaggcgcaccaaggcctcgatgccttttacggcctgcgtgcggatgtcgaccttggactggaaggcgcagcagaagcgtttttccaggatggcgagccgcagcgactgctcgaccttcatccgcgcctgcgcctcgcgctccatgctggcgtcgaagaaggccgccagccccttgccgttgttcttgatgcggtacatcgcgatgtcggcgttctgccgcaacgtctcgaagctgcgtccgtggtccggatagaggctgatgccgacggaggtcgaggcgaagatctccgaattgtcgatgaagaacggcgcggtcagccgctccagtgtcgattgcatgaattcggcgacttcctcctggctctggatcggggagagcagcagcaggaattcgtcgccggagatgcgcgacagcatgtcggaatcgcgcaggtcgcgcccgagccgcttcgacagttcgaccagcagcgcgtctccgacggcgtgaccgtaatagtcgttgatgtgcttgaaattgtcgacgtcgagaaaggccagcgcgaatcgctccccgccgcgatccctcgccagcagattgttggcgcgatgctcgatcacgcgccgcgagggcaatcccgtcaactcgtcgaaatatgccgagcggaacagctggtcttcgaaattcttctgctcggtgatgtcggaggatgccgagatcaggagctcgcgcccggcgaggcgaacgggacgatgggtcgtgagcagcacctgccgcgcggcgccggcgtgaagcgcttcctccgtcacgaccgcctggccggcgctcagtgcctgccggcaggcttcgcgtcgcggtgcgaggtcggccaagggacggctgccgtcgatgccgagctgggcggcggcggcatcgttgaccagcagaagctcaccctgcgcgtcctgcacggtgaggccggccggcagcattctaacgatttccttgagaaaaccgagttcggcttcggtcgcgccggaatagctattgtcgttcatagaagtcatgaatcttgttgtttcagcgcgcctttgcaatgggcgcgatcttccgcggttccctcttaagtttggttaaggggtccggagaaatacgggggtgttttggagaaaacttgcggcgatgcgatgcgcgccgacgatcgtcattaacagagggtcaacgcgcataacgaaactgcgtgacgtgcgcgcgcttggttttcgttggcgtcgtgggtagcatttgaagaggtcgatcggatgcagcctggccgtgacgctgcggaaactccggtggtccggtcgaccggccttgcgttagccgcttcgcgggatccggcattgcatgatgcaatggagcccggtcttcaggtaggagatctctgttctgccttcgaaggcggaaagcgccgacttcagcagcttggtgccgaagccgggctcggacaccttgtccacgctcggcccctctgtttcgtcccaggtgatggtcaggcggtcctcgctgacggtccaggacacctgcagcagaccgcgcggagaggagaatgcgccgtacttgcccgcattggtggcgagttcgtgaaacatcaatgacagcgtgaccgcgagcttcggcggcaggaacaatcgatcgccgttgagcgtgaagcggacatggccgtaagggccgagctcggagatcaggaggtcgcggatgtcgcagccggccttgtcgatccgcgagatcaaatcgtcggttgcggccagcgagcgcagccggggatcgatccgcgcccagacctgcggctggtcgtgcaggacctgatgcagcacggcatgcaccgtcgacagcttgttcttcaagcggtgctgaagctcgtcgaccagcagcttgcgatactcttcctcctcgatcaggcgtttggagatccggcgctgctcagccagcatggtgcgatagtgctcgactccccagatggtcatcgcgcagacggcccagtaaagcgcgagcagagcgaaccgcgcacgatcggcaaaggcatcaccgaaattcaggacgactccgagcacgccgccgaccagcgccgtcaccacgccgatacggaatccgcctagcgcagcggcaaagaagacggccgggaagtacggcgtaaagtagatgtcggggcgtacatgagcgagaccccagcgcaccagggtcgcgcccaacaggcagatcaccgcaaaggagatgctcaaaccgagcgagggcggtgcggcgccctgccagcctttgcgaaactcttcgatcagcttccccatgcgcagcccgctcgcgagaggcgttcgaaaatcgggcggcccgtgaggatgttacgcatgccgcctgcacaagcatagcttgccttggcggacgcggacagggatagtggttgctctggcgatggccgacattcgtcactcgacatcaatcgctcaaaacaggaacatctcatgggcaggctggacggcaaggttgcggtgatcacgggcgcgaccagcgggatcggattgcgcactgcggaagtcttcgttgccgaaggtgccaaaattgtgatcgctgggcggcgtctaccggaaggcgaggcgctggcgaagcagctcggagccaactgcatcttccgtcagaccgatgtcacggtcgaagcgcagatgcaggcgctgatcgcgatcgcagtggataaattcggcaggatcgattgcctgttcaacaatgccggcgggccggcgcagaccggcggcatcgaaggcctcgaggccgagcggttcgatgcggcaatggcgacgctggtgcgcagcgtcatgctcgggatgaagcacgccgcgccctacatgaagaagcagggggcgggcagcatcatcaacaatggcagcatcgccggccgcctcgccggcttctcgtcctcaatggtctacagcgcggcgaaggcagcggtgatccatctcaccaaatgcgtggccatggagcttggcgagtccaacgtgcgcgtcaactcgatctcgcccggcgcgattgcgacaggcatcttcggcaaggcgctggggctctcgaccgatgcagcggagaagacgccggcggtgatgcgcgaggtctacaagaccgcgcagccgatcccgcgtgccggccttcccgacgacatcgcccatgccgcggtgttcctggccagcgacgagtccagcttcgtcaacggccacgacctcgtcgtcgacggcgccatgaccggcggccgcaactggagccagcagcagcagggttacgtggcgctgcgcaaggcgttcgatcagggcgcgtagtcgatatctgctgtcattccggggcgatgcgaagcatcgaacccgcaacctcgagattctcaggtgcgcaattgcgcaccatggttcgcagttcgtgcgccgcagaatgacggagttgactcaagcaggcttcacgctcacccgcagcccatcccgaggcttcgggatcggccacatctgccagtccggcttgtagccgggcgcgagcgacacctccatgttctgcagaaagtgccgcgcgaagcacttcgcctgcatataggcgaagtgcaggccgagacacatgtgcgcgccgccgccgaacgggacgaaagcgaagcggtgacggttgcgttgcgcttcctcggtgaatcgcagcggatcgaagcgctccggctccggccagatgtccttcatgtggtgtgtatagagcggattgatgccgacggcggtaccggccggcaccttgaagcccttgaaggtgaaatcgcgcatcgcacgccgcggcatcgagggtaccggcggcttgatccgcagcgcttccttgaaggccatctccgtcagcggcatcttttcgagatcgtcgaagctgctcggcgcatccggcgcaaggccgagcgcgagcacttccgcgcgcaacttgtcttgccattcagggttggcggcgagctcgccgatgaaggaagtcagcgacgaagtcagcgtgtcgtgcgccgccatcatcaggaagctcatgtgatcgatgatgtcctgctccgagagcagcgcgccatcctcatgggtggcgcggcagagctgcgagaacagatcgtcgccgccgtgattgccgcggcgcagcggaatctgctcccggaaataggcgacgatgcgcttgcgtcccttcacccctcgcgccatctgggtgccgggcaaggggtggcggaccggcgacacggaggcggcgaccatatcgacaaaggcgcggttgatctcgtcgacctccggcccgatatcagtgccgaggaacgaagccgcggcgagatcgagcgtgagctgcttcatcgccggatagagctgcatctcgccgggtcgtgccttccacttcgcgacgcgcgcggaaatgccgcgatcgagatcgccgagataggatttcatcggccccgacttgaacgcgaccgacagcgccttgcgatgcagccggtgctcgtcgaagtcgagcagcatcaatccgcgcggaaacagcaggccgagaaccttgttccaaccgtgcgtcgaggagaacagcttctgctggtcgaacagcacgagctcgttggcctcgggcccgagcagcacgacattggtctcgccgaaaaagtgagtgcggtagaccaggccgtatttggcgccgttcgcttcgacatggcccttgggatcggcgagcacctgaaaggtcttgccgatgatcggccagccttcgtccccggggatgtgggtcagctcattgcgtcgcggcggggtgaacggaaacgcaggggcggccacattctgcatcgacatgacgattgctccggttggctggccttgccaggatagcacatccgggcaggctggcgcggcggtctcccgtgtacgataacgtcacctcaccatcgtcgtcccggcttttgccgggatgacgaccgggcattctccctatcgcttcgccgcttccttttgcagatccggcgcgttgacggcgggaatggcgacacggccggggccggtgaccttcagtgcctcggcggccttctcgttctccatgatcttcgccatcacggcctgccctgcgcgttcgaagatcgcgcggttctcgatcacgaatttctgcgacctgcgcaggccgtcgatgtagccgttgatctccggcacgacatagcgcgccaccatgtcccagctcctgcgggtgttctccggattggcccagtcgtgcacgaagccgatgatggcgccgacgccgccggaaacctgcatcacgttcttgatcgtcttgacgagatcgtcgggcgtgccgatcgtggatgccgcgccttcgacgaaggcggtcttgtcgacggcctcgtcgggcgaggagaatgccgtgaggcccggccgctgcagcgtgccgacgttatattcgttgtgccagcgcatcagcccggcgcccgcctccttgcgtgcctgttcgcgggtctcggcgatgtggaaggtcagcagcacgcgccagtcggcacggctcaccgtggtgccgtgcttcttggcggcatcctcggcgaactgccattgctgctgcagcgacatcagcccctgcgtcgtcatcgatcccagcgagatgatgccgatgccgtattttccggccagcgtcatgcccgacggcgagatctgcgaggcgaccacgaacggcatctcctcctgcaagggcaggatctgcagcgcggcgtcgttcatcgtgaaccagtcgctcttggcggtgacgcgctcgccgttgaagaggcggcggatgatgccgatggcctcgtcctggcggtcgcgctgcgtcatcggatcgatgccgagcgtgtgcgcatccgaggcgagtgcgcccggtccggagccgaagatggcgcggccgccggtcatgtggtcgagctgcaccatgcgctgcgcgacgttgaagggatggtgatagggcagcgacaccacgccggtgccaagcttgattcgcttggtgcgctcgccggccgcagccaggaacatctcgggcgaggcgatcatctcccagccggaggaatgatgctcgccgcaccagaactcgtcatagccgagcgcgtccagctgctcgacgaggtccagatcgcgccggaactgcagcatcggatgctccccgatcggatgatgcggggcaaggaaggctccgaacttcaggcgcgccatggggttctctccggctgattttctgtttgttgagccgatgaggctacgtgtctcatggcacgaacgcaatcgcgcgatgtcccgtgcggcggaatgcggtcatgcgtgcagcgtccttacctgcgaggtaatcgcgataccctgtgcgatctgaaatcctgagaacagacaggttccagagccgtgcgccaatgcaccagatcgtcacaaggcaaatcgattcgtcctgccgctggtgggtgctggccatcgtcgtggccgcccagttcatgttcggcgtcgatgccttcgtggtcaacgttgccattcccacaatcgccatcgacctgcacgcgacgtcggcagagatcgagtccgtcgtggcgatctatctgatcgcctatgcaaccctcgtcgtcaccggcggccgcctcggcgacattcacggcaccaagaacctgttcctggcgggcgtgctcggcttcaccctgacctcgctgtggtgcggcctcgcgcaatccggcctcgaactgatcatcgcgcggctggcgcagggcgccaccgcggcgctgatggtgcctcaggtgctggcgatgctgcatctgctgttcactgacgaggcgcgcaatcgcgccttcgccgtttacggcatcgtgctcgggcttgccggcgccgcgggcttcctgctcggtggccttctgctcacggtcgatctcgccggcaccggctggcgctcggtattcttcatcaacgtgccgtgcggcctcgtcatcgcggccgcggcctggcgcatcatgccatcgacatcgcgccgcgccgacacgaagctcgacatcaagggcagcgtggtgctgttcgcgggactgttgtgcctgatcggtccgttgctgttcgggcacgatgtcggctgggcgccctggctctgggcgatgatggccatcggcggcttgattctcattgcgttcctgaagctggagcaggcggtcgcacgcgccggcggcatgccgctgatcgatctcgcgctgctggcggacgccgccttcatgcgcggtctcggcgccgtgttctttttcttcttcgccaatctctcgttctatctggtgatgacgctgttcatgcagcgtggcctgaacatcccgccgctcgcagccggcatggcattcattccgctcgcgattgcattcgtcgcggcttcgcgccacagcggggtgcgggcgcgccatcgcggcaccaaggttctgctcgaaggctgcgcacttcagatcgtaggcctcgcggcgctcgcgatcgtttcggtccatgccgagcagccgacggcgcttgcgctggcgcttaccatgatcatcttcggctatggtcagggtctggtgatggcgccactgtccggggccgtgctttcgaccgtaaaacctggtgccgcaggctcggcctccggcatgtacggcacgacggcgcagatcggaaatgcggccggtgtggccgcaatcggcgcggtgttcttcgcgggcgaagcgctgcaatcagcgcgcgcgggattcctggtatcgctcgccctctttgtgacattcatcatgatctgcgccacgtttctgctgtggactcgccgcgccggagcaagaagttgaggcattgcggttaatacgtgcagattcggcgccatttccgcgcttttcgccgcgattgaccgcgcacggcctttttattttgcagcgcagcaactatctgcttgggctggacgttgaacgtcgcccaccaggaagccgccgtgtcgctagccaagaacatcgatctcttgagacgcctgcccaggctggacggactgcgttttgccgggccaggccgcagcccggattcatccagtccgctgcaagaggtcacggatttcggtgacaatcccggcgccttgcgcatgttcgcgttcgtgccggccgaatggcagaagccgcgcgcgctcgtcgtcgtgctgcatggctgcggacagacggcggccgcttacgacctcggcgcgggctggtcgacgctggcaagacactatggctttgcgctggtgatgccccagcagcagcgcgccaacaacgccaacacctgcttcaactggttcaatcctgaagacaccgcgcgggacagcggcgagccgcgctcgatccgcgagatgatcgcgtacatggtgaaagcgcatcgcatcgaccccaagcgcgtcttcatcaccggcctgtcggccggcggcggcatgacgtcggtgatgctcgcgacctatccggaagtctttgcggccggcgcggtcattgccggactgccctatggcatcgcctccaatctgcgcgaggcgctcgacggcatgttccattcgcccgcgcgtccggcgcgcgagctcggcgacctcgtgcgcagcgcctccgatcatcgggggccctggccgaaggtctcggtctggcacggcagcgccgaccgcaccgtcaatcccggcaatgccaatgagatcgtcaagcaatggctggatttgcacgatctgtccgttgacgcgccgatggcggagacgatcgtcgacggctatccgcgccaggcgtggtgggacagggacggcgagacgctggtcgagtcctatgccatcaccgacatggcgcacggcacgccgcttggccttgccgacaacgatcagcgctacggcgtcgaaggcgcattcctgatcgaggccggcatttcctcatcctaccatatcgcaaagttcttcggcctcaccggctggattgccgacgccgcaaaggcggaagccaaacccgcgacaaagcctgcaaccaagccggcgctgacctccgcgccgcatctcgcccgctcgatccgcaccacgattgccgaagcgccggtcgagccgcagcgcgagaagacaggcggcttggatatcggtcagatcatcacgcgggcgctgacggcagcgggcttgatgaagtagccccgaggtcgccccgaaatgacggcggagttcgagacggccgcgcggtggccgccatcgcgtagcgcttacatctcgccggtgatgaacggattggtcatccgctcctggccgatgctcgagccggcgccgtggccgcagatgaaaccgacatcgtcgccgagcggcagcagcttggtgagaatcgagttgatcagcgtggcgtgactgccgccgggcagatcggtgcggccgaccgagccggcgaacaggacatcgccgacatgggcaaagcgcaaatccttgttgaagaacacgacgctgccgggcgaatgacccgggcaatgcaggatgtcgaactgcaggccgccgatcgacacgctgtcgccctcgtcgagccagcgatcaggcgtgaaatcgcgccctccggtcatgccgaagcgcgctccgctcgcgacgacattgtcgagcaggaacttgtccgcggcatgcggaccttcgatcggcacccccagcgcatcgcgcagctcggccgcgccgccgacatgatcgatatggccgtgggtgagccagatcttctccacggtgacgccggtctgcttgatcgcgtccaggatcttcgggacgtccccgcctggatcgatcaccacggccttcttggaaggctcgtcccagatgatggtgcagttctgctcgaacagcgtcacgggaacgatgatcgcgcccgccttggctttggtgtcgttttgctcggtcatggcctcacaatgccgatttttgccgggccgccaagcaaaagattcggaccgctcttccggaacaaatgtcacagggccgtcccaattggccctgcaatttgaaccggggcgttgctgtggcgttctctcgcgcaaggcggcagatttcgggtggtctatggctcacggcaacgagaattggtggcgcgacggcatcttctatcagatctatccgcgctcgtttcaggactccggcggtgatggcgtcggcgacctcgccggtatcctgcgtaggctgccttacgtgaaatcgttgggcgtcgacgcgatctggctgtcgccgatctttccctcgccgatggccgatttcggctacgacatctccgattatatcggcatcgagccgctgttcggcacgatggccgacttcgacgcgttgctcgcggccgctcatgacaatggcctgaagctgatcctcgacctcgtgccgaaccacacctcggaccaacatccctggtttgtcgaaagccggtcctcgcgcgacaatcccaggcgcgactggtacatctggcgcgatccggcacaaggcggcggcgtgccgaacaactggctgtccgagttcggcggcagtgcgtggcagttcgacgagaccacgggtcagtattactatcatgccttcctcgcccggcagccggacctgaactggcgcaatccggacgtccgcgccgccatctacgacgtgatgcggttctggctggacaagggcgtcgacggttttcgcgtcgacgtgatctggcacctgatcaaggacgccgaattccgcgacaacccgccgaacccgcattacgtcgagggccggccgccgaacgaaagaatcctgacgcagtactcgaccgaccagccggaggtgcacgatgtcatcgccgagatgcggcgtgtcaccgattcctatggcgcgcgcgtcctgatcggcgagatctatctgccgctgcatcgcctcatggcctattacggcaacgatctcaccggcgcgcagatgccgttcaatttcgcgctgctctcgaccttctggagcgcgcgctcgatcgagaagatcatcgaggattacgagaaggcgctgccgcgcggtgcctggccgaactgggtgctcggcaatcatgatcgcccgcgcgtggcgagccgcgtcggtcccgagcaggcccgtgtcgccgcgatgctgctgctgacgctgcgcggcacgccgacactctattatggcgatgagatcggcatgcatcagctcgtgatcgcgcccgaggacgtgcgcgatccattcgagaagaacgtgcccggcatcggtgtcggccgcgacggctgccgcacgccgatgcaatgggattcgtcgaacttcgccggtttttcccaagtgcggccatggctgccgctgccggaggatcatatcagcgagaatgtcgccaatctggaagccgattcgcggtcgattctcaatctctacaagcgcctgatcgcattgcggaagggctgtccaccgctggtcgccggcgattatcatccgatcgccgcgcagggcgatctcctgatctaccgccgcgaggccgaaggtcgcgcggtgatcgtggcactcaatctcggtcctgaaccggtttcggtgaccaccagcgcgatgcgtttcggcagcaggatattgctgtcgacgttcctggatcgcgaagatgagcgaatcgaaggcgtgctggatctgcgcggcaatgagggcgtggtggtggcgccgccaagctagctgtcctgcgcgccgcctggtgcgccatcacgctccagcccgggcgatagggaggatgcgatctccctttaccgagcagtgtgcgcgccgacggaatcggttatcctgcctccatggacaacaccgcccgcaacatctcgctcgtgccgcctccggaccgccgtcaatccgagaccgcgcttgcggtcgcgcgcggcacggcgcggctattgaggtcgctcggcttctcctgtatcagcgaattgccgctgccctcaggccggcgcgccgatctcgtggcgctgaacgagcgcggcgaaatctggatcgtcgagatcaaatcctcggtggaggatctgcgcgccgatcagaaatggcacgaataccgcgcccattgcgaccggctgttcttcgccttcacgcaggatctgccgtgcgagatcttccctgaagacaccggcctgatcatcgccgacgcctatggcgcgcacctgcattgcgaggcgcccgagcacaagctcgctgccgccacgcgcaagcagatgacggtgcgctttgcgatggccgcagccttgcggatcaaccggttggtcgatccgcaaggtcacgcggatttctgggaataggggcgcgctgatcgaagcgcggcgcaatcgggagtcctcgtgatgcgtgaggcgccggtttccaacggtcgcggctacttcctggcgtgcgccgcccggatcggaccgaagggtccgtatgtgtgctgctgctgatcgaatccatcggcgtacggtccgtaaggcgtatcgaccggcttcttcgacaggtctggatagtccttgtcgagaccggcctttctcggacgcggttgagagatcatataggcggccacgtcccacgcctgctcgaccgtgagctgcggattcaggtagtccgtgccgtgcggcatattgaagtgcaagaagttcgccgcggtaatcagccgcgccatgccggcaccgtcattgaaactgtccgggccccagagcggcggcaccatgtagccgagatcgacgctcggcaggctgcggcgtattccggagccgtcctcgttgtgacaggagagacaagcgttcgcatagatcgccttgccacgaacggggtcggccgcccgatcgagctcaggcatcgatccggtgccgagtcctgacaatgccttgccggccggcacgccggacgagaggaacttgatgtaagccacgaaggcctgcatttccggactgtcgagcggcagcgcgcggccattcatgctgcgcgccatgcacgagttcacacgatcctcgatcgtgatctcggcgccgaggcgggcactgtattgcgggaagagctcgaccaatccaaagatcggcaagccgaattttttcgtgccagcttcgagatggcagttgctgcaggcgagattgttgccggcataacgcttggctgggtccggcacctccggcccgatatgggcgtaagtcgccgtgatgaggtcgcgcccgcgccgcacgagccggccatgagcgtcatcaggcagcgcgccgacttccggcaccgtccagaccggcggggaggcttgctgcgcgcgccccgcacccggtgcggctacggcgatgacggcgacggcaatcgcgcgtacggtccagaagcaaagcaatgcaagcagtggcgtggggtgaaccatcgttctctcgagactattcgacgcgtcaggtcggcgcgatgatccgccgcctgaggttaacgtcgggttcaggggcgcacgacgccagcacccggccttgtcgatatggcgcaggggacatcgggccggcacgttcagccgcagaccggcttcaggcgtgttgagcgaggagcgtacgcgccgggagctgcgaagcccggcagctcatcggcctgaagggcaaattcggcctggctgccgatgtccatcgccaaatggccaagccgggccaaagcggcaacgctttgaccccgtcgagcatctccgcctcagccatgaaggctggagatctgcgcttcccagagtgagggtgggattaccgcggcgcgcgcttggccagaatccgctgcagcgtacggcgatgcatgttcagccgccgcgccgtctccgagacgttgcggttgcacatttcatagatgcgctggatgtgctcccaacggacgcggtcggccgacatcgggttgctcggcagctcggatttctccgcattggtcgagagcagtgccgcgaccacgtcgtcggcatccgcaggcttggagagataatcgattgcacccatcttcaccgcggtgacggcggtggcgatgttgccatagccggtcagcacgatcgcgcgggcgtccgggcgcttcttcttcagcgccgagaccacatcaaggccgttgccgtcgccgagccgcaagtccaccacggcgaatgccggcgccgacttgccgatctgcgcaagtccgtccgaaacggtatcgcatgacgtcactgaaaagccgcgggtctccatggcgcgcgacaggcgttccagaaacggcttgtcgtcttccacgatgagcagcgagcggtcggtctgttcgttcagttcggcgatggcgttcaaggtgttgtcctctctccagcgcgttgacatatggcgtcgcgaccgggcggtgccaaggcgacaaatcgtcgatctgacccgttatgcgacgcaaggtcgcgcctatcctattgtttcttcgaggctctcgatagcctcaaaacgctccctgggccacgtgatctggaccaccgcgccgtggtccgggaacgtccggttggtaaacgagaccttggcgccggtgcgctccagcagggtgcgcgcgatgaagacgccgagcccgagcccgcggcgtacgctgccgccgtcatcctgggtgcgccgccgcgacagatagggctcgccgatccggttcagaatatcagggggaataccgggtccgtcgtccgagatcacgagttcgatatgatccttgttccaccaggcgttcacctcgactgtcgtgcgggcgaaatcgaccgcgttctcgacgatgttgccgatcccgtagaggatcgcgggattgcgcgagccgaccggctcggccgcggcggtcaccgcgatccgcaccttgatctcgacgccgaaatcgcggtgcggggccaccacctcctcgatcagctccgacagcttcatgcgatcgaacggcgcgccggtggaggagagctgggtgatcttgctcaagatgtcgcggcagcgctgggtctgttcgcggagcgtcttcagatcggcggcgatgctcgggtccttcaccgtcttttccagctcgcgcgagatcaggaagatcgtcgcgagtggcgtgccgagctcgtgcgcggccgcggcagcaaggccgtcgagctgggtcagatgctgctcgcgcgtcagcaccagctcggtggcagccagcgcgtccacgagcttgcgcgcctcttcggtgacctggaacgagtagaggctggtgacgccgatcgcgagcacgatcgagagccagacgccgacgagatagatcggcggcagcaccagcggatcgtcggaatcccagggcagtgaaaaatggaagaagaacaggatcgaggcacaggcgaccgcgagcacgccgaggccgaacgtaaagcgggccggcagcgcggtggcggagatcagcacgggcgcgaggaacaggaaggagaacgggttctgcaatccgccggtaaagtacaacaggccggccagctccacgatgttcagcgcgagcagcccggccgcctgcatcggctccagccgctgcatgggattggctgcggtctggagcgccaggttgagcgctgccgacagaaagatgatgctgacgcagggaacgatctcgacgttgaactcgagcccctgtgccacgatgaagatcgcagcgagctgccccagcacggccagccagcgcagccgcaggatcgtgtccagccggatattccgctgcgcgtggcggaagtcggaagcggcaatttcggtcatggctgccaatgcggcggtcccttctcgatcacaaacgcgcggctcgcggaaccatccaggattacaagccttgcgctcttcgctgcaatagcagaagaacggcaagcatgacggagaatgacgaggcttcaagcctgccgactgtcgcggatcgcagcccgcctgcggccatcgcgatcgatcacctcgtcaaggtctacaagcagacccgcgccgtcgacgacatctccttctcgcttccgcgcggcagcatcaccggccttctgggcggcaacggcgccggcaagaccacgacgatcgccatgatcatgggcctggtgctgccgacctccggccgcgtgcaggtgctcgggcatccgatgcccgaggacagcgcgtccgtgctggggcggatgaatttcgagagcccctatgtcgacatgccgatgcggctcaccgtgcggcaaaacctcaccgtgttcggcaagctctatgcggtgaagaacctgtccgatcgcatcgccgagcttgccgaggatctcgacctcaccgacttcatcgaccgcgccaacggcaagctctccgccgggcagaagacccgcgttgcgctggcgaaggcgctgatcaaccagcctgagctgctgctcctggacgagccgaccgcttcgctcgaccccgataccgcggactgggtgcgcgcgcatctggagcggtatcgccgggacaacgacgccaccatcctcctcgcctcgcacaacatgctcgaagtcgagcggctttgcgaccgcgtcatcatcatgaagcgcggccgcgtcgaggacgacgatacgccggaggcgatcatggcgcgctacaaccgcaccacgctggaggaggtgtttctggacgtcgctcgcggccgggtgaacggcgcgaaggaggcggcgcggtgagggggagcaaatctccatccgggctgcgggagagtgccatgaccgacacctccctccaccgcggcatctccgtccatcgcatcggcgcgatgatcctgcgctattggtatctgctgctgtcgtcctggccgcggctgctcgaactcttgtactggccggcgctgcaggtcatcacctggggctttctccagctctacatcgccgagaatgccagtttcttcgcgcgcgcaggcggtacgctgatcggcgccgtgatcctctgggacatcctgttccgtggccagctcggcttctccatctccttcctggaggagatgtgggcgcgcaacctcggcaatctcatgatgagtccgctgaagccgatcgagtttctcctgtcgctgatggccatgagcctgatccggctcgcgatcggcgtgattccgatgacgctgcttgcgctgttcctgtttcacttcaacgtctatgccctcggcctgccgctgatcgcgttcttctgcaacctgatcttcacgagctggtcggtcggtatcttcgtctcgggtctcgtgctgcgaaacggcctcggcgccgagagcatcgtctggaccctgatgttcgcgattcttccgctcgcctgcgtctactatccggtcagcgtgctgccggcctggctgcaatacgtcgcctgggcattgccgccgacctatgccttcgagggaatgcgcgcgctcctcatcgagcacaccttccgaaccgatctgatgctggaggcgttggccatcaatgtagtgcttttgggtgcatctttttgggcattccttgcccttttgcgcagcgccagggagcacggctcgctgctggcgggcggcgaataacgtcactttatcgtggattcaggcagatttggctgcttcggctacgtagatgtacggaaccatgcattgacgcaatattacgcattcggcagtatgttgcgatgcgaagaggaatatagcgatgcccattggtgagtttggcggcgcgccgcccctggctgcagaaggcagtccggtcctgacgacgccgatgtactggatgtacgagatggctcatgccgctctcaatccggcacgtgcggtcaccgacgcgaccaagctgttgtttcagaatcccctcaatccctggacgcgcaccgaggtcggcaagtcagttgccgcggcctgcgaattgttcgagcgcaccacgcgccgctatggaaagcctgaatggggcctcaacgataccgaggtcaacggcatccgcgtccccgtcgagatccgctcggtgtgggagaagccgttctgcaagctgctctacttcgatcgcaagttcgcccgtccgttacgcagcccgcagccgcgcgtgctgatcgtggcgccgatgtccggccattatgcgacgctgctgcggggcacggtggaagctttcctgccggcgcatgaggtctacatcaccgactgggccgatgcccgcatggtgcccttgagcgaaggccgcttcgatctcgacgactacatcgactacgtgatcgagatgctgcacgtcctcggcggcaacacccatgtgatggcggtgtgccagccttccgtgcccgtcgtcgcggccgtctcgatcatggaagcgcggcgcgatccgttcgtgccgacctcgatgacgctgatgggcggcccgatcgacacccgccgcaatccgaccgcggtgaacaatctcgcccaggagcgcggcatcgactggttccgaaatcacgtcatcaccaaggtgccgttcccgcatccgggcatgatgcgcgatgtctatccgggattcctgcagctcaacggcttcatcagcatgaatctcgaccggcacatggatgcccacaagcagctgtttgccaatctggtgaagggtgacggcgatctcgtcgacaagcatcgcgacttctacgacgaatatctcgcggtgatggatctctcggccgagtattacctgcagaccgtggacacagttttcgtgaagcactcgttgccgaagggcgagatgactcatcgcggaaccctcgtcgatccttccaaggtcaagcgcgtcgcgttgatgacggtcgaaggcgagaacgacgacatctccggtcttggtcagaccgaagcgacgcacacattgtgcaccgcgattcccgatcatcgccgcgttcattacgtccagaagggcgtcggacattacggcgtgttcaacggctcgcgcttcaagtcggagatcgtgccccgcatccatgacttcatggtttcggcggcgaatccgagctcgttgcaggccctcgcggccgaataagcagcaatttcggctttcccgccgaaatttgggtcgctgccggaggctccggcagggaaagattgcccctagattcgcggtatttaggtagctttataggagtgagtcttccctcaccccttgggggtgccgcatgcgtccagcgagggcgaaaaaagccggttccaaccccagtctgtagggtctcccggacgcctgaccgctgtatattgggcaaatgatttgtttttgcgccgagcgctttccatggcggcggttatggcagaatccgggcgttctcctgccccccggactgacagacatggccacccgcgcacttctttatcgtcggccccacgaaccgaagaccctcgtcatcacccacggatcgcaattctttgccatccgattgcgccggcaccgccgcgcgcgccgttacacgctccggattcatccaagtgaccgcgaggccatcctcacgatgcccccgcgcggcaccttggccgaggcaaaggactttgcgcaacggcacggcgcgtggatcgcggcccgtctcggccgcttgccgaaggcagcaccatttcaaccgggcacggtgataccgctgcgcggcacgccgcatcgcattgttcatcgcgccggccagcgcggcacggtatggaccgagacgcgtgacagcggtgaacgcatcctctgcgtcgccggcggcctcgagcatgtcgaccgccgcgtcagcgacttcctcaagcgcgaggcgcgccgcgacctgcagcgctcggccgaagcctacgccgccgaactcggcgttcgcgtcaagcggctttcgatccgcgaccagtccagccgctggggctcctgtacctctgccggctcgctgtcgttctcctggcgtctgatcctcgcaccgcccttcgtgctcgactatctcgccgcccacgaggtcgcccatctcgtcgagatgaaccactcggcacggttctggcgcgtgtgcggcaagatctgcccgtcgatggagcgcgccaagaagtggctcgacacgtatgggaacgatctgcaccgctacggtgtcgaggattagggccaggccgacggcgagatctggcggcgcgaatgacatcggactgacggcgcgaggttcacctgcagtgtggtctgcgcaagctgttgatcttgctagcgctgcctactgtgcatggggttgtttttcgcacccgccgccgtgaggtacccagaacctcagtgcgagctatcggtttccgccgaacagccgatccatcagccacccgtcgagccctgccgccggttcgggccgcacattcgcgcgcgtcgggggcggcggacgatagccgccgttgctggacggagctggtccgggcgcggccggcgtcggcggcgacacctgcgaggccgcgtgcgcgaggttcgacaggccccagccaccgggcacgctcggcaatgccgccacgggcacgccctcatgcgccgccttcatgaagcgcgaccagacttcgaccggcaggccgccgccggtcgctttcttggtcggcgagttgtcgtcgttgccgagccagacgcccgtgacgagatttgcagtgtagccgatgaaccaggcgtcgcgataatcctgactggtgccggtcttgccggccgccggccagccggggatctcggccttcttggcggtgcctgatatcagcgtctcccgcatcatcgcgttcatcatgccgacatggcgggtgtcgatgacctggttgcgctcctccggctggcgcatgtagagcagcttgccgctgagcgtcctgatcctcgtcacgacatgcggcgccaccgcgaggccgccattggcgaacggcgcgtaggcgccgaccagctcgaccatggagacttcggacgttccaagcgcgatcgaggcgttcggctcgagcttggaggagatgccgagccggtgcgcggtgcgcaccacattcttcggcccgacctcgagcccgagacggatcgcgacggtgttgagcgacatcgccagcgcctgcgtcagcgtcaccgctccgaaatattcgtgggtgtagttctcgggtttccagcccttgacctcgatgggagcgtcctggcggacggtgtcgggcgtcagcccctgttcgagcgcggtcagatagacgaacggcttgaacgaggagccgggctgccgcttggcggtgaccgcgcggttgtactggctgtctgaatagtttcgcccgcccaccatggcgcgcactgcgccatcgggcgtcatcgccaccagtgcgccctggctgacattgaacttcacgctcttggccgcgagctcgtcgatgatcgcggcttccgcaacgctctgcagcttcggatcaatcgtggtctcgaccttgatgctctcgtcgatctggccgaccagatcgtccagcacctcgccgatccagtccgcgacgtagttcaccgtgccggcgccgacgggcttcacgttgtaggaggggtggccgatcgaggccttcgcctgcgcgtcggtgatgaactgcgcatccgccatcgcagcgagcacgatctgcgcccgcgcttcggcaccttccgggttgcggttcggcgcaaggcgggacggcgacttgacgaggccggccagcatcgcggcctcggcaatggtgacgttcttggccgacttgccgaaatatttctgcgcggccgcttcgacgccgtaggcgccggagccgaaatagacgcggttgagatagagctccagaatctcgttcttggaatgcttgcgctccagccagatcgcgagctccacctcctgcagcttgcgccgcatggtgcgttcctgggtcaggaacagattcttggcgagctgctgcgtcagcgtcgagccgccttgcgagacgccgcgatggagcacgttggtgaccagcgcgcgcaggatgccgacgggatcgatgccgaaatgcgagtagaagcggcggtcctcgatggcgatgaacgccttcggcaggtacggcggcaaatccttcagcgcgacattggcaccggccatctcgccccgctgcgccaggatgctgccgtccatcccgacgatctggatcgtcggcgggcgcttggggatttccagcgactggatcggcggcagatgggcgccgacatagatcacgacgccgatcactgcgatgacgccccacaggctcagcaccgcgccccaatagaccagtcggccgaggccgaagcctccacgcgacttcgtgcggcgcttggcgccgctgcgaccggcgggtgccttgcgctcgcgcggcggctcgttgccggcatcgtcgctcttgcgcttggcggatgtcttggaagatttcttcggcttgtcgtcaccgccgggaatgcggtcggccggagtgaggcgcagatcggcgagcgcggcgggcaagccgaacagcggctccttccgcgcacccttcttctttccccacgccatacgcaatacgcccggtcagctcgccccgccgcacgctagcggtcgctgtttaaggcccggttaccccggaccttaacgcgcaattaggaggtgcggcattcacccgccgcagttccgcttgaagcgccgcagcgctaggatcgccggcacaaagcagacttggaacctcacgaagggagcacaaatgggccacatcgacccgaccaaggagatcttcgcgcaattccgggagaacgatcgccccggcccgatccacatgctcaatcttgtgcgcttgcggaaagaagcggcctaccccgatggccgcaaggccagcggcgcggaagcctatgcggcctatggccgcgagagcggcccggtgttcgaacgccttggcgggcgaatcgtctggcagggaaaattcgagttgatgctgatcggcccccaggaggaacgctgggaccattgcttcatcgccgaatatccgagcgtcgctgccttcgtcgagatgatccgtgaccccgtctaccgcgaggcggtgaagcatcgccaggccgcggtggaggattcccggctgatcaggcacgctgtgctgccggtagggaagaactttggggagataccgaagtagacaacgtcattccggggcgacgcgaaggcatcgaccccggaatcgcggggttccgggtctggcgcttgcgcgccatcccggaatgatcgcgaagcctagcccgacgggcccgagtcctcgatgatcggtccgaacagctcccagcgttcgccgttgaacttcatcatctgcatctgcttgttgacgcggtagtcgttggggccggtgttgatcttgatacccggcagcgcaaggctcggcgtgaagcccttgatgttggcggcctgcttcatgacgttctcgcgcgtcaggtcgtcgccgcattgcttgagcacctgcaccagcagttctgccaccgaataggcgtaggtgttgatggtgttgagcttgtctccttcggggaagtacttgtccatgaaggcgaagaaggccttcacgcctggatcgtccttccattggggatcgcccgggtccttgccgtagttcgtcgagatgatgcctttggaaatgtcgaggccggccggcttcagcgtcgccgacaccgggctcgcgttgatgtcgaggatatgcaccggggtccagccgaggtcggcgagcttcttgatggcctgcgccgcgaacttgggcgttgaggcgtcatagaacaggtcgacgcccatcgacttcagcttgaccacctgggagtcgacggtcggatcggtcacctcataggacacctcgccgacgatcatgttggccttgtcgccaaggccgctcttgaggccggcgagatagtcgcggcccatgtcgtcgttctggtagagcacgccgatcttg

SEQ ID NO: 119 - DNA, 5343 bp, Bradyrhizobium colbertium
gcgatgcggatcaagcacaggcttgcggtggcctcttgtcgggcccaaccgacccggtcgcccgctgccgctgtgaccacttcgcaaccgacgagactgcaacgccaaaacgctccgccacggaccggcagctctcgccggccaatatcgacgccaccacacgctcgcgaagatccagggaaagaggttgggtcatgcgatgactggcctccaatccagtcagcatcttgaatcacaatccgccaaaaaccggaatcccctccgattcaatttaaagatgaaacgctctaagtgtacacgtctatctcgagtctttgcgcgcctagctcgttcgtcagcctacgtaagctgaaggcaccaaacaaatacgctcgcgcgcagcctgctggcatgggcgctcgatacgatacgcctcgtgtgagagcggattttcgggtttactagagcggccgacagcctctttatccgcagaagtgagctccactaggccgccgtgccttagagcacgctggacgtctgggagaccatgaactactcgtgccgtgcacgtccgatgggttgccgttcaactctcaaatgtcgtgaggacccgactgcagggttctccacaatatccttgctccaagtggcgtgaattccggcattagccttgagcaccgccactctgtttccgcgctggatcgtcgcttgcatgcgcgtcaatcgcattcctatagttttctgccattgatagcagagccaatcgcgactctgtatgttcaatcttgtcggcccattcatgacacgttcgcagcatccgcttccatccctcgatctcacgtcgccgccgtcgaattgcgtcgcgcgccaccactgtgcgttcgatcttctgacggagccggtaaaaacaagtaaacatctgatgctcttgaatggctacaagatactgcgcgcggctggcctcgcggcaattctacgttctcgcctgcacgatcattcggacaccccgctcagaacgttagccttaacgttcgtaattcgggcgaaatggataaattttctaggagtggccctttgaccaacgcccccccatgccaacaaatcaacttggtgagtggtgttgaggaaagcataggccagatagcatccgccaatgctagacgcgtcggcgatttctatcaaatcgcagggaatcaggattggaccggtctcgatctggaatagcggggtcccattagctcgactgatgatgtgattgattggaaattccaagttccataactttccctgtttatcgcggacgttcagtcgggccgacagaggccataggttcgctatgatcctagagttcagggctgcaagatctactgactttgctgcacgtcgcggcgctgaaatctcgaatgaggagaatgtagcggtattttcggcttcgctatccttctttcctgcctcttcgtcgtctctcgcgatcgcgtgtctgtcgtgcctggcaataagttggaacgaatataccgggtccaaaggcagtcgatcagagccaaaaaccttcccggccataacagcaggcgcgagatagatgcaatcagaagactcttggctgtgggcaatcgcgacgatgcgccagcttccatcgatcccggttcttgttgtccaagaaatccgcgatcgcgcgaaatcaacagccaccattcccgaaactcccgattcgccgcggcacaccgacaagccagcggctactccggctgtgacaagcaatgcctcacggcgagagatgtcaatcacagaatggctccagatccatgtcagctgaaaacccacgtcgtcgcaccggacaaattgttcgccgacctcaaacccgagcccctcatcgctccgatcattctgcaggtcccgcctaaaccaaccaagaaaggcagatacctcaccttgatggttgcaccattcaagctcagcaatttccaacctcgatcaagttttcgccgcttgttccagcatcactcgccgccgattcagttgagcgctcccagagtgtgaattaggtcgctggtctctttgacctcgtctactgcggcaagcagcgtccggtatgagcatgatagtcatacccctgcggacaaaccgcagatcctgcccgattccatcgaggcgggagcccccgtccatattcatgctgatagtaccccccccgatacccgcgtcgaccataatcccgggcaatgcagagaccttctgaggcgtagtagtcaaacccttccgggcagactgcagagccctggtagttccatcggggcggcacagcttgctgtgcccaggcgaccgatgctgctggtccgacgagcacaccaaaaacagcggcgacaacaattctcacatgagtcctcccactgatcactccgaccgcctgcctggactaacaaacggtatccacaaagcttcgaaacgcggtaaccacttcctcctgctgctcgtggctaatctcggcaaacaaggggagcgagaggatagtattctgatcagcatatgcattgggaaactgctctggcctgtgctcaaggtagcgataacaaggcagaagcgggagggcggttggatagttgatgacagtctcgatacctcgtcgatttaggtgatttgctagtgcgccccgattacgatgcttaatcgtgtagagatgatagacatgcgtccgccctgcagcgactttgggcgtttgcacctgctccattttatgaagcgcgtcatcgtaaaagttcgccgcggcttgtcgtgctcttgtccagtcggcgagatgcggcagtttcgtagacagaatcgctgcttgaagaccgtccaatcggctgttgatgccctcgatgtgatgctgatgcttcaccaatccgccgtggcgggcgagcatggcgatgtgctccgcaaggattgtatcattggtgacgactgcccctgcgtcgcccatagcacccaagttctttccagggtaaaacgagaaggtagcagccgtcccgaacgttccaaccggctggtccttatagcgcgcaaggtgcgcttgggcgcagtcctcgatgacccaaagaccgtgcttgcgggcgacttccaggatcgcatccatgtctgcgggttgaccgtagaggtgcaccggaatgataccgacggtacgcggcgtgatcgccgcctcgaccgccgcggggtcgatcgtgaaagtctcgccgtcggtgtcgcagaacacgactcgggcgccggcgtgcgtgatcatcgcggaggtcgagatccaggaatgcgccgccgtaatgacctcgtcccccgaccttaccttaagcgctctcatcgcaaggtagagcgcatcggtgccgtttgcgcaggacacgcaatgcttgacactcgccgcagccgcgaactcccgttcgaaggcctcgacatatggtccacggatgaaggcgctgtcgcgaatgaccgcggcgatcgcactgtcaatttcgcctttgatcgactggtactggagactgagatccgcaaatggcaccggcatgatgggagtccttagctgctgctcttgaggaggcgagcgggatttccagcataggtcccaggcgccgctaaatctttcgtgaccactgagccagctccgattacaacgtcgtcagcgattgagaccggcatgatcgtggagttcgagcctatcgaaacccggttgccgatttttgtcgcgcgccacaattcgcgacgtcctcgcgccggcccgccggttgaaaacgtatcgtttacgaacatgacgccatgcccgacgaagcaatcttctccaatcgagacaagttcgcaaatgaaggcatgcgactgaacgcgtgttcgcgctccgataacaacattggcctggatctcggtgaaagggccaacgaagcagtcatcggcaatctcgcagccatagagattgcaaggctcaaccatcttgacgcgttgaccgaacttgacgtcgcgcacgccggactggtgtatctcaggctttccgttcacgggagcacacctagcttgctacgtcgcggctcgaatcgaagcgcgacttcctgccccgtctcgatcgattcgtagagcgcggagatcaattcgaggctcttgcggccctgcaggccatcgaccagcgctgcacgctgatgcaaaaggcagtcgaccacatgctgataataggcttggtgtccgaagccgtagacgttgggtggattgaccgagaacttctcgacgacgagcttgtcgcttggcaacgtatcgacaaaactccaatgcctaatttggttgactgcgaagcccgcgatttccacgacgcctttctcaccgagaatcgaaagggagccttcgagatccctcggccgcactgcggtggtcgcttcaatgattcctagcgcgccgttgcgaaatttaagggtagcaacagccgtatcttcggtttcgaccttcactagcgcggttgttgctcgggcatgaacgctgaccacatcgccgaagaaccattccagcatgtcaatgtgatgactggcttggttggttagcactccgccatcatatgcccaggtgccgcgccaagtgtcctgatcgtaataggcttggtcccggcaccaccgaaccctgaccgtgccgaggacgagccggccgaaccttccggcctcgaacgcctcgcgggccttgatgacgggaacgttgaaacgattctgcttcacgacgaaaagcttcaccccggcctcgtcgcaggcgcggatcatgtcatcagcatcctgcagccgaagcgccatcggcttctcgacgacgacatgctttcccgcgcgtgcgcatgctatcgcgtgctgcgcatgcatcccgctgggcgtcaagacagccacggcgtccatgtccttgcgcgcaagaaacttgtctatatcatcgtaggcatcaacaccgaatttggtagcgagcgcgtcggcccgaggcttcaagacgtcgcagacggcgaccagccttgctctgtcaatgtgattgccaccaagtaggtcagaatgccgcctcgaaatgcgcccacaccccagtaggccaaacctgatcacgtccgtctccttgggacatcgtgatcctgcggaccaccgaagcgcactctatatttcccaacgggatctaaaatcaagattttgagacccaatctccggcgccgcctctagaagctaaacaaagatttcatttaagcactaagacaacctttcgacaagacaaaattgccctgcgattggctggatcgccagccttttgatcaacccggctcggagatgccctgaaagatgtcacccttgtgaaccgctcataagtgatcgttcgccagccgcggttgacccgaattcgggcaccgca

SEQ ID NO: 120 - DNA, 11158 bp, Bradyrhizobium colbertium
gggccggagctgtcgaagaacaggatattggtggggatgccagtgtagggcgcgaacacgccattgggcagccgcacgatggtatgaagattgaactccttgaggagttcttctttgatgcgggcacaaacaccgtcgccgaacagcgtgccattgggcacgacgacggcagcgcgtgcggggcgaccgacagaagacggctggcgtttcagcttgcgcatgatgagctgaaggaacagcagcgcggtttccgccgtctgacgatcttcggggaagttgccttgaatgcctttttcctcctccccgccgaacggcgggttggtgacgatcacatcgaagcgttccttctcgccaatttcggagagcttaaagcgcagggcattgccgggatcgatctgcggcgcatccagtccgtgcaggagcaggttcatttggcacagcaaatagggcagggacttgggttcgcagccgatgatggtgtcggtttgcagacgcttgcggtcggcgacggtcttcacctgtttctcaaggtaattgtacgcttccaccagaaatccgcccgtgccgctggccgggtcaaggacggtctcaccaaggcgcggatcgatgacttccaccatgaagcgcacgacggagcgcggcgtgtagaactcgccggaatcacccgccgcgtcgcgcatttcgcggagcatggattcgtaaagcgcgccgagggtgtgaagctcgtccgatgatgtgaagtggatcccgccaaccttgttgatgacgtcgcgcagcagatagccgctcttcatgcggttatcgacgcccttgaacacagtggcgatcacgtcacggcggttgtcgccgttggaactggaaagcgcccgcaagtaagcgaacagcccggggcctttctggccgtcggcgcgcacggcttcgtcggaattgatgaaggaaagcagttcatcgcccgtgatgccctgcggatcggcagcccaatcgcgccagcgatacggggcttcaatggccgccttgaacttcttgccggataacgcgctttcctcctcgcgctgctgctcaaggtcgtcgaggaatttgaggaacatgatccatgtcagcagcggcagacggtcgagatcgccgttcagccccttgtctttgcgcatgatatcgcgcgcggacttcagaaggctcccgagcatctgggaagttgtcatcggtgcggcgtccgcgccgttcttcttcttagttcgagccatagagcaatccttgcaagtcgtttacggcccggcgaagctcatcggggccgccgaacagcttgatgatttcggcaggttggccgtgggttgagatcggtggaaccttgagcacgtccggcaggacaaactgtgcgtcgccgtgttccgcatatttttccagaagctcgtccaatacctgacgcgcttcaggagagaacttctcgaagtagtccttgcgctcggccttgaggcgctgcgcccgctcacgccgggtacgaagaggcgcattgaaagcgagatagcaaagcaggtcgaaggggtcggcgtcggtttggcctgtctcttcggccagcacgtcaaagtcaatgccgcgctcgcccagcgcggtgatgatctcgccgcgctggtcagcgtccgcccaacgcttgcgaagctcggcggaagttggcgcaagcgaacgaacgctttcggcagcatagtcagtgtatttgacgacgcgaagctgcctgccgttcggatcaagctcgtgtaccaaatgggccacgacttcgacctggcctccgtcgaagtaaaacttccgcggctcgccggtcggcggttcgatcacgccggtgtcgccttcctccggcgtggcaggctccggttcctgcccttcggggagcgtctccgtcgtcgaggtgatttctcccgcgtcgtttacttcttcttccgtgatccgggccggatcgccgtcgaagtccggatctgcgaacatgcgggtcgcggaaccagtgtagtcgaggatgttgaaccagagcttaccgtaatcatcacgcaggcgtgtcccgcgtccgatgatctgcttaaattcgctcatcgatccgacaacacgagccagaacgacattcttgcacgttggcgcatcaacgccggtcgtcagcaactgcgacgacgtgagtatagtcggtgtcttggtttcgaggtcttggaatttcgataggtggccgcgtccgattgcaccctcgtcggcggtgacgcgcgccacataatcgggatactgcgccacaaggtcggcattgaggttgaccagagcctgccgcatttccgaggcgtgctcttgatcgacgcagaacacgatggtcttagcaaagcggtcggtctttttgagaaaatcggtcaagtgatgggcgatagcctgcgtgcgggcgcgcaaggcgatggtccgctcgaagtccttggtctggtattcatcatcgggaatcgcgcggccaaagcgatcaacctcgtccttactcggtcgccatccagccgcgtcccattgagtgatgacgcgatgcactcggtagggcgcgaggaagccatcgtcgatgccctggcgcaggctgtactcgtaaatcgggttgccgaagtagaggtaggtgtcgcgattgtcctcacgcagcggcgtcgccgtcatgccaagctggtaggcgggcttgaagtgctcaaggatggcgcgccacgagctatcgtcccgtgcgctaccccgatgacattcatcgacgatgatgaggtcgaagaaatctggcggataattccggaagagtcctgcgcgacgttcgtcctccgccagcgcctgatagatagcgaaatacatttcccggcttttgacgatctcgccggattcgatcttgtggcgcgcgtccccgaagggggtgaaggtcttgtccttcgggtcgtcaatgaggatgttgcgatccgcgaggaacaggatgcgcggcttgcgatgctccccggtactattccagcggcttgaccagagcttccagcaaatctggaaagcgacgatggtcttgcccgtcccagtcgccattgtgagaagcaagcgttgctttccagcaaggatggactcgatcgcccggttgatggcgatctgctggtagtatcggggcggtttgccgccgactgtgttgtaaggggcgatcagatgatcgacgcgctcgggcgtattgatcccgctgcccaactgatagcgccgccagaggtctccaggcgaggggaagtcagcaacgagcgtttctgtcccctggaaataatcgatctcgattatctcggtgccattggtggcgtaggcatacttgaggccgagaatctccgcgtagctccgtgcctgctgcacggcgtcggttgcggatttgtagctggccttggcctcgaccacggcaagcggaaaatcccgcgcgtagcgcagcagatagtccacccgtttgggcggcttgcggacaaagccccttcccaccggaattacacgaccatccgtgatggtgcgctgctcggcgatagagtgcggctcgtcgtcccagccggcggactgaagtttggggacgacgaattttcggcaagtgtcggcttcgttcgtcatagtctggcggcccccaggatgatcggaaactcccggcgcgccgccgtaagctcgttggccgcttgaaaagtcgggcggagagtcgatgatcacagcggtgtatttacacagagaaagattgggagatagcaatgttttctaatacttaggcaagcctcaatgtacggagccaaggtcccgggcaaatgctgtctcgccgaacaatgaactgttgcagcgcggcaagcgtctggatcgaaggataggcgaatcttcgaaggccctgtcaagcaaccgctcgtttcttacttgcttgccatattgactcctaccataagttgcgctgctatcgacgcttttctgggggatacgcatgggcagcagcggctctggccggattagtgactatcccggttcatcaggcaaaggttcggtcgaatcgacaggtggcggtagcggcagcggcggtggatcagaccgatgtgcccaagccttcgcagtgtccctggaggatattgaacactgcgatttccacaaaacaactggcgcagtgcccgcacccggccaacaactgcgaatagctctgaagaagcgggtcgttgcggaaaccgacgcgggtgtaacggtcggcaatctgccaacaacccttaattatctagccggttgtctaaaggatggctggacatataccggtacgatcacgtcctctaatgcatcgggtgccgtcgccaaagtattggccgactttgcgccttcctcgcacccatgagtgcgaaagtacctttgcttatcggcgaagtcttcgttgacttcacgatcaccccgcccggatcggagaacaaattgcgccttggcggcgttgcccatgcagctcgcggtttttgggccttaggacaacctttccgcgccgccattgtctcgccgagctatttggaaggcttggttcgcgattacttcgcgacgctcggatgtgtcgagctaataatcctgggcatagtaacgggagctcccaacgtcacattgattttcgacgcaatcgaggtcgccgaccagggctacgatacgccgctacgggacgaaaaggctgtccagcttatcgacgtctcgcagaagttcgagcaggcggaagaggtgctgatatttccgggcacattctgcttgtcagatgtgtgcgcgatgttaccagctactgctcgcttacacatcgatatcgcttataacgttgagacgccgatggcactcgccggaatcggcaggccaattgagactatcctcctttcaacctcgtcgccgctgtttgccaagatcaaagaccaaaccgtgactggcattgctacggcttttgcgggatgtaagccgagatacgtaatactcaagcaaaatcgaggtggcagcgaattgctggataactcgaaggcctcccaatccatcgagacgcttcctgcacaacttggaacaacaattaactcggtgggggtcggagatgtcttcgcagccgtattcttaactgcgttgccaagcggtgcagcaactgctggctggcgggcaacctacgctgctgccgcctattctcaaaccacctatcccgacattttcaaaaagtacgtcgaacgcgatcaacgtctctcattacaggagatgacgtcacttggaggcacatttcttccgtggaacatgcgaccgcaagcgcagatctattttgctgcgcccgactttgcgaacgccgatcgtgcggctatcgataaggctctaaaagcgctagcgtaccacaacttctcgcctcggcgacccgttgtagagaatggtgagcttccgccaaactcaaacgccgctactttgcgggccatttatgagaaggattgcgagcttcttaagaagtgcgcacttgtgtttgctgtgccaactgaacgcgaccccggtacccttgttgaaatcggactcgctattgaggcgggcattcctgtcgtgacatatgacccaagcagaaaaaacaacaatacgatggtgatcgcaggctcttcattctattcgtccgacctcgatgcctgtctcaacgcagtgtttcaactgctcagccaaagaagaggtgaggcttgatgagcgcattgcttttgtgttccggtgggcttgattccacgacggtcggctattggttggttgagaagcgaatctcgtttcaaccggtgttcctcgactacgggcaacactgcgtcgagaaagaatgggagacggtgcaagaagtactgccggccacggaccttgcatcgcccgtcaagcgaatcgacatctcaagcatctaccaggactcaacgtccagattgatcgctgagccggacctatggtcggagcacgtcgaggacgatgagctctatatcccttatcgaaccctgctgttcttctctataggcgcctgcatcgctcaaacgcgcggcctcgacaccgtctattcgggctttatcaacagcaatcacgccaaagaattggattgttccgctacttttcttaacggtttagactcgctttcccgtaatcttggacccatcagattcgagttgccgtttcgagattggagcaaggccgacgtcgtcaggcttgcaagcgaattgaaagtccctatcggcagaacatattcatgtcagctcttcagtgacaccccttgcggggcatgtcccaactgcgttgagcgactcacggcaattgagtctctatacacatgactgctcccaaacctgaacgcgaagttctcagtgcgctgagttccgcgcgtctcgtcgcgcaactagcccaagagaagggcgtgatcgggcgtaacccgtcatgtcgcaagcctctgcaccatgttggcgccgtcctggcggacgcggctcttcaagcgggtctcaactacagaaccgtcgtgaaggtacggatcgataggatcgtccaggagtttcccgaggcttcgactttgtccggtatgttcaatgtgattagctccattggggctgccgagttcctgcgttggcagcaccccaccaaggtgtcgcgctttgtttgcttgggggaattgctgcgcagcgaaggcgtcaatgattttcatcagctgcgacgatggttacaacatccaccatgccggggtaagctacttgcgattcacggggtgggtccgaagactgcggactatctctgcagcttggtagggttggattttatcgcagtcgatcggcatatcagagcgtttgctaacgatgccggcgtgaagtcggaagactacgattttctgaagctcgtcgtttcctatgcagcagacctcattggtgtttctcggcgacattttgatgcggcgatttggacttatgtatctagtcagaagggcctacaagcgaagactgctttggcgctgccattggctgcttccatcgcggtcgcataagggcgcgcgccagagcataccgtgacaaaaaagtatcttcagcattttcctaagcccattttggaggatttcgtcagaggccgctggttaccgatcatcggtgccggtatgtcactgaacgcaatcttgcctccatcggcgaagatgccgctttggtccgagcttggcaaactatttgccgacgagcttcgggattattctccgaacagcgtcttggacggcatctcggcttatgagcatgaatacgatcgcgcacggcttgttgaacggctagtcgaatttctgcatctcgacgcagctcggccaggtccagcccatcgggagttttgtactcttccgtttgacgtcgtctgtacaacaaatttcgattttctactggagaaggcctacgatattgagcgtcaggataagcgaacagttcatcccgtagtcgacgaagatcaactgtccatcaacgtcggcacctcggggacactgctgcttaagctgcatggggacacacgtcatcctaaacggcttgttgtcaccgaggccgactacgacgctttcctgactgactatcccttaatggcaacgttccttgcgaatttgctgataaccaaaacggcggtccttatcggctacagcttagacgaccccgatttccgccaaatctggcaggttgtgacgactcggctcggcaaatccaggcgcacggcatatgcgattttggtcggtgccaagccgggtgatatcgcgcgttacgagcgtcgaggcgtaaaggtcgtcaatctgccgggtacacgcaatagctacggtactgttctcgccgaaacgttcgcggaattgcgcgaataccgtcgtgaacatgccggacctacgttgaagcccactgaagaaaaaccgcttgagcagctgttgctgccacggagtgccatgacgcggctttgcttgtttgcgacgccgctggacgtgttgccattttatcgggaacacattttcccgttagcggaagaagcaggctttgttccggtaaccgctgcggacgtagttgatctagctgagagcgtaagcgccaagatcgatactctaatcgaccgatccgctgtagtggttgttgatgcaacgtcgaccgcgactcagatcgagctggggctcgcgctctcgcgtttgaggcgggagtccgagcggctactgttcgacgtgatcatcgtagtaagcgatttgtcccaactgccgacgccctggcccttcgtgtggatcaatcgattgagcgcgatctacgatgataccgatttcgttgaagaaatcggcaagcgcttaatcgcggctgggtaaagcctgggcttagcgcaacggcgagagccgcaacgcttattcttagccaatgagttccgcgccgccgtgatttcggcaatggcacttttggagatcacgttgcggcagcggctagaaattcctccacgcgatcgagtgcgtcggcctatgtcgatgcgccaacttctcgattatgcgcgcgaacggcaactcattgatgatccggagacaattttggaatggaacaggattcgcaatgatgctgtgcacggaggcaggccggtgacacgagcccaggcgaaaattatcgtcgaaggcgttgaacgaatcgtcgacagggggtgaagagattcgttcttgatgatgattggctatgcgcaagccaacttcccacattacgcgttacttactttcgcggccagtgctggtgaccgttagcgaatccggccgggaggtggatcgcagaaagcgggttttcgtagcggccagggcggaatttggtgcgctcaaccacgatttctcgttcttccagcttaggttcgggatgatagccaagcgctcgatcgaaagtgcgcgggggccgaataaatccgccatcggcatccttctgcgcttcggtgacatggccgtcgtgagcgacccaacacaggcgcttctcgcgccgcacactcgcttggcggtccgggtgcttgcggtgcacggcatccacgccgacgacgccgtcgatatccggccggcggcggacaatttcattgaccgcgctcgtttcgtcatgaattgcttccaaccgcgagaggatgttgccgatcacggcggcatgatcgtcataggcccgaagcaactcggcagcctcgacttccacggcatggcgcgcggcctccacacggtcgcgcaaacgatgttcgctagcaatacgttctgcctcggcttcggccgcgagcgcttcggcgtgcgccttttcaagatcgtcgaggcgcgcggcggcgcgatcggcagcgcgccggtgaagttcatattctgcttcggccttctgatgggcagcatcatccatcaagccgagaccggccagtgctgcgccgcgcttggtaagagcagcgtcatgctcggcgcgcgccttctcgatttcggcagcgatattggtggaagtaatcggcttcttgccgaagagggacttcagaatgctcatagtgcttgggctcaaggggttaaatcaacgccgccaatagtccgcgacggcttccgcgccggggtctcgcggtgctacggtcgatgctttcggggcaggcttcagagcggacttcggtgcactggcagcgaatgcttcatgagcgccgagccagcggtgataggcgacatgctcgcggctctcggcgaacatcagattgtgcgcgattccgtgccggacgttgaaacgctccgccgcaagctgccgctgagccgttgcgtaatctgcggacgccgcattgaggtcggcgagaagcttggcgcggctcattgggcatctccgccggctgcaatccaggtttgaagctgttcggccggataagcaggccggtcgccgatcaacagaaacggggggccatcgccacgcttggcgaggttgcggagggtcttcgcgcaacggccgacccgctttgcggcctgggtgcgcgagagatacactttagacatgatgtcccatttggaggtggccggcgcatctgactatcaaacgcaccggcctcggtttcacccattagttggtgtggaggagcatcaactaacggaccaagtatgagaaagatcgaaaccgggggcgaggctagtttggtcgccccttaagtcgccgaagcttcactgccgagcgactgcttcacattgtcgttggcggggatgcgagtaaggcgagcatcgtgctcggccagcacggccgcgcgcttttccgctcgcatgcggagaagcttttgttcgactccaatatcgatcagcgcgctaaaagtttggggaatgctcattcgcatcttgagggcgagcgcagtgagttcacccgcgagttcgggatggggcagtacttcaagcgtgggaacggggacaaggccgtacccgagagtcgctaacacagcctcaaccgactccaagcccggccgattcttctttctccacgctttcagcgtggcatgctgcacgccggaacgttcggccacgtcaaggtaacgcagcttttgccgcgccatttcggcgaagacgagcttcacatgcggacccaccctgtcgggcatcgtgaccgtgcgcggattcttgcgacgcattcggttcaagcgcgcaacgggcgcagcgcggaaatcgggcggatacagcggggtggtagtgggcatcgggtcatcctgaaggcgattgaactgccttcaccgtcggacaatgagctattccgctacagcccaatccagtagccgctgcgaacggccttggtttggaggcagacgcgcattcgagaacagaaagtcacttttgaaattttatagctagcctagtcgggcggttgcacgtcacccacataatgggggcccttccgggaggacccaaacgactagtcgaaagcttgcgcggtccaatgttctcttgtcatcaactgccggccatcgatcatactgcttgagacgatagatagcagtcgcggtgctatgctgcgctggtgaaaactggtagtcggctcagcctgaggtcgtcgtcagtttggcatgggcacttttttagtccttcgagcgcgatctgaagaccgtctttagctcagtgctgggaagattgctgccggtaacgcaaagcgcggccgcccggtttgccctaccatcaggcctgctaaccgtatccgtccggtgaaggccgccttgccga

SEQ ID NO: 121 - DNA, 27766 bp, Bradyrhizobium colbertium
caggtgtccactcattcggaggaagttcaagatgccctttccccaaccctctcccgcaagcgggagaggggcgcaccgccctgcttgcagagcagcctcactcaacgctttattaaccataaccggtgcatcactgaagctgtctcgtttcgagggataggtccggtgccggttgcacgcgcgtttcgatggtcgaacttggcgtccttggcagcgtccgccgcgcttgcccttggcggctgcgtgcagacgaccggtcccgtcgcggtgatgcagccgcgtcccgatctcgactccatggcctatggccagccttacaatgcgccgcagccggtcgtcgttgccaacaacggcggtggcgccatcgcggcgctgagcaactcctttgcagcttcgcccgcacccatgccggtcggctactccgcgcccatgacggtgcgccaaggcgcatcctatcatctcgacgccggcgacaagcttcgcgtcgtcgtctacggccaggaaggtctcaccaacagctatgcgatcgacgccggcggctccatcaccatgccgctgatcggcgcggtgccggcgcgcggccgcaccacggcggggctggccggcgagatcgccgcgcgcctgcgcaacggctacatccgcgagccttcggtagcggtggagatcgagacctatcgtcccttctttatcctcggcgaggtcctcgcgcccggccagtatccttacgtgccgaacatgaccgtcgagagtgcggtcgccatcgccggcggcttctcgccgcgcgccaagcgcgacatggtcaccgtcacgcacagcgagaacggcgcctcgatgcgcgccgtggtgccgctcggcacgcccctcgcccccggcgacaccgtgttcgtcggcgagcgctggttttaaggtttcagatcgcctgtcaccttcgtcattccgcggtcgcgctgcgcacgccccggaatgacggccggagcgagcgtgtccgcctatctcaaatgcttcgcgaagaacgccatgctgcgcggccaggcgacgtcggcgctggccttgtcgtagctggcgcgctcgtcgcaatggaagccgtgctgggcacccggatagacgaagacctccacatccggccgcttcgacttgatggtctccacgtcggtcaaggggatgccggcatccttctcgccgaagtgcagctgcgtcggcgccttcggcgtctcgtcggcaaagcgcaccaccgcgccgccgtaataaccgatcgcggccttcagccccgagagccgcgttgccgcgaggaaggcgatgctgccgccgagacagaagccgatgatgccgacggggccgacgctcctcgcggcatcgatcgcggcttgcgtgtcgcgcagcatcgcggcccagtccggattggcgacgaacttgcgggcctccgcaatctcgtcgggcgaatagcccgactggaagttcggcgacgtccggtcgaagatcgacggtgcgatcgcgacatagccctccttggcgaggcggtcgcagaccgagcggatgtggtgattgaccccgaagatctcctggatcaccacgacggcgcccttcgcgctgcctgcgggatcagcgcgataggcgccgagctggaaattgtcggaggccgtcagcttgatgtcctgtcccacggggtatccttccagttgttacgaacctgtctctttcccctcatcctgaggagcgcgcacctgcgcgcgtctcgaaggatgtaaggccgagacggcagagccgggccttcatcatcgagacgcttgctgcgcaagctcctcagatgaggggcggcacctcactcccacatccagttctcaccgtaatcctccttccatcctgccagccgtccatgacggaactgcaggaacaggcggtggcggtggggaagcaatccgctgccgccgatgttgcgcagcgcgagatagatttcgttgccgggacggccacgcacatattgcaggggctggccgagggcacgcgcggtctctccggcatccatgccgaaggcgagcggcgtgttgttcgacaaggtcgtgacgaagggctggcgcggcggcatggcgccgaacggttcggcctgcgcagatatcgacagcaacgtcgcgcccgctgccagtatcgcccgcttcatcgccaatgcccttgcttgatcgacctatgccggcaagttcttcaggaaaggcacgaccgcgtcaacaaaagcctggggctggtcgatgttgacggcgtgcccggccgcggggatcacgaccttttgtgcgccggggatcttggccgccatgtagtcggacgccgcgaggaacggcgtgtcgtcggcgccgaccacgatcagggagggcaccttgatgtcggggagcagctcgatcacgcgcgcatcgcgctgggtcagcatgccgcgcgcagcgagcgcgagacccttggcgtcgcgatggctggcggtggcgcgctcgcgcgtcgccgccttcaggacatcgagaccttcgcgatcgagcctgtcggcagtggcaagtgcccttgcgttccaggtctcgcgtgcgtcgtccttcttgaaaccggggccggtgtcgatgatcaagagcgcgcgggtgcgctccggatgcgcgcggtagaacgccagcgacatgtaaccgccgagcgagagtccgccgatgatggcgcgctctgcgccgaccgcatcgaggatcgccgccatgtcgccgaccgtgagcgcttcgctgtacgcgccgggatcgtcgggataatcggactggccgtgtccgcgcatgtcccacaagatcagcctgtggtctttcgcgagcgcctcgatctgctcatgccacatcgccgatgtcgaggaatagccatgggtcagcagcagcggtggcccctcgccatgaacctcgtagtggattccgacgccgtcccgatcgatcctcggcattgcttccgcccttcttttctcgccgcgacaccgctggaccttctcccacaaggggagaagggacgtgcccgcggcggcggttgtactctaacgcgccaagttacctcaaagaaactgcctcgatacgatggcacgcatgttcgccaacgctctctgttgcgtccagtcgctgcatcaagccccgctcttgcaatgcacaacctgtccgcgccgcgttgctttcgactcgttccaatttgcatttgcctccgcgcctgaacgcgatcattctcgcgggcaaggctgacgccagcccggtgggcgtccgccgtacaagtcgccgccgtaagcggcttcatgcaccggcaggggaagacgcctatgccaacactcaccatcaacgggcggagtctgtccgtggatgcggcgaacgacacgccgctcctctgggcgatccgcgagcaattgcagatgaccggcaccaagttcggctgcggtgccgggctgtgcggggcctgcaccgtgcacgtcaacggcgaagccgtgcgctcgtgccagaccatggtcggcgacgtcgccggcaagaagatcaccaccatcgaaggcctttccgccaagggcgatcatcccttgcagaaggcgtggatcgccgagcaggtaccgcaatgcggctattgccagtccgggcagatcatgcaggcagcctcgctgctcgccaggaatcccaacccgaccaaggaggaagtggtcgcgcatatggacggcaatctctgccgctgcatgacctattcgcggatccagaaggcgatcatgcgcgccgcatccgagatgcgtaccgcgtccgccacctccggcgagcggaggcccacatgaacgagcacgtgaagaacgtcgtccccgcgacgaccgatctcagccgccgctccttcctggtcggcaccgccgcgaccgccctcgtgctcggctatgccgcgctgcccggcatcgatgctgcggctgccgcggcaccggccagtttcgagccgagcgtgtggtacgcgatctcgccggacggtctcgtcaccgtgacctgcggcaaggccgatatgggccagcacatcgcctccaccatggcccagctcgtctgcgaggagctgggcgcgaaatggagcgacatgcgcgtatcgctcgcctccaacgaccccaagttcaacgatcccgtcctgggcgcgcagatcaccggcggcagctggtcgaccatgatgaattttgatgccatgagccgcgcgggcgccgccggccgcatggcactgacggaaggtgcggccgccgcaatgggcgtgccggcgtcggagctcgtggtgcgcgattccatgatcgtgcatccgaaatcgaagaagcagatgtcgttcgccgagatcgtcaagagcggcaaggcgaccaagaccttcacgcccgatgagctgaaggcgatcaagctgaagacgcccgaccaatacaccatgatcggcgtctcggtgccgcagcttgatattccctccaagaccaacggcacggccaagtacggcatcgatgtgatgctgcccggcatggcctatggcgcgttggtcacgccgccggtgcggttcggcgccaccgtgaaatcggtcgacgacagcgcggcgaagaaggtgccgggcttcatcaaggcagtcacgctcgacgacaagaccggcacgacgtcgggatgggtcgtcgccgtcgccagcacctacgccaacgccaggaaggcggcgcaggcgctgaagatcgcctatgacgcgggtccgaacgccaaggtgtcgagccagtcactgctcgacgaagccaagcggcttcagaagctcgaggattccggccagttcttcgtcaaggacggcgatcccaatgcagccttcgggtcggcggccaaggtggtggaggccgagtacaccaccagcatcaacatccacgcgccgctggagccgatgaacgccaccgcggagttcaggggcgacatcctgcacgtctattccggcaaccagttcgcgacgcgctccggcgcgatcgccgcaggtgcggccgggatcgatccgaagttcgtggtcatgcatcagcattggcttggcggcggcttcggccggcgtctcgatgccgacatgatgattcccgccgtgcaggcggccaatgcggtcggcaagccggtcaaggtgatctactcgcgcgagaacgacatgacgatggatttctcgcgtccgctcacctaccagaaggtcaaggccggcgtggacggcgacggcaagctcattgcgatcagccacgacgtggtctcggcctggccgaccgcgcgctggggaatccccgatttcctgacgccctcggtcgacaagaaggggccgcttgattccttcacggtgaacggggcggacttcttctacaccgtgcccaaccattatgtgcgcgcgatcaagaacgaactcgcgcacaacgccacgccgtccggccagctcaggtcggtggcgccgggctggaccttctgggcggtcgaaagcatgatcgacgagatcgcggccgcgaccggcaaggatccggcgcaattccgcatctcgctgctcgacggcgccggcaagaacgacggcggcgcgcagcggctgcgcaacacgctgctcgccgcgatggggctgtcgggctacggcactaggcaattgccgaaaggcgagggcatgggcgttgcctgcgtgtcgtcgcaggagcgcgccagcgcgagctggacggcctgcgtcgcccatgtcgctgtcgcgccgtcgggcgcggtgaccgtgaagaagctcacggtcgcaaccgacgtcggcacccaggtgcatcccgacaacatccgcgcccaggtcgagggcgcggcgctgtggggcctgtcgctggcgatgtacgagaaagcgacgctcaaggacggtggcatcgagcagaccaatttcgatggctatacgcccttgcgcatgagccagacgcccgagatcgcggtggccgtgatcgccaacggcgagaaggcaaccggggtcggcgagcccgcggtgacggtggtcgcccccgccatcggcaacgccatcttcaacgcctcaggcgcccggacgcgggcgctgccgatcacggcagaggcggtgaaggcgagcatgagggcgtaaggctgatgaaggctgcttgagacgatccgccggagggccaacctccggcggattgttctttggcgcggtgacagtcccaccctcactgtcatgctccgcgaaagcggggcatccagtacgccgcggcctttcgggtccagccgtgccagctcggcgtactgggtcgcccggtcaagccgggcgacgacagcggagggtgtgccgagagcatccaaaattcccctttgttatcagtgccagttctactgtgcatggggttgttttcgcgccttggttcggaccccctgctgcgggaccagaattccctaaaattgagcacaatcccccaaggttccattgagcacgcctcttaagacccggagaacctgatccgtcttaggctgctggcaaatcccgtcccgtgccttggggaagtcatgaacgccgcagccaaacccgccgccaaacgtcggcttcttctcgcctccgatcgcagcgacggaagcagcgagctcgccagcattctgacggcggtcggcgacgtctccacggtgaagacggaagacatccccgcccagccggcgcgcgatctctccggcctcgtcgtcgacatcaacctgcgctcgcccgatagcgtgcagcgggttcgcaacaagctgcgcggcgatgcctaccgttcgatgccgcggctgttcgtgctcgcggacgccctgcatcatggcaccatgcaggcctgggcgctgggggccaccgataccatctcgcggccgcttcaggccgaggccatcctgcagcgcattcgcgccgccttcccggacaccgccgcctatgacgcgaccgatcgcggcaagacgctcaaccgcggcgtcgaggcggcgcacgcggtgctcaccaagatgttcgagaagctgccgctcggggtgccgctgaccttcgacgacgtcattgcagccgagagcaagatcctgaaggcgatcaagcattcctcgctgcgcgaatggctcaccacggtcggttgccaccatgtcggcagctatcgtcattgcctgttcgtcaccggcttcgcggtcgccttcgcccagcatctcggcatgcgcgaggacgaccagcgccgcctgacccgcgccgcgctgctgcacgatgtcggcaaggccttcgttccggcctggctgctcgacaagccgggcaagctcaccgacgaggagatggccgaggtccgccagcatccgcggcgcggctatgaggcgcttgccgagcaaggcggtttcccgccggaaatgctcgacgtcgtgctgcatcatcacgaattcctcgacggctccggctatccgaacggcctgtcgtcgaaccagatcagcgacatcgtgcgcctcaccacgatcgtcgatatctacgccgcgctggtggagaagcgcgcctaccgcatgcccttcacccactctcgcgccttcacgatgatggaaggcatgggcggcaagctcgatcagcagctgctgcaggcgttccggccggtggcactgggatcgttctgacaatctaatccgtcattccggggcgcacgaagcgcgaacccggaatctcgaggttccgggttcgatgcttcgcatcgccccggaacgactgtggctaccccagcatcttccgaagctccgccttcgccaccttctccagcgtggaacggggcatgtcgtcgacgagcctgatctcgcgcggcaccttgaagtcggcgaggcctgcgcggcaggccgccatcacacgatcatgcagatccggcgcagcgcccgcgacgccgccctgcgggatgatgaagacgacaggcacctcgtccagcatcggatgcgtcttcgccaccacggccgcctcgcgcacgccaggcaccaccgcgatcacctgctcgatctcggaggccgcgacgttctcgccgccgaccttcagcatgtccttggcgcggtcgccgaacttgatgaagccgttctgaagccgctcgacccgatcgcccgtgaggaagaagccgtgctcgtcaaagctctcgcgcgtcgccttctcgttgtgcaggtactcggcgaacagcgacagaccgggaattcccttgatcgcgagattgccggtgccgccgacttccgtcggccggccgtcgtcgtcggtgatgcggatctgatattccggcgcggcccggccgatcgacatcgggatgttgggctggtcgatctcgccgacgatgccgtgggtgatggtttcggtcatgccccaccagccgatcatcttgatgccgaaggcggcgaaggccggcggctcgttgatcgccgtgccccacagccggaacttgtggtcgttcgggatctcctgctcgagcagcgctttcatgcagaacggaatcgtggaggtccaggtcgcgccgtgctcgcgcgcgacgctccagaaccggctggcggagaagcgcggttggatcacgcaagtcgccccgacccacagcgtcgccagcatggaataggccagcgcattggtgtggaacagcggcagataggtctggtgcacgtcgctcgcatgcagatcctcatgcgcggcattgatcttggcgccccacagcgcattggcatgggtccacagcaccgccttcggccgcgacgtcgttcccgacgtgtattgcacgctgcacggcgccagcggatcagtcgcgcgcctgggtcggtcggcgctgtcggcgaacagggattcgaaactgtcaccgcgcgagaccgcttgcgccggcgcagcgcctgcgtcatgcgcgatcaccgccatccatcggatgttgcggcagttctgcgcaacgaggtccgcataggacggctgcgtgatcgcggcgaccgcgccgcaatgatcggcaaagtactcgatctcggccggcgccgaccgcgtgttggtggtgaccgcgatcgcccctaattcgacacaggcaaaccaggccagcatcgcctcgatgcaattgtcgagatgaatgagcacgtattggcccggattgacgccgcgcctggccagccccgccgcgagcgcaccgacccgctcgtgaaattcgccgtagctccagcgtcgcgccggcgcgtcgaacggagcccagatcaggaacggatgatcacgccggacctcggcgcgcagcttgagcagccagggcacgtcgagcccgtcgaacgggctcacgattccggcggcggtctgttgaactggcatggctcctcccggtgcggccctgcatcttgctgcgggctgtctatcgattattgcgtcttcctgccaccggatggcccggggcgcaatcgcggggcacaccctatctcccccgtcattgcgaggagcccttgcgacgaagcaatccagcctcgctcagcgaagacagtctggattgcttcgctacgctcgcaatgacggtgggtggcgccagagtgcctcaaccctcgtatgacgatatctcgatcaagctgccatccggatcgcggcaatagaccgagcgcagcgtgccgcgggcgccttgcctcgggcccggcccggcctcgatcgcaacgccatgtgcctgcaaatgcgccaccacctcatccggtgtcgcggaggtgaggaagcacagatcctcgctgccggcagtcgggtggccggcggtgaaccagtccaccttgtcggcatcgcgttgccggacgttgatcctctggttaccgaactcgaggaaagtgcgcggcgctttgccgccgccggggtcgaacagcttgacttccatgccgagaatcttgcggtaccactcagcggtcaccgcgacatcgctgacattgatcacgagatgatccagggcatgaaccttgatcggcatgtctcatcctttcgtcatgacgcgcccgcgcgcactttccgcccgcggcgagctttgttacaaccgcatcgacgcgaccttcaagccaatcggccttcaagaacaacactgggagaaccctcgagatgatcactcgccgtaccgcgctgggcctgcttgccgccagtccgcttgcagccaccccgctgtcgaaggccctggccgccgattatccggcccgtccggtgaaatgggtggtcggctatccgccgggcggggccaccgacatcctggcgcggctgatcggccagcggctctcggaaaggctcggccagcaattcgtggtcgagaacaagcctggcgccgggaacaatatcgcgaccgaatcggtcatcaacgccgagccggacggctacacgctgcagctggtcaaccccgccaactacatcaacgcctcgctctacaagaacctcaagttcaacttcgtgcaggatatggcgccggtcgcctcgttccagcgcgtgccgaacgtgatgaccgtgaacaaggacgtgccggcgaagactgtcgccgagttcatcgagtacgtgaaggccaaccccggcaaggtgaacatggcctcgtccggcaacggcacctcggtgcatctgtccggcgagatgttcatggccatgaccggctgcaagatgcagcacgtgccctatcgcggcgccgctcccgcgctcaccgacatgctcgccggccaagtgcaggtgatcttcgacaacatgccgtcggtcatccagcacgtccgctccggcgcgttgcgcgccatcggcgtcaccaccacggaacgctcgccgcagctgcccgacgtgcagccgatcgccgacaccgtgaagggctacgaggcgagcgcgctgttcggcatgggggcgccgaagaacacgccgaaggagatcatcgccaagctcaatgccgaggtcaacgcggtgatcaaggagcccgacatggccaagcgtctggtggagctcggcggcgagccgcgggcgcagacgcccgaggcgttcggcgcggagatcaaggccgagaccgagaagtggcggaaggtcgtcgagttcgcgggcttgaaggtcgagtaggccggatagcaacctggcggccttgccggcgttctccggaggagacttcattcgtggagcgtccggcaaggagcacgcagatgcgcaaggcaatgctcgcaatgatcgcactggctggattgggagtcggcagcctcgccggcaccgatccagccgcggcctatgattatccctggtgtgcccagggaagaggctacggttaccccggtgaatgcgcctaccggaccctgcaacaatgtcaggcgagcgtgtccgggcgcctgctgacctgcgggatcaatccgcgcgcggcgtacaaccagcagcggccggtgcgccggcatcggcatgattactacgcgccctattagggaggcgactggctccacgatccggagaaagtgacttgacgcgacctggcaaacggggacgctctatcctcgttgcactgaaggacggctcgtgagcaggattcaatgcgctctggcggcgctggccgccatctgtctgccagcctttgccggccttacgccgaccgcggcccgcgattatccctggtgtgctcagggcggcgagtacgactatcccggcgaatgcgcctacagcacctacgagcaatgccaggccagcgtgtcgggccggctgctgttctgcggtcgcaatcctcgtttcgcttacgggctgaatcggccgcctcagccgcggccgcaccggcacgtgcgggccgtcgcgccatactgagggaatcacggcctaccgcttggcatcggcttgtcccgtgccattgcatgagatcagcattgtgtaggcccgggcgttggcagcgatctcggtggttttcagttcgcccttcggctctgcggtctggtagggcactacggaattgtcgaggaagtcacgcagcgcgcccgtcttgatggcgaagttgatgttctcggggatattaccggtagcgactgcaatccgcagattgtcgagttttcccgtgaccacgccgacgatctggccggtggtgtcgaacagcgggcctccgctgttgccgggctgcacgggcgcgctgatctgcaggaaacgcgaatcgttccgcatgccactgagcgaactcacgatcccggtggtcacggtgaagtcagagctcagcagtccgcggtagggaaagccgatcgcgacgaccgagtcgccagagcgtatcgagcggtcgcggattcgagcaaaatctctgaacgtcgccgtcgacggcgcctgcaggagggcgagatcgttgattgcatcgatcgatacaacgcgcaacgcaaccgcggcctcgccggtcagattgcccttgaggtcgctgcagccgtcgatcacgtgatggttcgtgacgacgtgtccattgccgctgaccacgaacccagtaccactcctggacttgccggacttgctggccggcggtgacgccgccttgtccgccgtggccgcaggcttcgcactgccctttgcgaaatctcccgccttgttgagcccatcggctttcacccgcgtgacgcaattcgccagcgcagcgaccaagggcgccgtcgatgtcagcacgaattggagcggcttgctgccattggtcgtcaccaccatcaggcttgccttctggaaggtgcgagcgacgctggggggcaggatggtcgtcaccatgttgggtgcattggaggtcgcgaacagtctggcctgctcctgcccatcgaagatgaagtcgatgggcgccgtatcgcccttgttgaagcgaaagctggggctggcaaagcttagcagccatgagcctgccgcattctgcgcaacgacgagactcaccccgttggcgtaaggtgccgtcgccgcgcaatgggagaaggcgcccgtctcatcattgctgaaagcgccgccgatccagttgccgacattgacggttccgaacggacccgccgcgttggccgcggagacactcacctgcaaaacgaacgcaaccacaaacgatctcagccacataccagcccccagaacgcccttgggttcatcttatccgtcagggcggggtacgcgcaacctgcagttgttactgcaatttcgatccggccggcgcgacattcggccttgcctttgctttgccgcgccatatactttgcattacaaagtaacctgcatcccgcaatgccgggggcggaacgaggtttggcattgccaatgcgcgatctcgacaaggcactttccgacatcgttgcgatccgcagccagatcgctgcgggcactgcattccgcgggtacggcccggcgaccatggcggcgaccggcgccgtcgcgctcatcaccgcggtcctgcaattctggctcttggatgatcccaccggcgagccgctcggcttctttctcggctggttcgttgcggccgcgctctcggcactgatgatcgggatcgagatgcgcgcgcgctcgcgccgtcaccattcaggccttgccgatgccatgatccatcaggcggtcgagcagttcctgccggccggcgttgccggcgtgctgctcgcggtcgtgacgtggaagttcgccagcgagacgttgtggctgctcccgggactgtggcagatcctggtttcgctcggcatttttgcctcgatccgctcgttgccgcgcaccgtcgcgctcgccggcgcctggtatttcctgtccggcttcgcggtcgtggtgctcgcgagccaaacccacacgctgtcgccatggaccatggggctgcccttcgtgatcgggcaggcggtgatggcggccatcctgcatgtcgcgtccggagatgacgatgccgaagactgacagcgcgcccttctcttacgaaggactcgatcgcgtgatccacgagaaggcgaggctcggcctgttgacctcgctgatggcgcatcccaaggggcttgccttcggcgatctcaagcagctctgcggcctgaccgacggcaatctcagccggcacctcgccgtgctccaggaggccggtctggtcgaggtgaccaagggctacgagggcaaccgaccgcacacgacctgccgcctgaccaaggccggccgccggcgcttcctcgactatctcgccgtgcttgagcggctggtgcgcgacgcagcgaaagccgccggccgcgaggcgccgccgctcgggcgcctcggcatcgcatcgacctgatcatcccccttttttgcccggagactttgtaatgcaaagtgaaacaacgtcccgccacgagaagcttcatgtcggcatcatcatggacggtaacggcagatgggcgacgcggcgcggcctgtcgcgcgtgcgcggccatgaggcgggcgtcgagaccatccgccggatcgtcgaggcagcacccaagcagggcatcggcgcactgacgctttacgcgttctccaccgacaattggcgcaggccgaaggccgaggtcgccgcgctgatgaccttgctgcgcttctacctcgccaacgaggtgcagagcctggtcaagaacggcgtgcgtctcaccgttatcggccgccgcgatcgcttgcctgagggcatcgccaccgcgatcacccgcgcggaggaggccaccgccgatggtggcacgctgcatttgcgcatcgccgtcgattattccgcgcgcgacgccatcctcaatgccgcggcaaaggcggctgcgctcaccagcctcacccgcgaagccttctcccagctcgtcaccggcgaggccggcctgcgcgatgtcgatctcatcatccgcacgtccggcgagaagcgtctatcggacttcctgctctgggagggtgcctatgccgagctgcacttcaccgagcggatgtggcccgaattcgacgcaggtgatcttgccgaggcgctcgccgccttccatggccgcgagcgccgcttcggcggcctgcgggcgatcgtgccggaggaggtgccttcgctctctcgggtgtgatgtcgcggccgccgcggccacgttgatttgccgcgtggcacggatcgtgctctagtctctcgcgatggagtgtccgcagcgatgggagcttcgcaagatgcgcgcggttctggattattgcaccggcggaacggaacggcagcttgccgccggcacgacaatcgtcgcagagggcggcaccaccggccatctctacgtgctgatgcaaggcaggctcgaggtgctcaagggcgagatggtggtcgccaccgtcaccgaacccggcgccgtgctgggtgaaatgtccgtgctgctcggccagccgcatacggcaacggtgcgagcctgctccgacgcagtcgtctacgaattcgaggatgccgccgccttcctcgagagggagccgggtgtggcgctgctgatcgcgaagatgctggcgcagcgcctcaatgccgccaatacctacctcgccgatctcaagcgccaatatgctggccacggcacgcatctggccatggtcggggaagtgcttcaaagcatgatcaacctgccgccgcttgaggtctcgccaggctcggatcggcaatccgatccaagaatgtgagccaggccggaggcgcctcgatggcagcggcggggcgctgtagcggagcattcaggtcgatccattgcgcctcacccgccgcaagccagaacgccttgtccgcgtcgaggtccagcacgatgtaggtcggggggcggccgggttgcagtccggtgttgaagacccatgtctggcccagccggtcgaaccacgatccatcgccgatgaagggcgattgatgcacatgacccgagatcaccatggacggctgatattgcttgatccactgcaccagctcgacgtcgccgaagaagcgcttgccgccccagcttgtcggcgaacccgccggcggcgcatgatgcgcccagatccagcgctgcttccggcctgcggcggcatcgcgcaactgctcgacaagccgttgcttgacgagcggtccgtcccaccacgggcacaccgtgaagcttgtgtcgccgatgctgaagctgtcgccgtcgcaggcaatgccgagctcgcgcatctccgagatccagcgcgataccttctcgccctccgcgttgcgcccgtcgaggtcgtgattgccggagcagaggatcacgcgggtcgtcgcggcgagaagcgcaaggtatttcttcaccaccaggatttgggcgcggaaatccacgatcgagccgatgtcgagcgcatcgccggcgaagatcacgaggtcgaattgcggcgccgcgctgaccagccagtcgagctgaggcagcgaatagtgcaggtcggccacgaccaggcagcgcattggagaaccgtccgcgagcgatcgagaatgtccgggaatttcaaacgacacaaagcaagaagcagaccaatacgactgctcgcttcctcattccaccgcgcgacagcatgcttggacgcgtggcacaggcaaggctcaggcagtgcgagggctggaccggatcgccgaactctgatgtccttgcataccctcaaccgctcgtgcccccaatgactcccttcaagaccattcgcgcccgcgccgagaaacgaaagggcgggcccaaggcgctcgagaaactgctgccggcaaagcctgacctcaagcggttggcgaggctcggcgatgaccgcatcctcgccgaaatgaccaagcgggtgttctgcgccggttttgcctggagcgtgattgattccagatgggacggctttgaagacgccttcctgcatttccaacccgccacgctcaccttccagcccgaagactattgggagggcctgctggccgacgcgcggatcgtacgcaacggcgccaagatcatgtccgtgcgcgacaacgccgccttcgtgcaggacatcgcgaaggagcacggcagcttcggcaagtttctggcgaagtggccgtcgtccgacgagatcggcctgctcgatctgctcaccaggcgcggcagccggctgggaggcaacaccggccagatgttgctgcgcttcgtcggctgggacggtttcgtgacgtccaaggacgtcgtggcgtgcctgcgcaatgcaggtctcgatatcgctgaagaggtcaagtcgaagggcgatctcgccaaggtgcaggcgcagttcaacgcctgggccgaggagaccggcctgccttacacttatctttcgcgcatctgcgcgctgtccgtcggcgaggtcaaaggcaagtagcagtcgatgtaaaccaaggagaacgagaatggcaaaagcctattgggttgccacgtatcgcgcgatcaaggatcccgagtccatggcggcttatgccaagctgtcgcgcccggccatcgaagcggctggtggccgcgtgcttgcgcggggaatgccggccgctgccttcgagcttggccaaatggagcgcgtggttctcatcgagttcgacagcgtcgagagcgccaaggcggcgtatgcgagcccggcctatcagaaggcacacgatctgctcggagacggcgccgaccgcgacattcgggtcgtcgaagctgctgaatagcgcgacatcggcgaatcatgggcatcctgtggcgatcccgtgccttgaacgcggcagatggcgcgcccttatcacgaaatacatttcccaggaacatttgtgcgcagcacctgttcgggaggtgagccaggcagataccgtcgcagggaacaccgtcctggctcggcttaatggaaacccgccacgacagaaacggagcagctcatgaagctcacatccgaacaggtgaagcagaccgtcaaccagctcggcgctcaggtgctgcccgacgagcatcccgcgatgccgcagctcaacagcatgttcggcgagcacaccttcttcgtcgacgagatgggactcaaggtcctcgagccgacgggatcgcccgataccgaacgccacagcggcgaggtcgtcagcctggccgattggggcgattccgatttgacgcgcctgatggcacacgagcccgagccgactggcgtgatcgttgtgttcgagcacgtgcggcattgagcggcccggcgaatcgctctcaatggtggcggggtccgagaatccgtcaccgtcagccgtgcggcgcgcgctgagggctccaacgtagctgccgggatcatgcctggagcgggatctcgatggcgatccgggtccccggatgcttcgtgcgctcgagccgcagccggccgttcaacgatgaggcgaccagattgaaggcgatgtggagcccgaggccggaatgaccactgtcccgacttgtcgtgacgaacggatcgaagatgcgcgcctgcaattcgtccgggatgccgacgccatcatcagagcagaccagacggactgatttcgggtccggctggctgactgtgaggataaacctgccgcctcttttgccgggatacgcatgccctgccgtattcagggcgagattgctgatcacctgagcaagcgctccggggtagctgttgagcctgatgcccgctgggcactggacctcgaccgccaggccattgtgcgacagcagcggcccgagcctggacatcaactccgagagccaatccttgagttcgaactcgcgccggtcctcatcggcttgatggacggcgacctgcctgaagctgtgcaccatctcggatgcgcgatgcagattttcgaaggtcagatcgagaccttgcctgagccggtcgatccctttcgtcaggtcggagcgccggacggatgctccgcccagtgcatctgccatcgtctgcagatcggtctgcatggtggtggaggtcgtcagggcgaggccgagcggcgtgctgacctcgtgagcgactccagcgaccaattgcccgagcgaggcgagtttctccgtctgcacgagttgctcctgggtcgcgcgcagatcgcgcagcgatttctcggagcgttccttctcccgctgcagcgcttcggaggtttggaattgcttccgcgcccggtactcgcgcgcggccacggcgtagagcgacaatgcgtaggcgttgccgacgagggtatgattgatgaatctcaggcccgccggcatcgtcaacgcgaacgactcggcgaccagcagcgcaacccatgacagcaggcagaagatcgcaagcgagccgatccgcaatggcagcatggtcgagacgaacaggatgatcatcatcatgccgggcgcggcaaaggtgaagccggacggcagcacgagataaatgctcggcaggatgcagccgggaatgacgcaatagacgagaaagatcgtctcggcccacggcttcatccatcgtcgcgacaacagcgccgtcaacggcagcagcacgaacagcgccgtgccgccacggatggccagcgtcgtcggaaccacttcggggtagagcacccaatcccagagcgtgtagcccgcataggtggcggcgccgagcagcatcgcgatctgcgtccagccgaggctgcctcggacgtattggtcgacaaaccgccgctcctcgatgcggtcttcgaagcgcagcccgaggcggatcaataagccaagcattccagctcaatcgcgaaaacgtcgtgatgggtgtctgtacgacaggattgcagctgcgtcgcggataaagatgtcgcgtcggttggtctctcgggcctcgttaaggcaccgcatcgccgccgagaggggggctgcggccgtcccaagcagccctcacgcggtcggcgaccaggccggtaccatggggacgtcaaagtacgaagagccgacatcgtggtcggccgaaatgtcttcaaactagatcaggcaagctccttcgccttgctcgagcgaccggaagcgggttcagccttgtcgtatgtgatcacgctgatatcaccgctgctttcgagacaggcgagtttcaccatgttgaggtcttctacgccctgcgtcctgagcaacgatttcaactcatcttccgtcaccagttctttgcgcatattacggcgcagcattcgacccctctcgaccagtttgaccttgggagaggttgtcaggatctccaaggcgggcacatgataggcgagccattgcaggccgtagctccagaacatgaccgtggagatcaggatcgccgcttcggtgaccgattcgttgcgccctagtgcatccgtcgtcgcctcgacgatgaggacaaccacgagtaggtccgggatgccgacggcaccggactgtctgttgaggaagaggcgaaggatgaaaaagagcaggaaatagatcagcgtcccccgcaacacgacttcggcgatggaattctgcggaatgagaatggaggaccagtcgatcattgcgggatctcggcatgtgtcggccgaactgccggagcaggcttgtaacagcgcgaggacgcgctgggttccctgcgccacgaggccacacagcgcggtcaaagacctgccattgctgcgttctgcgggcttggtcctgccgcctctcgccgcggttgctgcggccgttgcaagtccaacgatcgcgacaatggtgaacaggacgaccaccgcctccatgctcagctgaacagggagagtgccggcacagatcactgcttcggcggagtagagcgacgtgagatgaatgaaccggatcagcggcggcgcggcgtccgctctttgcgcggagtggctgttgtggatgtcagacctcgcgcctgccgcgtccgccgaaaggacgcgccagcccggttcagatgcccagcgtcagctgcggttccggagcgtcgccggccttgagcgaagacagcgagaccccgagcagccggacgcgcttgggcagcggcatctcggcttcgagcaggccgcaggccagccgctccagctcgtcccggcctgcgacggccgctgcgacggacctgctgcgcgtgatgatctcgaagtcggcaaacttgatcttcaaggtcacggtgcggccgcgattgccggtcgcctcgcagtgacgccagaccttgtcgacgagaggcctgagctctccgaccagcgcatcaagttcggcgagatcgacggagaacgtgttctccgcgccgatggatttgcggatccgattggcgcggactggccgctcgtcgacgccgcgtgagatccagtaataataggcgcccgacttgccgaaggtcgcgttcatgaactccagtgtctggttgcgcatgtcgaggccggtgaacatgcctagcgcgttcatcttcgcggcagtggcggggcctatgccatgaaacttgccgaccgggagcgtctcgacgaaggccggtcccatctccggcgagatcacgaactggccgttgggcttgcgatggtccgacgcgagcttggccaggaacttgttgtaggagatgccggccgacgcgttgagacctgtctcggccttgatcttctcgcggatgcgcagggcgatgtcccgcgccagaggaatgccttggagattttccgtcacgtccagatacgcttcgtcgagcgacagcggctcgatgagcggtgtgtgctcggcaaagatgtcgcggatctgccggctgatggccttgtagacctcgaagcgcggcttgacgaagatcagatcggggcattgccgcttcgccgtcacggacggcatggcggagcgcacaccgaacctgcgggcctcgtagctcgcggccgcgacgacgccgcgttgcgcggagcctccgacggcgaccggctttccgcgcagctccggattgtcgcgctgctccaccgacgcatagaaggcatccatgtcgatatggatgatcttgcgcacccgcgaggctttgccggtcaccctgtcggattcgctcatggaaagatgatacaatcgggtgaagagaagcgcgaggtgatggatgtttcacttgttggtcttcgtggcaggcgtggtcggcatcggttggctcatcggcgcaaccaatctgcctggggaatggtatgccggtcttgccaagccgggcttcgtgccgccgaactgggtgttcccgataacctggacgattctctacgttctgatcgcgattgcgggctggcggacatttcgtcgcgagccccggggcaaggcgatgctggcttgggccgcgcaaatggcgctcaatttcgtctggtcgccggtcatgttcaccatgcaccagatcggggccgcgctcgtcatcctcatctgcctgctcgtcgcgatcgtgacttacatcagtctcgagctgtcacgcgaccgtctggccgccgccttgttcgtgccctacgccgcctgggtagcgtttgccggcgtgctcaatgcggcgatcttgcgtttgaactgagacgttgagtctcgaccgattcaagaaacaatctcgggcttgtgagtggcaagcatggacacgcgatccaatatgagccggcgggaggacagcccatgcaatacagctccgagctcattcacaccatgcgtcaagcgctggaaaccgtgatggcaagcgttccggcccatcaatccgtgttcggccttaaggcggccgtcgccgaatacatcctgcacgccgccgcacacggccagacgtcatatgacggactggtgacggccgcgtccgaccagctccacgtgatcattgcgatgctgacgtgagggccggcgcctgaacggctggcaactggcgcacccgacacgattcgaacgtgtgacctttgccttcggagggcaagggtggagaaattacccctgcttacctcaaatcccttggaattggcggccctcagatataggctgaaaacagcctgatttggggggctacggtcgttgctctagatttcccctgttttccggcgcctgcttaccccctgcttacccgagggaatcttgccgaagctgaccaagcgggtcgtggatgccgcacataccaccggaaaggacctcgttatttgggacaacgagctccggggctttggcctgcgcgtgaaaaaaagcggggccaagtccttcttggtgcagtaccggaacgccaacaaccgcagccggcggctcaccttgggacgctacggcgtgctgaccccggaggaggctcgccgagacgccaagctggccctcgcggacgtggtgaggggtgcagatccggtcgaaagcaagaagctcgcccgcggcgccatgaccgtagaggaactatgccgcgagtatctggataaggccgagcggggcctcattctcacgcggcggggcgaggtcaagagcaagacgaccctgtacagcgacaaggggcggatcgagcgccacatcatcaagctggtcggcaagaagaccgtgaagggcttcacctccacagacgcaaagggcctccagcgcgacatcatagccggcaaatcagcggccgacgtaaagaccaaaacccggggccgggcgattgtgaccggtggaaggggaacagcggcccggacgatgggcctgcttggcggcatcttcagttacgccgtcgacgagggctatcggcccgacaatccggtgagtggcattcggcgaccaaaagaccaaaccagagaatggcgcctggatgacgccggctatcgccgcttgggtaagtgcctcgccaccgccgaagcaaacggcgagcactggcagcgcgtcctcgccagccggacgtccgccatgacgggctgccgattggacgaggtggaaggtttgctgaagaccgaggtcgataccgtcgggatggccctccgcttgggcgacagcaaaaccggcaagagtatccgccctgttgggcccgccgttatcgcggtcctgaaggtggcgatgtccaagtccaagtcaaagtatgtgttccccgccatcacgaccgacgcgaaacatcatactggcttgacgcggtggcttcagaaggtgtcggccaaggacgtcccggggatcaccagccacggactgaggcattccttcagctctaccgccgaggatctcgggtacacgctgcctaccatcaaggccctgatcggccattccaagaaggggaacgttacgatgggctacattcacaagatcgattcggcgctgctcgcagctgccgaccggatcgccaggcacatcgatgatgccatgaacggcaagaaacagagcaaggtcgtccagcttcggaaggcctgatcaatcggcgcggctagggtagctcccgaaaagctggtccgcaccagcctgccgcgtcgtcaacatgcggagcacaagcggaagtgcgatgagtctcgagctgatacagaaacaactcagcatgcgggctgagttctggaagaagtcactaggttggccgaacgacaacgcctcatatgtattcttggggcgcgcggtccacgcgatgggcagatcaatgtttggggcggactggacgggcgatgagccctgccgcgaccttatgacgacgctctcgatctttccagaaaagtccggctggcgggcccgcctcgcgcacgatctgcttgtgaagcaccatccggaatttaatcgacagcctcgcaagccgtaccagcactcgttcgaatttacggggaacgaatggatggctgctgtgatgattgtaaagaagcacaacgagcagcagatgcccggagtaaggcgcttcagcgaagcacgggaccggataatccacttagcagaagctggcttgcttattactgccattcgcgagaaagccggcggcgatccgacgccaattccgcgggcgtggtggaactcagagcgcattcgcgatcggttcgacctgtgtcagttgagacccgatgatccgtctaacctcgggatcggcagcgaccccttccaatggattttcgtcactcgcgaaagcctgatgagctgcgctccaggcggcctcgccgacggagagcaagcccccaaacctgcctccatgacattggccgctgctccgccgacggaggagctggcaaaagctcgccgccgtctgcctgaggcgaagatcgagcccgccttccggcattggcgagagcagcaaccggagggctatatcccaactgaggaacaggacgtcgcccatatgcaggcactgggagtcgggcgcgacaaggtccgcgagctccgaaaaaaatttccacgccggaggcgcggggagacaaggtccaggtagctgcagccaaataagcggctaatacgcggaccaaatccgcagcattttcaaccgcgtatctttaccgcggatttctcgacgctccatttacctcgcacccacggagattgatccgtgatttcgcgaggccacgatggacaccgaagaagtacacctcactgagcgccaccttcgaaggaaggaggccgccaagtacgtgaccgacacgtacaacgttccctgctctcccaagaccctggcgaagctcgcctgcatcagctcggaaggtccgccctttcggctcgctgggcgcttcccgctttaccccgtctccgggctcgacgcctgggctcagaggaagatcggcccgttggtcagatcgacctctgaggttcgccgcgtcgcctgacaccatccctcaaaagaaaaacccggctgcacgatccacatcttggcggatcaggtcgtgcgcaccgggcttccaggaaatcgcagtatgaaaaaacatagcaaacgcatccggcaatctcaatcggtttctgacctgccgctcttctcatggcgcgtcaccgttctgcagccgagcagccaagccggcctgttcgtcgcccgccgctaccgcgtgcacccggccttcgctgatctgatcgccaacctggcgggtctcggaagcgaggtgcgccaatgagctatcccgatagccccggcttcaaggccgtcggccccagcagcgaagcggctcagaagctgacgcagcgtgccaccacggttcgcgagcgcgtccttcagtttctccgatcgcagcatccggcgagtttcacgccggaccagatcgccgaccgcctcaacatcaacttcctgactgtcaggccgcgaatctccgaactgcacttgcagggagaggtcgagccagacggcacgcgaggcaagaacacgtccggaatgtcggcccagtgctggcgcgcggcgaagatttcagcgggagagccccgctaatgggaacgatcatgaatagcttcaacaacgcacagcgcgtcgacttcaaggccgtcagctcagcggccctcagcgcgttggatttcgtcatccccaagctgttgcctggcggacgccgtgaatccggggagtgggttgcgcgaaaccccacgcggaacgacgggaagccgggcagcttcaaggtcaacctgaagagcggggtgtggtgcgacttcgccaccggcgacaagggtggcgacgtcatcgatctcaaggcgtacctcgacggcaaatcgaagctggatgcggcgcgcgatcttgcgtcgatgttgaacgtccagcccacgggtacgatgaacctgaccgggaacgtgcgcgatccccagctgaagatgaccgcaaacgtcgcggcgacgccggctgaggtcaaagacgcgcctgtcctccccgcgcggacgaagccggatgaggacggcaagccccgcttcatggtggcgggtgacgaggggccgcgcccgcgtgacaacgagaagcgacgccacatttacaagtgcggcggcgtgcctgttcgcatcaagatcatgaccaagggcgagcatcgggccttcaacgcctatcgcgttgcagatgtcgatggcaccacgggctggcagtatcgcaagcccgatggctacaagtccgtcccctacgcggctggggatctcgacagctcgagcatggtcttctggcccgagggcgagaaggacgtcgattccgtcggcaagcgcggcggttgcgccatcaccttcggcggtgtcggcgacgggttgccggccgggtgcgaacagtacttcgcgggcaagcatctcgtgatcctggccgacaacgatgacgagggatcggatcacgccgacgcaaaggcggcgctcgccttcggcatcgctgagaccgtccgtgtcgtgcgcttcccagaactggagaaaaagcaggacgtctccgactggttcgaagccgggcattcattccaagatctcgaggagagggcgcgcacgaccgttgaatggaagccctcgacggaagatatgagccaggaggaggagcacatccaggcccgggccgagaagaagtcggtcctgccggtcggctacagcttctctgatcggggtctgatgtggagcaatccggacgatttggacaagcctgcgatcctggttgccggtcacttcgatgtcgtggcggagacccgcgatacggatggcgcaagttggggcgttttgttgcgctggcgcgatcacgacggccgcgagcaccagttcgcgttgccgcgggcgaccttggctggagacgggtcggaggcgcggcggatcctgatggatggcggcttcttcatctcgcccagcaacaccgctcgaaacctgttcaactcgttcctgcttcaggtgcgatcgccgaagcgcgctcgggccacgcagcgggtgggctggcacggcaactcgttcgtcatgccagacgagtgcttcgccgttgacgatcgagaccttttgctgctgcagagcgcgtctgcccacgaacacccgttccggcaggcaggtaccttggagagctggcaacagagcgtagctaggtacgccgtcggcaacagccggctcgtgctggcattgtccgcggcctttgcgggaccgctggtcggcccatgcgcggctgaggggggtggcgtccacttcaagggcgcctcatccacgggcaagagcacggccttgcatgtcgccggcagcgtctggggcggcggtgataccaa

SEQ ID NO: 122 - DNA, 11321 bp, Bradyrhizobium colbertium
aggtgtccactcattcggaggaagttcagccccttcgcgagcctcggccatggaaggtaagagcgccgctaatacggcggcagcggtgaccgtaatccccttggctttcatctatgtactcgcttcctcacgtctccctgctggcacgacaggggtcattctataccgcccgtaggccggacgaacactgctcgcccgagacgtggttaagccttcaaccctggtcttggagagaggcgaaccaagttgatggcgttaccgaaataattggacgcctgacacttgtaactgcataaggcgacgatgaagagatcgaccgtcacaaccgtgcttgcgattgccgcctggggtgtcatttccctcatcggttatgccacgctgacgaaggttcaattcatctacacagtttatggaaagatcaaaccgttcctttttggggtcgacatggcgacatgggcgcatctggaacacgcgatcgccttcctgacgttgggctgcctcttcgccgcgacatatcctcgtcgcacagctttagtctgcctgatcgtggtcggcagtgcgctaacgttcgaggtgcttcagacgctgacacccgaccggcacggcaccctgttcgacgcattcgagaaagtcgttgcgggctgcgcagggattgccgcggtcaaggtcgtccagtttattcgagccaggaaacgcgcttgagacccgcaagtgccgcgactattgcgaacctatcccgacagcaagcccatcggatcgaacacccaagcgagccaaagcccgacggcgagatggggaccgaacgggatggcatgccgaccatcgacttcgtagcgctgcgacgccagcaggaatgcgctggcgagcgccgagacaacggcgaccagaagcacgaccggcagcgagcgaaggccgatccacaacgtcgcagcggcaagaaactttacgtcaccgaacccaagcccatcgtagccgcggacccaccgaaacatcgagcgaaagctcgcgatcgcaatcgccacgatagcggcgtccgcgaggcgagacatgattgcgtccgggtcctggagcgataccgcggccacccctcccatcgccaatgcgccgaccaggctatcagggataatgccgaacctggcgtcgatcgcacagatcgccgacaggagggcgaaaagactaaggctgagtagcaggtgcaagatccacatggagcttggctgcgcgttcaccaggatccagcacaacccaacgaccagaagccaggccagtagaaactgatcgcgataaggagcgcggccgcaaagggcgcacgcaaggtagcggctgatccgcaccagcattttgcggagccgtttgctcatttcgccaagacggaaagatgcagggtctgtctttcgccatccgcctcgagcacgatctcgttaggtttgatctcggagagacgccagccagaccactgctcattcaatgcgacccaggctcctaccgggttgtccgacgaggtcataaacgctttggctcgctccccgttcatgaagacccctcgaagcgcgacgctggagtcgagcatcattctgttcggtggcggggacgcgccgaatattgcgggcgctgccgcgattgccggcgcctgacggctcctcgaaaagagcggatgctgcaggatgttatcgtgcgtcccggcgccctggttctcccgctccagggaagtccgggcaccggcgccgccagcggcggattggctggcgatcgcgaactccagagacgcgatcgccacgataggcgcggccaacgcgagcaacaacaacccggcaaggcctagcaaaaatccccgtttgatcggcgcgatagacctcaattcccgttggccggggacataagcacgcaagaggtcacggaagggcccgggcgcaagcgcgctccgcgacgtcacgatggcttgcatcagttgccgccgaccgagttgggccgcctttttgatcatcggctcgtcgccttcccctcgccgccgggccgaatctcgctcaacagcgggccgcccggggagggctttggcgtgcgtaacgcaccctcgaccgtcaagctcacccgcatacgactatcgtcaccgtcggcaagtgttcgcagcgacaagtcggtgatgaacagaaaaggcgtctgggtttcgattgcggcaaccagttcccgcaccgccgcggccgtcccctccacctccagcccgaccggaacggcgcgccattgcgcggcttgacgtcccggcagcccgcgcacggcctgcaccgccaatcccttggcgcccgccaacgcttggaggttggcttggaggtcggcactggcgatccgttcctcggcacccgcaaggtacggatcggcttccggtgtcgaagccttggcgagcctgaacgtgtcatgcgcgacacgccggacctgagcgagttgcgctgcgctatccagtatctcgtcattgcgcagaccgaaatgcgagacaattggctcgaagattgcaaaacagacagccagcacgatcgctccgttgagcccgtagaaaatcagccgccgccggagcaactcgccagtcatgaaccggacctttccgctgatttggcaacgcgtccggcgccgaaattccgcaacttcaagctgatgcgaaatcggtccctttgctcggtcgcgtcggggataatcgcgcccagcaaagtagccccggtgaaaaggcgtgagtcctccagaacccgcacgagccgggccgcatcggaagacaaccccgacagagccacagccccgcccgaaatccggagttcagtcaggaaagtgtggtccggaatgacgcgagacagttcatcccacgttgcgaggctgcccggcagggctttgagagccagtagaggaacgggtgatccggctgcgtgctgcccttgctggacgccgcgccgagcttcttggagttcgtcctcgagcgccgccgctcggcttgactgccaccactcgaatcccagcaagccggccgtcgtggcgaccagcagagcggctgcgaggacgcgcatcgtttggatcacccacggcgggtcgtcgtgccgaatctcgcgaagcggaacgaccgcgacggggacatccgttgccgacttgatcccgatggagtcgacctcgcccacttgcaagcccaatagaacgatcttggcctcagcccgatccttcggaataatccagtggcggaaagtcgccagcccactactcggctggccgtccggcgtgacgccatgccatatctcggccggctggaatggtgtgcggtgaacgatctcctgctcgagtattcgtttcaacgcgccgatttcggatcgcggaagcctgaactcgcgttgaaagaaaagagcgggctccagcgcaacgcaaatctgtacggcatcacgatcgcagcgaagttccgcgagccattcgtcgatctgcgctccgtcgggggagccgtcgtgaaatcgccgttcctgcacgcccgacggcgtcaccaaacgacagacgacggtaccttcgtcgctccagacgaagagctgcgtttcgactcgagcctgcaggacgtgacgccaggcctgaggtgcgcagtcgcgcagctcgttcagccaccagcgcacgaattgtcgccccctgtccgcaagcccatgcgagccctgcaatcgcgccaccgagacttcagtcatcggccctgtttccctgcaaatacgaacatcgatccgatcagtatatttaccaattgtttacgaggcgtaacgctcggccacgggttaggagcctcccgaaggcccttcgtttcgaagcgccacgaccatggcagggccattgcgcgccgcatccttgaagttgaggcttatctcgaccagggcaggcagcccaccgagcttgatccagtcattgcgccaagccgcttcacttttcgtagcggcgtttccaaagtagcggaagcggatatcgctcaagcccctcacgatggtcgtcgaggacaccggcaatttgtgatcaccattctctctcggcgatccgaagacctcgacaatcaattcatcgtttcggcgccgaatacggacgtcctgcaggcccccgcgcaacgcgcggccctcgctcaggatgaccagccgcaactcctcgcgctggccgtcgaacgaaatgttgccagcctgcggcagattgatcgcagaggcgatcaggcctcggaggttctctccagcagcagtcgtcgccatttcgagcccattgcggctgtccgcctcgaatgctcggacagctgcagataatccaccgacggtaaagcttgtcaggatcatcaagattgccagtgagaccagcagctcgatcaaagtaagcccgcgctctgaagcacgacgagccagactgcgaaactttcggatccgtccatgccgggtcattgcgccgtccccggtgccagcttgaggacagccacctttgtctccaatccggcttcgtcttgcacgacgatctccacccaggacggcacgagcattgcgccgagcggagccgcacggtcctgcacagcggctttcccaagctgcacgggcgtcacgttctctctccagcggtaacgcccgatccgtccctcgcggcgaccgatcttcagcgggccactgcggccgatcgcttcgaacctggattccgcaatctgatcgatgacgtgcttgctacgcactttggcgtcggaccgcaatgccgccgtgacaccaactgccagactgctgaggccgacggcaaggacaacgaaagcgataagaacttccaccagggtgaagccgcgctgagccgcgcgaaggcggcgtcgaatgggcaatctgcatgccgaaacccaggccgacatcactcgatcctcgcggtgccggtaaaccagttgacgacgatgcgctccgagcgtccgtgataggtgaggacaatctcgccaccgctcgaacgaccgtccggatagaagcgaacgccgccgacggcgccatgacgttcgctagtcgcgacagtcaacgagacctccatgccagtcggtaattggcgcatggcgcgggcaacgccaatgcgtcgattccgggtatcgacgctgacgatgatttcgtcgttgccggcacgagcccggctgcgaaccagttgaaggtttgccgcgatcgcacgagcttccgcgctgacgcgcgctgctgccgtccttggcctggccaccaggacggcggccgagaccagcgccatgatcgaaagcacaacgagtgtttcgatcagagagaagcccgctgacttttttgcgtccgacagcctcattgataggccagattgttgatcgacaggacggcgctcatcacctggaggatcaaggcgccgacaaggccgccgatgccaacggtgagaagcggggtgaggaggccgacgagttgctcaatcctgctctgtacctcgccttccaggctggaagcgatacggacgagcatcttcgcgagctggcctgtttcctcgccgaccgcgatgagccttatcatcgccggcggcagcaattccatgccctcgagcacctggcttagcgccctgccctcgggaacccgggtgataacctcgctgtaccgagcactcaggtatcggttggtgaccagcgatcgcgcagtctgcagcgcggtcatgagcggcaccccggcttcgagaagggtgccggcagagcgcgcaaactgacccgcctcgcgtcgctgaacgatcggccccatgaccgggagacggcatatgaggcgatccagctttctcatcgtcaactcgtggccggctattctgcgataggcgagccagcaaacgatcgttccaaacgagaaccagaaaagatacctgggccaatgatcgggcagatcggcaagcgcggccagaacgccaggcagaggaaggcctgcatcggaaaaaatcggtgtgagattcgggatgagcacgaacacgatcacgacgattgataccgccgacatcgccaacagaatggccggatagacgagagctccgcgtatcttgtttctgatatcgacgcggcgcgccagcatctctcccagcaaggtgagcgcctgcgccgtctgacctccagcctcgcccccagcgagaatcgcgatgtagtcgggaggaaaggcatcgggcctccggctcatggcctcggacagttgctgaccagccaagatgtccttcaggaggccggtcgcaagggcaagccgcctgggcgacgcgcccgcgccggccagcacccgaaatgatgcatcgagagaaacgccggagttgaccagcgccgcaagctctgtcgtaaacgcggataattccttcagtcctaggtgctgtgagctttgccagcgcaagccgggcgcgttccgcccgatcggtcgcgatgctgaagcgctatccgaagagagcaccgtctcgatcggcgtaaggcctgagccatagagcgcctcgaccgccgcatcaagttcttcggcgacgatcgtgcctgaggtcacgacgccttccctggtataagcgcgatagtggaatatggacacgccgcaccctctaactcgatcgcgacaccctgagcacctcctcgatcgtggtctctcccttggagaccttgatgaggccggcctcatagagcgtgcgaaagcccgcatctcgggcgagcgagatcatggtccgctggtcatcgctacgtctgccaaccgcttcccgcatgtcatcatcgatgacaagcagctcagcaacgctggttcgcccaagatagccggtgccatgacaagagtcgcagccaaccgcttcccgtgcgcccgaccagtcgattacaaggtcatccggaaccggccatctcatgcgcgagggagcttcggcgcgataggccgccccgcgcgcgcaatgcgaacatagccggcgcacgagacgttgtgccatgataccggtgagcgtcgaggcgagcaggtaacgttcgatgccgatgtcgattagtcgcgtgatcgcggcaacggcactattggtgtgaagtgtcgagaacacgagatgtcccgtgagcgacgcctgaacggcgatccgcgccgtttccagatcgcgaatctctccgatcatgatgatgtctggatcctgtcgcaggatcgagcgaagcgcggcaggaaagtccaagccgatctgtggctggacctggatctggttgacgccgccgagttgatactcgatcggatcctcgacagtgaagagctttagctccggccgattgagctccttcagggcggtataaagagtggtcgtctttccactcccggtagggcccgtgaccaggataatgccgctcggcaactccatcagaccgtgcagcccagcctggatcgctggatcgagaccgagcttggaaaattcgagctcgacacgggtgcgatcgagaattcgcaggacgagactttcgccgaaggctgtcggtaacgtagacacacgcacatcgatctcggtcccgcgcaccgcagttttgatacggccgtcttgcggcagacggcgctcggctatgtcgagcttcgccataatcttgatgcgcgtggttagtgcggccctgaacgtcgagggcaccacgcgctcctgctgaagaaatccgtcgagcctgaaacggaccataaccgcgtcccgtccgggctctatgtgaatatcggacgcgccgcgctcgactgcactggcgatgatctggttcaccagacggatgatcggagcttcatttgcgatgtcccgcagccgctcgacatcgatttcgttcccatcgcctgacccgacagtgatcagcccctgatctccgccgaccaattcggcgccatcgtcctggtaaagcttacgaaatgcccgctcgatgtcggctggggcgatgaccgcaagatcgaccctccagcccagcatatagctgatggccttgtgagcctcctcgtcgaaagggtcgaccgtggcgagcagcaggaccccgtcggacaccgatatcggcaaagtgcgactgcccttgaggaacgtcagcttcaaccggtccgcgaggagcggctgcagcgggaggtcggacgatcgcacgatcttgagcccgcaataggcggcatacgcgccgcaaagatccgcctccgacagcagtccgagcttcaccatcacggcgtccaggcgctcgaaggttgcttccgaggcacgcttggctctggtaacggcagctgcgtccacgaggccttcgcgcaacaaaagcgccgagaacgcgtcgacaaatccggcttgcctcggcgacaggaccttcgccccgcccgtcgtcggcggttcctcgcgcatcaacgtctctgcatcggccgacataggtcttgcggggtcctgacatcaaagtatcaggcgtcaggctagagccattcggttaattaaggcttttcatactttatttgccattttcatttaccagctcgaaacggatgcggcgaaagaggcaaccccgtgcaagcacgatccaggtcgattgcgcctgcccgacgcggaacgcgacatggccgtgatgttccgcgtgggcttccgccgggctcacgcgggcgccatggcttcgcattgatcaccgtgatctggagcctcgggctgttgacgctactctgcgcaaccgtgatcgtcggcgctcgctatcgggcaaggactgcgctcacggacggctcggtgctcgcggcagctgccgccgcggaaagcgcggtgaacctcgctcttgcgagcattctctcgccgacgcgggaggcgagctttccgaagcagtgccgaatgccgggaggtgagcaggcagagatcgtcgtcgaagaagagatcggcaagatcgacatcaacgccgccagcctctcgacgctggagcgtttcttctcggcgctcgcgcaagacaaggccctcgggagcaagatcgcgttgaatgccgtcaacttccgaacggcacttcagcgcacggagtccggcaatcagacgggccccggcgggacggctccgctgaatgcttcggacggcgccaaaggcctgggcttttccaccatcctggaactggatcagatcgacggcatgtcgccggcgttactccgcgccgccatgcgctttacgaccacgctctctggccggagcgaacccatgccggaagcaatgtctcctgctttgcgtctgctgatgggcttcggcccaaaccgggaagagcgcaggcggccaccaccatccgggcatttcaccatccggaccgacatccgcacgaacaatggctcgcgatatatccgagaagctctcgtatccttcggagcctcgtctgggcaaccttacaccatccgcgaatggcggcgcggcgatatcgcacgagagactgccgcctccttctcttccccttcgccggtacaagcttgcttcaagatgtgatggcagcgagatggcgtaatcatcccttcgatcgaagaacggcctgaggcctcgaatttctcgccgactcttccagcctcgctctctcttccacgacggcgggaccaggctcgatcaccgtgcatcccttcatacgctgaagatccgtcagggcatccaggcgtcgacgctcctcggccaactgtttgggagcatcgagtggaaaacggtcggaatcatagcctgccagggatccagctgcgagccagtactcaagacgagcagcgcgcctgaccgagaagcggaaggatccagcgattgcgctgcaagacatcgattcatctacgggcagaagcatataaggttgaggcggctcgatcacataaggctgctcagtcacgcaccccgccaagagaagaggcagcgcacagattttcgccaacccgcctatcgtgaatggagttcgtgtcacggcgtcaccagacgctgggcggtgttgagaggcgcccgttggcgcgccgaagtgtgcggcatataaacgttcatcttgcgtcggtactcctcggtgatcagccgactttccgtgccgtcgcggaccactttcggggtaatcaggatgaccaactcggtcttttgaaccgcgtccttcctgtttgcgaacactgcgccgataccagggatatctcccaggatcggcaactgattgctgctcttgttcgcgctgtcctggatcatgccgccgagcgccaggacctccccatcgctcacaacaaccgttgtcttgacccgacgttgctgaattgtgggagagttgatgttcgaagtcgtcgtcttcacgacgctgctgacttcctgctcgatatcgagctgcactcgtccgctttcgttgatgcgtggcgtcaccgagagaatgacgcccgtatcctgcatcgagatcgaatttacaatcgcgggctgcgtggttatcgtgctggtcgccgtttgcgtcgtgatcggaacctgatcgccgatttgcaaacgcgccgtcttgttgtccagcaccataagcgatggtgtcgaaatgatattgacgcgcgtgagggcattcagagcactgagggttgccgctatgtttgcagtgttgacggcatagttgaaccccgggaacgaagcggctacgcctccggtgagggcattggagaatgtcgccgtaggcgtgccgttcttggcaaactgccactggaggccgaactggagatcgtcattcagcgacacctcggcgatcaccgcctcgatcagaacctggctggcgaccacatcaagcccctgcaccacacgcagcacgcgctggtagtcgcgatcgtttgccatgattagcaacgagttcttggtgtcgtcagcaacgatcttcatcatgggctctgcaccggaatttggtacgacattgccgctatcggccgtgtccattgccgaagcatcgggatcattattcgtggaacgtgaagcaccgaacggatccgcggccttcgcgactcccgcctgcatggctggatccgaaaatccgccgccagttgcttgcgccttggtcgattcgctgccaaaggaaacctgcttggatttcggcgacacatttcgggtcgaacgcacgaccttcatctcttgcgcaaacatcgactgcaggatgccggcgagctcggccgcagttcggttctgaacctgatagatgtgcagctgcggctctgtgccggcggcacgagcgtcgaggcgcctgatccatgattgcgcgcgcggcagatagctcgggttggatgtcacaacgagaatggcaccgagcctcgtgttggcgatgaagcgcactctgcccttcagaggcccctccttgtctgaggcaaataccgccttcagctcatcgaccatcttctcgggctgtgccgctcgccccgcgggtcacttcaaattcctccggg

SEQ ID NO: 123 - DNA, 13126 bp, Bradyrhizobium colbertium
ccccgtgatgttgaccgcatgccgctcgagtaccagatcgtaggtgccggcgtgggcgggtgcggtggccgcgcttcccaacaagagtacggcgaggccgagctgcaaaatgctcggaaaatcttgtgccatctgactgccctcccttaacgcaaaatttgttaggccagcatgggccgattttccgttcgctcaaagtgcaaaaatgcaacatcgccgctgagtttggaaggacgtaacttacggatcagaactgacgccgtcgctggcgtttggtagacgaacagcgcttcgggcgagcggcaagcctgatcggaaatcccggtgcatatcaggcgagcaaattagctcggacataacagctcgccggcctcgcaacaagaaacgacaggacttgctacttgcgttagttgcgcacccggcgagtaaggctcgctggtatgaatgcgcaccgagctaacgaagctggccaacccgatgctcatggccaaggtaagcgccacgattttgacatgagtcgttcgatccgcgctgaaaatcgagtgattcatcggctaattcccctgtggcacccgcagatgagccaatcccatcacctgcagccgtcgattcggaacggcataatgcgccttgggcgggaccccgacattgcgctatcgcaaacatgcgttctgaatcgaggctagataggtacgcttcataggggcgtcggctcatccaacagcttacgtattgctttgcggacttcctcgagcaacagctcgccagctacagacgggacgttcgatgatagcagaagcagccggcttgacgccttgaacttgggcttggatataaaaacggtggcaagttgaaaaaaatgacgcgcccggagatctggtatgtctcatactgctcggacgatgcgcccgatggtgcgagcaggcgcgtccgccttacacgcaggtttagaaccgaaaccgaggccaagcgatttgcccaagagatcatcaacagcaaccacgcggtgcttgccggcaccttgaacccgcacacgccgaggagagtggtcgggtccgattccattcttgattggatagcggaacgataaaaagtagaggggcttcacctctcgtggggaagcgattggcgagaggcgccagcgggatcctcgcgtgagatttgttgtatacgcaggtgatcatcggcgcggcgggcaaccctgaaaggttgcggccggttgtgagtccggataccgatggccgatctcaacggccgcaggagtgcgagcatgtccgttcattgtcgaaaacgcgctctgaagcagcgtaattcccgcccgcagcccccgcagcgcgcgttcgcagcgctcgcccggtctcttattgccgccgccttcgttgcgagcttcaccgttcaagctctggcgcagatgtcgggcggcggccatgccgaccatcatcccggcactggcgccccagcaaacccgatgactccgtctggcaccccgcctgcgggggggccgggcacgcaaccctcgatggggtcgggcgccggcggtatgggtgctgctggcgggatgggcgagatgatgaaagggggcggaatgggcgagatgatgggtcgcccacgtaaggaattctatccctccctgatggacatgccgaccctttcggccgagcagcgtcaatgcatcgaggcccaagcgcgcgcccgcatcagtaagggggcggatgagatccagagtgcccaggatgcgctgcggcatgcgaatgcggccggagatacggcgagtgctgagcaagccgcctcgcggctgcgcgatggcctcgatcaggtgaaaagcagcactaccacgccggaaacaccgaccgagctgcgggaagagcaatcccggttggggacgctgcgatcggcctacgaccgcaccaccatcgcgctggcccaacgtgccaggcttgaagacctcgccgccgccgaagtcggcgcgccggccctgcagggcgccaccgtcctgcagctcgtcgaggggattgccgatcttgaatacgcaatcgggtcccgcgaggtgatcaagaagatattcacgcgctggatcgttgcgcatgtcgtggccgcgatcctgatgtattttctgctcgcgctgcatatcggcggtgagatctactatggactgcggtggctcgcgtgaaaaagcttggggttttctatacggtgctgatcgccatcgcagtcgtggccagtttgaccacggtcgccacgctctatcgctcgggctcaggatcggtgccggcctggtcgaaatcgtttcagcctggccagctctcggtcaaacacgccttcctgaccgacaaatgcgagtcatgtcacaccccgaccctgggggtcgaggccaagagctgtatcgcctgccacgccaccgcggcagcagatcttgcgaagcagtcgaccgcctttcatgcgaaggtgcaggactgccgcggctgccatgttgagcaccagggcgctggccgtccgacacggatcaaccatgcggcgctcctgcggatcggctcgcaccttgccgttggggccgaaggtcatcccggcgtgccgaccgagatggtcaatgacatcgccgattttctgggcgtggcggcatcacgatcggccgagaagaacgccctggattgtgcgagctgtcacagcaaccgcgacccgcacaagcagctcttcgggcgcgaatgcgcgggatgtcacgagacgacgacatggcggatcgctggattcctccacccgtcgccgacttccaaagagtgtgcgcaatgccatcaggcgccgccaagccattacatggagcacttcaagatggtgtcaatgagggtcgcgggcaaggagcatgcccaggtcaaccagtgttacctctgccaccggaccaactcgttcaacgacatcaaggacgtcggctggtacaagcaccattgaccgaagccgtcggcgacaatctgggtgggaagcatgctcatccggatcgccgcgcggcatccgcgatttagcgaaggaaagcggcatcgagattacgtgcgacgcgtacaactcacgggctcaccacgggatcgtcagccgaagccgggccgcggtatcgaccggcgccttgcaagaggtgcgcggcaaggggccgaacaatgtgatgcaatcgtggagagcaccgccgtgatacagatcaaaatggaatggaccgttcaccgtataatgttcatggaaacgctttattgcggcggatgcggcagggccgatgcgatgaagcgtaattcgtccacatgcgactgctgcacgaatgcgccgctgcactcttgcggcgagctggataacgtgggcaggaggcatttccggggcaggcccatcgcctgatcgatgacatggagcacatacaatgcgaaaaaaagtcagtgtcgcactccttctcgcacttatcggagttatgatggccacgacggcaagcctcgcgcagcccgactcgggtgagaggctccggccaaaagccaaattggcgccgctcactcatcacccacaatacgtcgccccgacaggaaagcgtaaacctccaggagcgcctcttgatgaacgtggaggcacgacaccgctcatcgagcgccaagaccaagagatcaaggaccataccttaaagagcatctgccaaggcgcgcctggctgcgaaggcgggcacctcaggaagcaaggaaagcgcgactaggagggatgcgcctgctatcgtgcatgcttgacttccaaaccgacgcgatccgactggacgaagaggagaagaagtggcgttgttgtccgtaccacaccgatccgcgccggatcaggaggcggggtcaaagaaaacgcattgcgactggctgcgcgtctgcggcagctccgctgtgtggttcggctgagcacgggaagagggcgctggttacaccctgcgatcgtttcctgcttgacgtctcctgccggatgcgccgcccgactggcgccgattgacaaggcgccgcttttggcgctacgcggcgcggatcgactcgccgtcggctcactttgcggccgtggccgcgcgggcttgtgctggcttcgccgcttgcgtcagatttcgcgcggtggttgcgagcgcgatatgcgagaaagcttgcgggaagttgccgagctggcggcgcgccacggggtcatattcctcggcaagcagtccgacatcgttgcgcagggccaagaggcgctcgaacaggcggcccgcctcttcgtgtcggccgagcaggatcaggttgtcggccaaccaaaagctgcacgccaggaatgcgccctcgcccgcgggcagtccgtccgcaacctcctcggtatcgtagcgaagaacaaacgtattctccaccagaaggcgctgctcgatcgcggaaacggtgccgcggattcgaggatcactggcgggcagaaagcccaccagcgccagcatgagcaggctcgcgtcgaggtggggggcgccataggattgcacgaagctgccgagatcggggtcgtaccccttccgacacacatcttcatgaatctgctgccgcaccgcgcgccagcgatcgagcgggcccttaagcccgaattcttcaatgctccgaatggctcgatcaaaggcgacccacgccatcaccttggaatgggtgaagtgccggcgctcgccgcgtacctcccagataccctcgtcgggttcttgccagatcgtttccaggtgctcgacaatcgcgcgctgcaaggcccagctcgcgtcgcgcatcacaaggccgccccgccgggcctggtagagtgcgtccatgacctccccgtatacgtccagctggagctggccatgggcggcattgccgacgcgcaccggtcgcgaaccatgatagcccgtcagccacggcacttcccattcggtcaagcggcgctctccggcgagcccgtacatgatctggatctccgatgggcggccggcgacagcccgcaacagccagtcgctccaggccttcgcctcgtcaaagtaaccgccgtccatcagcgacatcaaagtgaaagtcgcatcgcgcagccaacagtagcgatagtcccaattgcgtgccccgccgatccgttccggcaaggacgtggtcggggccgccacaattcctcccgtgggcgcgtatgtcagagccttcagggtgatgtgggagcgaagcacagcctcatgccatggccctgtgtgccggcaacgcgaggaccagttttgccagaacgcttcggtctcggccagggctgcttccggatcgagggtagcgggtggcgcaacgtgggacgggctatagctcagcacgaagggcacggtgtcgccggcttcgacggagagttccgcaacggtgctgagattttcgccgtgaaacggagccgttgttcgcaggaccaccatggacgggcccgccaccgcttggattccggtgccgtcctcaagccgcgtgacccaaggcacgaccgcgccgtagtcgaagcggatcacgagctcgctgcggatcctcacgcgaccgcgccggccgacaacgagacgcacgaggtccgataccccgccgcgcagggccatgaagtcgatcacggtgatccaaccgcccgcgctctcgaattccgtctccagaatgagcgtgctgttgcggtagcggcgactgacgcgtgggctgggatcctccggtgcgatgcgccaccgtccgttcccgggcgagccgagcagagccgcaaaacaggcgcccgcgtcaaatcgcggccagcacagccaatcgatcgagccatcgtggccgacgagcgcggcggtctgacaatcgccgatcggggcataatcttcgatcaaagatcgcatcgggcgggctcctgttgcgggctgtcctacaacccgccgccggttcgttagctcccgaacagcagctcccgcaatttacggacggggctggctggtctgtgtccccggggtccacgacggaattcgtctcgcccacgacaaagtcctgatgaagacagtttgtagcacctctgcaaaaatcctggtctcccttcactatacaggtgttcaaaaagttcgatactgcggaaccgccgatgaatcagttcttgtcgagcttgcgaatcgcgtggaaagacggagcgggggacgcccgaccgacaggccaattgcgaagccgaagcgagagcggcgacgccctgatccgctcgtcaaggctacgctgccaccactcgcctcggtttgtacgggtttagggtgcctgcaagcacgctgcatgcagtattggtgatttcttgagcaaatcgcttagcttctatttcagttttgaacctgcgggtaacgcggacggttctgccttccgcgagcagacgcatcattcggacaatatgagacataccagatctcggggctcgtcatcgtatcaacttaggacctcgtattgcgaataccttgtgccaaatcaagacccctcgaagatcggactgcatcatggattggatatcggaacgaaaaagtagtgccggctcgggtgccggcatccgagccgcctgtcgtcgaggtacggccgccagcttctcggatccagcgctttatcagtttgtctcggcggcggatccgccttcatactgctgctgtagttgatctcgcgattttagcctcatctgcgatgcgatcccacgatacctctgcatcgatcgcctgttgcttgtgagccgcgtgagcttgcgatcctggaccctgcagctcagagccgcggccttcgcttccggcgagaagggagcgatctgacggaacgttctgagtggaactctgcgagcggccgtccgacgggctacgctcaccggagacgccactcgcagctacggcgcgggacgctgaacatcagtcatccgtacggtggatatcgtggacaacaatgccgccatcctgggccggcattgccagccattctgtgtgccgaagcgtgcgctgtgtgtcctggtagccgcgattccagtgctcgtgcatcgattgcgcgctgaaatcgtaatccttggcttggccctcgtaggccgtttgttgatagattaagtgtaggatcgtgatcttcggcagcctgcagagcttgtccttcagcgcgcgttcttcgtcatcgagattcgcatcccctagcttgtcgagcaagcgcctcaagatcagattctgctggtggcgtttcgcataggtgtccgtaatcagccgtgtgcggcttgagtaacggatgtccttttcgcgagcgagcacgtcgaacatatcgcgcgggagcacgccttttgcgctgaacagatcgacctgaaacaccagcatgctgcggcactgggcgttgtcaaggaggtgctgcagcggcgtgttggagacgaggccgccatcccaataccagctggagtcgatctgcaccatgggtagcgcaggaggaagcgccccgctcgccatgacgtgctccgcggtgatctcgatttgtgcgttgtcgaaatagtagaaattgccgttgagcacgttgacagcgccggcagcgtagtgcgtcgatgtttggttcaggagatcgaaatccactaagcgccgcagtgtctcgcggaggggcgcgctgtcatagaagctggtggcggtgtcagcgccgcgaggactcatccaagggttcgggacgttcggcgaaaaaaagcctggctgcccgaacatcatggcctcgagggacgaccagttgttgcgcgccccgcgcgcctcgtccccatcagctgtgaacggccaagtcgggcgcgttatcgtctcccagaactcgcgcaggcgatccaggcggtgctccggggcgttgccggcgatcaacgcgccgttgatcccgccgatcgaaacgcccgcgacccagtccggctcgagcccggcctcgtgcagcgcctggtaggctccagcctgataggcgccgagagcgcccccgccctgaagcaccagcgcaatccgctcgcagccttcaggcttccaggcgccaagcgagcggcgaatcttgatagagcttgcatccatgatagctccgcgtattgatggttcggtccgcgcgtgtgttgaagcaacacagcgttgacggttcttgatcaagtcgaaggacttctgggctcgctgagatcttggcgaacaccgctgggatccacttcaccgcaaatgtgaagagtgcctgcggagagaaatggagcgcgatcatcgcgatgaggttctcgcgagtcgcacccgggatgaaggcagccattccgagataggtgcacagagcaaaacccgtaagattgcgcccttaggttcaagacgccggtgcgtgaggctgagccgaggcctagcctcaaacctcgttccagcccaatgggttcagtcgctgccgccaacaaaatgcaccgcggcgacttcggattcagaacagacccaaggccttggtatcgtagctgaccagcacattcttcgtttgctggtaatgatccagcaccattttgtgtgtctcgcgcccgaagccggagcccttgtagccgccgaaggccgcatgggccggatagacgtgatagcagttcgtccataccctgccagcctcgatgccgcggccgacacgatacaaattgttgacgttgcgcgaccacactcccgcgccgagaccatagggcgtttcgttgccgatcgcgatcgcctcgtcgagatccttgaatgcggtcaccgacaaaaccggaccgaagatttcttcctggaagatgcgcatcttgttgctgccgacgaagacagtcggttggacgaagaagccgtgcttcagccttccgccgagttcggcgcggcctccgccggtcaggcacgtcgcaccttcccgctttccgatctcgatgtagctcaggatcttctcgagctggcccttggagcactgggcgcccatttgggtcgacggatcgagcggatcgccgaccttgatcctggccacgcgggccaccgccctctccacgaacttgtcgaagatcgagtcctgcacgagcgcgcgggaggggcaggtgcagacctcgcccttgttgaaggcaaacagagcaaaaccctcaagggccttgtcgaggaaggcgtcgttctcgtccatcacgtcggcgaagaagatgttgggcgacttgccgcccaattccatggtctgcggaatgatggtctcggcagcatagtgcatgatctggcgacccagcccgcgcatcgcgaagattgcccgatcggctcgcgaaaatgataggcgatcgtgtcgtgatcgatctcgccgatggtgccttcctcggcgcggatgcaggcggcaaaatagcggaaatgatcggccgcgagtggtacatcggcattcatggtctcgcggatcggcttgccgttgtcgcgggtttcgacctttgcaaggagggtgaggttctcctcgatccggtcggcgatcttgttgagcactcgcgcccgctccgccggggcggttcggcgccatccgggtagcgccgcatgagccgcatcgagcgcgcgcccgacatcgttcgcatccgagcgggcccacttcacagagcgtgctgccgtcgatcgggctcttgtccgtgaaatagcgccccttgacaggagcagcccattcaccgtcaacgaaattgtcatagcgcgcgcgtagtttgcttacactgcttgcggatgtgatcggccggtccagcatatggaaaactccttgtggtcagagtagtgcgccggacctcggtccacgccgctattgcggtgggacggccggagtgccgctcctcatcagcagacggcttccgcaaagcgcggtgacctatctcagctatagaaatttcagcaccaatttcccgtgctgaccttgagctgcatcaacgtctgatttccattgtgctccctaaactggccgccgatgtggtccagccaaggagaacgggtgatggcgaaaacgatgaaggcggcggtagtccacgaattcggaaaacctctcagcatcgaagaagtcccaatccccgcaccaggccggggggaagttctcgtcaagatcgtcgcctccggcgtctgccatactgatctacatgccgccgcaggcgactggccggtcaagccgaaaccacccttcattcccgggcatgagggagctggcatcgtggcggccgtgggtcccggcgttgtcggactcaaggaaggcgatgcggtcggcacggcctggctgcacgatgcgtgcggccggtgcgagttttgcggaaccggctgggagacgctgtgcgaagcccagcacatgagcggctataccgtgaatggcagcttcgctgaatacgccatcggcgcggcggactatgtcgcgcgcttgccaaagaacggcgactttgctgcgctggccccgatcctttgcgccggcgtcaccacctacaaggggatcaaggaaaccgaagcccgtccaggtgaatggattgcgatttccggcatcggtggtctcggccatatcgccgtgcaatacgccaaggccatgggccttcacgtcgccgcgctcgacgttaccgaagagaagctcgcgcttgcccggcaactcggcgctgaggttaccgtgaacagcaagagtccggacgctgccgcccaggtggtgaaggcaaccggcggcggcgcgcatggcgtgcttgtcacggctgtgtcagttccggcctttgcgcaggcgctcaagctcgtacgtcgcaagggcaccatcgcgctcaacggcctgccgcccggcgattttcccacccccatcttcgacgtggtattgaagcgcatcaccatccgcggctccatcgtcggaacgcgcaaggatctcgccgaggccgtacagttcgcaaccgagggcaaggtgaaggcgcacattcacaaggcgaaacttgaggacatcaacaccatcttcagcgacctcggaagcggtaaggtcgatggccgcatggtcatgaccctctgaaagggagcgggcctggacacagcccccggcctttatcgaagcgggcagggctctgcgggaacgattggtgtaccctcggcgaacgagctgcttgccgttccagcgcagcaatacgaaagcgcgttcgcgaccacattgggcggccggacattccggcctaactatgtcagcgcgagcaacggtcgtggagccggtcaagatcatcaatccagacgcgaatgagccagcgcgcgggaccttcgctcaaattttcggcccgtccgatctcgctatctcaccggcacacttcaacccggcgaaaacgcacgcgcccatcggggcccacaacgcgacgcctcgcgagataacagtcgccaccaacatcatagccgtaagcaccgtaataggggtagccgtaacccccgtagccataaccggggtagaagccgtatccgccaaagccaaggcccccatagtacccataaccgccaaatccaccatgcccgccaaatccatggcctccaaacccgccgccgcggccgccgaaaccaccaccatgccccccgaatccgccgccgtggcctccaaagccaccgccgtgccctccgccgccatgctgcgccgcagccggttgcacatcgctcatgaacgcagcgctcaccaagagtcctgcaagcgtcaccaattgcgcagttcgtctgaaatttctcatcaccgttcctttcacaacgtcaccttcagtccgagaacgcgattattgctgtgaagttgcatcgggcgggccatgccgacgcacaatcgtcgtcatcatcagcgctttgcgcctgatccaaaaaaacaccgcctgtttgctggctatcaggccgagggcacgcgaggggcggcaaagtggcaggtgccagagcaattcgggtcgacgaccaggctgtctcagtgacgctcggatggctaaatggattgcgccggaaccaactttcatcaccacggcgaagcccgcgcaacacctcacccacgattactgctccttttttggccccatgtggtgcggtacatcggtcttgggtccaccgccacaatggtggctgccgcccgatgcgggcttcgagccggtgctcttcttccccatatggcgcgggacctccgttcggtccacctgagtaatgatggccgttcttctcagccgtagagctcgtctgcgccagggccgggagagcagcgaaggacatcacagcggctaggagcagcttgcgggcattaattcctgttgctcctatgactggtccaaaggcaatcaaaccagatgtctgatccagaaacaatcaagcttgaaacaaggacgcagtggttgagccagatcaaggaccgcgacctacgacctgagtcaataatgtaagcacgatctggcgcgacgagccgtaccaatcttcttgttaaaccaagcatggccttgccgtagcttcaaatgcgatcggcaagccgcaccgttgcctgcgggtacctgcaacggccgctctcgagaccagattcagatattgattcttgtcgggtaacgcgggcatccggcgatgtcgcacgaattcttgcgacctcgtttctgatagttgtcctcagtacatatgctacgcaaccaacgggatgaaatcggcgatcgctgcgcaaagtttgccgacgagttgaccggatttggcaaccggcacacggccgagctcatagtgaagttcacggcgactgtgattggctgacacagtcgtagctctgttgctctgcgatttctcttaagcgttcaccagacgttgattagccactatcaagcggcctaccgcgcttttcggatgttcgtgatcatcactgcgtttttcagcctggctgcctcaaattccactagatctcccggtcgcaagccctttagcatgcgacggttcgtgacatggaagggcatttccattgccagcatccggatgctgccatcggcgctcttcatctcctcggtcatgatggcgaccgaagctgcaccgggacccatatcgacagcttggacctggcccctcgcatgcacgtgccccgatggagatacaaggtaattgtgttcccgatcgagcttgtccatccactcgcttggcgtcggtgtaaggatctgggcggctgcaggcctaagaaagatcgcgagcccaaacgagctatgcctgaatctgggtgacggagcc

SEQ ID NO: 124 - DNA, 17221 bp, Bradyrhizobium colbertium
cccggaggaatttgaagtgacccgcgggggtcttgttttgcatatctcgcattgccaggtcggccaagtgcaaagcctctagtaatttcgacatatcctgccgattgggttactcactacttacagagcaattacgaacgccttgatccggtcattatgcaagcgcttcagaacccagaacctttcaggtggggggtagggctgaccgcaagacgactcactttggcgcagcacgaactatttcatgaagcttccgagtttggaattcgatttggctttacgtttcctatacacgatggtcgcggtccgatcgccgcactgacctttgccacagatgaacggcggccgcagttcgaaagccgcatcgagtcgcacgctcgcgtgcttcaactcatggcaatgtacttccacgctcatgttcaacgtacactttcgggcaatagctgcagggaagggcgctcctatctcctcgagaactcgaatgtctagaatgggctgcaaaaggcagaagtgcttgggaaattggacgcattcttggtatctcacgtcacaccgtggtctcttatcttgataatgcgaaggaaaagttggaggtgcgcacgatcgtgcaggcagtgacactcctgacggctgcaaaaggacaagagcacaattaaggcagggcccctcccgcatgtaggggtgatgccttcgatcacgaagcgagcttccgtagaggcgttgcaatggtcctcggaggcaacgatgatccagctcatcacaaggagcggctagactgggaagtccataccagtggcgatatggaagttgacagctttgacgcgctccatccttcctatctcgtgcgagttgcgaccgacggtcggctacagggctgcgttcgactgctacctactattggcccgacgatgctgcgtgataccttttccgtacttctctccggtcaaagtgcaccgtcaaagtgctcaatttgggaaagcagcagatttgcgatcgatatttcgaccgacgctcccaaaggagatcacggcataactcgtgccgcatacgagcgccgacggcgcggatcgggccgagatcgacgctgcactcgcggagatcaaagccattagtaaggagagacggaaagtgccctccgtcgatccgatggaccccgacttcaaaaggctccgctactgccgctatgccgacgacttcctcatcggcataatcgggagcaagcgggaagcgtgtgagatcatggcttgcgtcgaacaattcctgactgagacattgaagctcaccgtgtcgcccgagaaaagtggggtctatgccgcttcaaagggagtgacattcctcagctatcgcatctcgacatacacatcctatggggctggacgcaaatccaaccgcacgggaccggatagacggacatggcgcgtggtacgccggccggccaccggcaatgtcttcggcgcgccagttagcttcgaccagccggagagccggctctccttcgatgtagagttcctgaagctccccaccattcgcagcgagcgggcgttgcgagagtttttgcggcgcggtgcggtaccgccatgattctggccttgccgcgaaagtccggaaccgcttacgcgagatggtccctgtcgactggcctgatttcgacgccctcgccaacgaactgcgtcttccggcgccaacgcttcgcaggaggctgcggatggaggggatgacatatcgcaacatcaaggaagagattcgtcgcggacttgccatggaaagcctgctgcgcgaccgccgcgacgtcggcggaatttccgcagacctcggcttttcggaacctagcgccttccaccgcgcctttcgcaaatggacgggtaagagccctggcgcatttcgccgagaccagggttaggtgcatgacgagtttgaactccgacagtaacgatccccaaccaattgacccggaccgctatcatctctgcccgcgccattcgatctcgacaactgccaacttacgaggcgcagggccgtttcattagccagagtaccggatggggcgtgatttttcgaacggagcccagttgcgctcgaatgaaatcgcgcgcgacgatgacgagaactggaaagtcgggctggatagtggtatcgctccggcgagggccgccttgcgcggtgcgatagagggtgaagacataggcgtatgactgaccatacgcctaattcgaaggtctcccgactggaagttgtctcgacgggcgcccgacgccgttggacattggaagaaaagcagcggatcgttgccgagagctatggcgggccacgactggtgtcagttacggctcggcgcaacgggttgtctgcgagccaattgttcacgtggcgccggttggcgcgcgaggaccggctgagcggggatgccgtgccggcgcttgttcctgtggagatcgcctttacgccgggtccggcctcgacgtgcacaccccagccgccgtcgtcgcctcctgcgcagcgcgcaagagtcggaataattgagattgagcttagcggcggctgtcgcgttcgcgttgaccgggacgttgacgccgaggcactgcagcgggtgcttgagcttctgaggcggcaatgatcccgatcccgagcggcttcagggtctggatcgccaccggccacaccgacatgcgccgcggcatgcaaagtctggccctgacagttcaggagagcttgaagcgcgatcctcatgccggcgatctctatatcttccggggtcgccgcggcgatctggtcaagattttatggcatgacgggttaggcatgtcgctctatgccaaacgcctggaccgcggcaagttcatctggccctcagcatccgctggtgcggtgtcaatctcggcggcgcagatggcctatatgctggaaggaattgactggaggaatccacaactaagctggaggccgcagagcgcgggttgagcagaagaaatctgcagctgctggcattttggggagtcacaacgcgctcgatgtgtgattcactgcgttgcatggatgctgatcgtgacgctgttccggatgacattgcggctctgaaagaggcgttggcggtcgagcgcgcgaaggcgttagaggttgtagcggagctcgcggtcgcccgcgcgaaagcctcggaagacggcgctctgatcgcccagcagaagctgcggatcgccaagcttgagcgtcagatctacggacaacggtcagagcgatcgtcgcggctgatggaccaattggcgctgacgttcgaagagctggaagctgacgccacagaggacgagctagcggcggaacgagctgtcgcgaggacgacgacggtacgcggattcatacgcaagcgcgccgagcgccagacgttccccgagcatctcccacgcgagcgggtggtgatcgatccgccgccggtttgtggctgctgtggcggcacccggctgcgcaagctgggcgaagacgtaacccggaccctggaggcgatcccgcgccaatggaaggtggtcgaaacggtgcgcgaaaagttcacctgccgggattgcgagaaaatcagccaagcgccggcgccgttccatgtgatcgcgcggggctgggcgggaccgagcctgctcgcgatgattctgtacgagaagttcggccagcatcagccgttgaaccgtcaggccgagcgctatgcccttgaaggcgtgccgatcagcctctcgaccatggccgacgccgtaggggcgtgctgcacggtgttggagccgctgttgcggctcttggaagcccacgtcatggcagccgaacgcctccatggcgacgacaccaccgtgcccgtgctggccttgggcaagtgcgatgtcgctcgatgctgggtctatgtgaaggacgaccgccccttcggcggctcagatccgccggcggcgatgttttattactcgcgcgatcgaagtggtgagcatccgcaggcgcatctggccaactacaccgggatcctccaggccgacgccttcggcggatacatcaagctctacgagcctgagcgaagtcctgggcttatcagggaagcggcctgttgggtccatgcccggcgcccgttcttcgccatggcggatcttgaggagaacgcgcggcgcaaagcggccggaaagaaggagatcgtcatctcgcccgtcgccatggagatcgtgcgccgcatcgacgctctgttcgagatcgagcgctctatcaatggccaaaacgccgaccaacgaaaggttgttcgccagacgcagagcgcgccgctcgtcgccgatctggaagcctatatgcgcgagcagtgcgccaagctctcccgcggtcacgatctggccaaggccatgaactacatgttcaagcgctgggcctccttcacacacttcctcgacgatggccgcgtctgcctctcgaacaatgccgccgaaagagcgctgcgcggcatcgcattgggcagaaagtcgtggttattttgtgggtccgaccgcggagggtgccgagccgcagccatgtatagcctcatcgtctctgccaagatgaacgacgtcgaccctcaggcctggctcgccgatgtactcgctcgcatcgccacccagcccgcccacaggctcgatgagctgctgccctgcaactggaagactgcgcaacagcaaggccttgcggcgcaggcggcttgatggggcacgtcaacaaagtcagccacgtgttcactctcagccatgtcgctgagatgctcggtgaagatgaggaatggctgttcgaggtcgccgaagaaatggacaccgaggatggccagctatgggtcgtcggcgtcggtgaagatggggtgatggcgttcaccgatgacgggatcgagaacctcaaagagctgatcgcaatccacaaggacacccccagcatcatcgaaaaccgacgccaagcgctcgctgcgatgatgaagcctaggaccgaagagtccgacgagatctaaccgctaaccggatagatcagcagatcaccgcgcttgcggcctacagcgcatggttacggatagtgagcgttggctggagttgagcaggcgttaaaggatctgttggccagcctggctaatcgagctgtacgcgcccggcttgaccgcctgcacatctgagacgagcgtcggcgctcgcgtccactcgggcggagtcttcgggaattcgagactatcgccttcgtaagagtcccaacgcgaagatgaggacgaatgcgaatagcatcattatggcagcaaacgtcgcgacggtcggaagatgtgcgggcgcgagatgccaatcaggtccgacgacaacacccgtgtcgaagccttgattgctattcaaacacaaaacgttcgcgaccgggtcgcttgcgagcgcggcagcgatgcgagcgtcaagagtccttgccaccgatgtgtcgccgggcattgcgatcatgtgcgcgagcgaagcccgcactcccgccagatcggcgtgggcacattcgttgaacggactccgttcatccgagatagtgcccggaacgagctcccaaaggcacgcgaagtgttgtagattcacaaagccgatcaatcgccgcaaggttggatcagtccgtggctgccgagccgccaattcgagtatctgcgagcgatatctcgcaatgatcagcatttcaccgtgaccgatcgcgggaatcgaaacgccaaccgttgccccctggttcgtggattgatgatgcgcgcggctcgacgcgaaggttgcgatgatcgccaatagcgtgacgggcaataaccaacaccgccttgctcgcgtgcgatggtagccggtcatttcgtatacttggtaggaaccaacgcggccaaggtccaacgccccccggcggccgatagactggccctcgtcaatggagagacatctatatgtcggaaaacctgggggtcaacaccaagcgcatgagcgatcgccgcacgaatgacggaggcatgagttatcgcaaggacagagccgcccgctgtaaccaatccatccatccatcggccgacgcgtgtcgtcacgtcagcgaaggactcgccgccatgtggggcagcgcggggatcgtacaaccagtcggcggcttccttgggggcttgtttctggatgtcggcgaaggaaagccctgcccaacgcccgaaatcgcagtcgcgcaggtttggctcgacctctgcgcggagctgtaggccttcagccgtttgagcagcgcaaagcgatgcgctacgcaacacaataccgcaggcaggcatcctacccgaaagcctggtcaagctttcacgcccccgagtatcgagtggttcgtcagccgagaacattgcagatcggacggagaagctcgaagccgaacacagtaggtgaagacgcaccgtcatattcgattgagagagcatttaactggcgaaacgtcgcggctctggtcggcgctcggcgacgaccttctcggcccacgcgccgaacagcaagccgagcgtcgcccacagaatggcttgtccgccgagcgaagccaaccgaaagttccatagcaacgccgcgggaaatccttcgggcacttcgtccacgctaggcagcgccatcgagaccccaaccatggcgacaccataagcgccggcggcaatcagcgcggaattccacacaccgaagcgcgcattgaaccggttgcgcaacattcccgccgcaatcatcgcagccagcgaaaccatgatcatcgcgaaatacaggctcgttcgcatgtcaattgtctccggaaaaccgaccgccggggggttggccggatatttgagcatcggcacgaggtaaatgctgacaaatccgaccaaggcgagcaacgcagaggttgctcgcggactgaaatttcccatccgtcgataagcgaacgcaaacccaagcgcaaaaaggccaccgaatgcggtgctataaaccgcgataccagtaaaaagcccgacgcccgcctgaacgggccggctgacaagctctggctccacccgttcgacaggcgcggtcagacccttggcagttgcctcctccgctttggcctttgatcttgtctcatccatcgcggcctcgaaggcaatcgcgcgatcgatagaaggctctccggtcagctttagaaagccgaaggaaaggattgccgcgatgaaaccgacgagcattccgcgcatgagcagactaccaatcatgtccttcctccgccgctgccatgccaagctctttctgctaccatgccgtagttctccctcgaagcataggcggtataatgctcgggtcgcgcgctgcgcggaacacgcaagagctcgatctcaagcagtcggctgctcctcgcatctgccatcagaactgccagtgcacgcgaccggcgaggatgcttaccggcccgcggtcggtgttataggccggattggcgataaactggtagtcgacggtcagtcgtgtcgcgggcgtcagcgcatagctgtaataggcctcgaaactcttctccacgctgtagttggtgagctgaccgtcgccgatcaggatgccgagaccaccggcattgaggaaggcgacgtgctgtttagaaatgccgttgagcacgccggcgatgccgatggtgtcgtcgggccggccccagctcttgccgccgatcgagacgccaagctgcatggtgcggtcgatatcggtgaaatcccagggctcgtgtttgccgtcggcccagcccgctcgtccgaacatgccgaatgtatcgttgatctgctgctcgaagttggcgctgataccggggcggctggtgtaagtgcgcaccgcattgatgtctgccggctcgcccgtcgcccgcgcgagcgcgaccgctgcggaatacgcacccatgacgccacggctcagatagcccgtgaccttgatcttgccgggctgcccccacagctcgtggcgctcctcgatttcgccgaccgcctggaagttcctgaaggtcggatcgagcgcgtaggccatcgggctggtgccaccagcgggcgtgttggacagatcgaagatgccggcgcggaaagtccagcgcccgatgtaccattcagccgcggccccatagctgtagccccagccgtcgccggcatagtcgaaggtgccggcattgatcatcgaccagttgaggaagtcggacttcgggttgttggcgtagcggttggtgtcaaaaatgtcgacgatgccgaagcggccggttgtcagcaccaggcgatcggtcgatcgagtgcccttgaactgatagaagtcatcatcgaccttctcgatgtcgccgccgagactaatggtttggcgcaggaaggcgcgttgcagccgcgcatagggtgtggacgagccaagcttgtaggactcggccgatggaaagccggcgacgccgtgagtgttgttgaagccgaagccctggtcgatctccggattggcccagaactccgcgccttgccacagcttcacaccggtcgagagcgtgaggtcgaatgtctgcttcgactgcgcgccaccagataggctgttcgttccctcatagggcgagcggaaagcggaataggcctggttggcgaaggtcgcctgcccgtgtatcgcgaagatgtcggccgcaggcacgaagcgcgacggcgcaagggcggccgggcgcgagggatcgtcgaagcgatagttgaggccgagacgaagttgatgcagcgagaaatccgttgccgtacgctcggtggaaaccggatagattagagtcttagtcggaaagccggtgaagagatattcgccgcgcaccgtccagctcggcgcgatcggcacctcgacgcccgcgcccgcggtccagccgaagcgccaaaggaaacgatcctccttattggcggtcaaaagttgcggaatcgtctgctggttgtaagtccaggcgagaccggcggtcgcatagagcagccaattgccgggcgcgtacccgatgcgggcgcgcagcgtgcccgatgacagcacggtctcgctcaggcttacaagaccgagcgtgggcgaagcaaaattcgagatcccgccgattgtgagtccgtccgggtcggggaaggcgggaaacgagccgtcggcttcgatgccgaacacgacgcggttttgtaccatatagttgtaaccgaactgcacgccctcaagccaactgccgccttcagtgaagccgttgggcgagcgatagaggccgaacgagcctgcggccggcacactacggccaagcgcgtccgccatgaagcgctcgcggccagcagcgagcccaacatggccgccaacatagaagccggtccagtcatagacttcggcggccggcgccttcacaggaggcgccaccgccaagtcggtagcggcagcaccggtcataggaaaaacccacgcagccgtcataaacgacgcccttacaaaacaatttgtcatccgcgccccacctcgcgtcgatctcgctctcaatctcaaaggagaatgagatggatcgaaaccggcgccacgatagtcactggggacgcccgcgatagatttagccgcgccaatttgaattgcccgcacgcgccaatccgagcgcaccgcgcatgccacgcaaggactgctcatcgatcacgatatcggcccatccacgcgcgaggcgcgggcttcgtcgatcgggcatgctctgcaaaagcgacggtcaggcaagaggtattgcaggcagcacacgcgccgaatccgcgcgatcgcaccgcgctccggcacatagcgaacggcatcgaacaggggattgggtgcgccacgccaattgcgctccacgaacaatctgcgtgcctcagcgagccgcggcaaagggccggacaagctttctatgcgaccaagcatcgcttcgaaagtgtggccggcattgctccagaacactcgcgcgacgacatcggtgcgactagaccacatttcaatcaatggagcgaggtggtcgtgcacgagggatccgaagcgttggaaaggatcatctccactaccatcgctcgcgccttcgattcggattgcatcgacacgcgcgtcgtccgacatgacgaatctcaaagtcggcaatccgaccgagaccgactgaccaagcaggacgtcggcaagcaaaacaggcgggatcaacgtgttcaaataccattgcatccagattgagtaggctgcccttacatcaaaggtgacgaagcgttgcgcaaatcgtcgccaaatcgcctcgcgcatcgcctcatccagcaaggcatccgcactgaccgcttcgcgtgggtcatcccgacttacaagacggctggccgccggtgcacagacgccgacggcaacctcattgatggcctggcagacttcgtcggcggtcatttgcgtatcccggacgcgacttgacgacttgcgcaggagtcgaaccgtaagcagccttgaagcttcgactgaagtgagagacctcgctaaagccaaactgggccgcgacgtccgccacgttggttgatccccctcccgcgagcatcgaatggcccgcctcgagccggcgttgccaaacccaacgcatgggcgttgtccccgcttgggcgaatagccggttgagcgttcgaagcgaaaccgagatgtggttagcaatgtcttcaggcgagagtccttcatcacccagattggcgagcacgtaacgctgggcgctcgccagtttggcttgattccggctctcaatcgctcggttcctttcaatctctgaatcgataatcgctgaaatcaagtccaaaatgcttagcgccactcgtgctcccacgactgaggatgacccccttgtcaacttcaccgacatcgctccggcgagaaggttggccagcaagatgttgagcgacggatcaccggcaagcttcagaggaaacgaaaggcttttgacctctgcgtggcgagaactcagaagactgcttggtatcttgacgaggatcgcctcagacgtgaagtcatgcacaaatctgtggcgcgcttcgcaaagaacaatctcgtactttccttggatgacggtccgtcgactttgcttgaagcatccatttccgcgaagcattatgctgaggtaaagcttatcctcgccctcgacagaactcggggtgtccttcaccttcagaagcaggggaactcgaaagcggcagatctccaaccgcccgaagatgcggttcagcacactggcatccgagttagctttgctgcgcccgacgctcacgcccgaaccggcaaagccactcgttgcttcgcatcgacgattgaagctatcccaaattgctcgatcacttgcgaaagtctgtgtgagcaccgcttctgatcaatccatcaagttggtggaatccaaattctcatgactgctcgagtgggatagcgagcccactacctacctcgtaggttacggaccagatagcaggtgcgctgtcacgagaagcagttcggccagatcaactgaccgaaccaaccagattcagtgacaagggaagccgagcaggtggcgcccatcatgaacgaactcatgaacgtacgctccgttgaacagagccgccgcgccctgctccacgccgacgaaatagactcccagagaaagcagaaggccggcgaagacagcccacggcaaaatgtcgcgaacgggaatcgcaatcggaccggcaacgggaagagacgtagctaagaccatcacagtacctcctagttaaatccacatctagcttgaatcgcatgttcttcgatgtggcgctcgccgaacagcgtcaaatccacctgcctgaccacgttagcggttcagaacactttcaaaatcggtaccgcgccacttgttcggcgcccggcttcccgtcgtcagctggatttcgccgatttccagtcctccgactgctcgaatgcatgcgccgctcgataaatagtcgtttcagcgcagtgtttgccaatcagcatcatgcctaccggcagcccctggctcatgccgcacggcaccgacatcgcgggatgaccggtcacatcgaatggcgacgtgttgccaagcatctcgaacgcccgctgcagaacttcggatagctgggcggacggaccgggtaatttggttgccttcaagggcaacgtaggcatgagcaacaggtcgcaatcggccagcgcctcatcgtacgccgcccgcagccgccgcgccaggttttgcgccttggcatagtatacgccccggtgcttctggagcatgtattgccccatcatgaccgtgatcttgagtgtgtcagacaagctgtcggcgcgcgtacgccaggcgtcatgcgctcgcatcaggctcgtgacgtaaagccccttccagttaaatccgaagccgttgccatgcatcatctggaccgtcgctccttcgtgggcgatcgccgaccagatggctcctcccacgagatgcatcggaatcgatacttccctcacgtcagcacccagcctgcgaaatctgtctgcggccttcctgaccaacgtatccacatcctcctcggaattgggatgaccaaaaccttccttgaccacgccgatccgcaattccttaacattcttgcctagcgccgcagtgtattcggcggtcgagatattaacctgccgagggtcaaggccatcgggcccggccagaacctctagcagcagcgcgttatccgcgacgcttcccgtgatcggtcccgtgtgatcgagggtggtctcgatcggcattacgccagtataggggacgagcccgtgtgtcggcttcatgccgtacgtcccgcagtaggcggaagggatgcgaatcgacccaccttggtcgccgccaatcgccatgtccacctctcccgcggcaacgagtgcggcgctgccggaggaggagccgccggcggaatagccggccttgcgcggattgatcactggacccagggcgccagtatggctaccgccagaaaaacagaaatactcgcagtgagccttgccgacgatcgtcgcccccgcgtcgagcattcgcgtcacgatagtcgcgtcaatatcggggatatacccctccagactcgatgcgccattcatcatgggcacgccggccagcaacacattgtctttgaggacaacggtcttgccctgcagtttgcccgacgaagcacctttcactttggacttgcggtaccaggcgttatagacgttctcctcgccgctcggctggtagcccgtggtgcgcggatactttatcaagggcagttcgtccggcagcgcgtcgagcgcattgtagccggccaccgctccttccatttggtcgataaaggcctcgatctccgcaatcgacatgttcatgccgagcgtttcacagatctccgacatctctttcgttgtcggcctcttcacactcatgacttctctccaaacaggaatactagaactcgtccgtcgctgcgagtggcatgcagccagcggggatcacagcgtgcagaacggcaggtgagagcgatcgaactactgcgccaggcaagccgttagatcagcgatcatctccgttttcggaagcccacggccgatgaagactagtttcgaagaacgctcttcgtctggtgaccacggcgctcccagatcggaattcatcaacatatggatgccctgcaagattacgcgatggtcgagaccgtcaaacgcgacgattcccttgtatctcattaggtccctacccacccgagccactgccccgcgaaagaactcctgcaatcgatcttgatcgaacggcttcgaactcgaaaacacgaacgattgcaccgaatcgtcgtgcgtgtggtgatcctcgccgaggaagtcgggctctatttgcagaatgctgtcgagagagaagccccgaacgtcaagcagttcggcgatcggcgcgtcgccaaaacgcgcaggcttgattggcgcccgcggattgattcgcgccagcctttcggaaagccgcgccagctcctgatcgctcacaaggtcggccttgctcagcagaatccggtccgcgaatcctacctgctcctgcgcctcgtggaattcgtccaactgatcggcagcgtgctttgcgtcaaccaccgtcacgatggcgtcaagcagatagtaggaggcgacatcatcctcgacgaagaaggtctgggcgacgggcgccgggtcggccagccccgtcgtctcgatgacaacgcgatcaaacgagtcgtgattggcttcccgccgtttgcgaaggtcacccagaatccgaaccaagtcgccccgcaccgtgcagcagatgcagccgttgttcacctcaatgatctgctcttgctcgcctacgaccaaaaggtcgttgtcgacgcccgcctctccgaactcattttcgattacggcaattcgctcgccatgccgttcgcgcaaaatgcgattcaagagcgtggtctttcccgcgccgaggaagccggtgagaatcgtaaccggaaccttttctcttgccgtcaacatcgagatcgcctcacttcatcacgttattgggccccgccgaaccggctgcgaaacctctcgcgcgcagctgcgccttgttcgtcacccccttggagatcagaagcttctcagccgcatccagccattgctcatagtaggaccgcggaacgccaccggatgactcgatggctgtattgatggccacttccttggagaagcaatccacccactccgaccactcgaagaatccgtcctgagccaggcgaacgatgatcgcgaacaccttggcctcccacggttcgtcgaacttggtgtcgctgtccggaccgatcgggatacccttgcaaagcaggggcgattgagcgtcgacctgcatgggcgctacctgtcaatcaaggtccatgtagtcgtcaaaaacgtcgactctcaacgtatcccgctcggacgccgcttccccccacacctcacgcgccgtgaagcgaacgctgtagcaatgctgtggtttctcgccctgaccgtgcgcgtgagtgtcaggaaatgcaaacacgccgtagtcggcttcgacgatgccgtgctttccacgcaggtagcccggcagtcgcgtatgagtggcagggttgtggttacgaacgagaaccctgtcaccgacccggaagcgcggcgcgacgtgttcggcaacacggcacgaggcaccggtggatgcgacggctggaacaatatcgggtgtcagcaacatcattttcctcccttcttcacgaactcagcgatgcgagcatcgtattcctcccgggtcacgaagccgcgccggatcaggatgtcttcgaacgcatgcagccaatgttcgtagtaggtcgactcgaaataatgcgcgggatctatgttctcgatggcatgacggaactcgtcgaccgagtaaccggcaaacacgaacgtacccgcaaacatcccgaacacacgccgctcccactctgcatggaagatcggttcattttcctcgcgcacgatcggccctaagccgtgcatgccgcccaaatcgtgaactccgttcatcgaatcgctcctctgtggtcaatgctcggaggcggcagatgaaccgagcttcgtgacgccgatcatcgaatcccgcgtcacgaggtcagcaagctgctgctccgtcaatttctccgtccctgcggggcgctcgggcaacacgaggtaccgcagctccgcggtcgtatcccaaacgcggacttcgacgttgtcgctcaattcggtgccgaattccttcagcacgccacgaggatcgcctgcggcacgcgcgcggtatggcgccgacttgtaccacaccgggggcaaccctagcgtcggccacggataacaagagcagagggtacacacgacgaggttatgcacctccggcgtgttctcgaccacgaccatgtcctctccttggagaccggagaaaccgaactccttgattgctgacgtcgcgtccgtaagcagccgattcttgtattcaggatcgacccaggcccgcgcgaccactttggcaccattgcgcgggccgaccttgtgttcgtaaatgtcgaccaaagcgtcgagcgccttcgggtcgagaagtcccttttcgaccagaatagactccagagcgcgcgttcgaacggccggatcagattcgggttttgaaacggtcttagacatttggcttcctcgctgaacgatcgaactcggatcaagggcattattcgtagttcaaatattcgtcattactagtaatgcaccgaatactcgccttgtcaaactgtgaaatgctgctcgcgcaaaaaaattgcgagcgggcagtgcaccgtatcgggctggcaaaacgcatcatcctcgcgtggacagcggctgacgaaccgcgcacggcactgacacggtctcccctgggcggcatagtcgatctcgaatacggccgtcaggcgcgcgcgcgtcgatccgatcgccccgaccccagccaattgggcgcggaatccaacctgctcttgatgcctgattgcctcgctatcgattggcaccagttctgctccggtccgctcaagagccctgctcgatcggcgctatgcaacgcctactgctcggaggtcagccagaaacatcgatgcaaccagccttgcgatcgagcgcaggcgatctgcgatctcgcaaatctgaccaagttgacggttactgtcaactacgatatttgtacttacgactagcttggacgcgcaaacttggcgctcaaagagacgggcgcgttctgcggaacggtgttgtcttggcgtcggggctctgacattcgaatcttatcgccaatgcaatctcggaaacgaccggcgcttttgctcaactattcagcacgcgacgcccatgcaacttgcagttcgccgaaacttcatccattctatccagaaataatcccgaacgacctgcctgaattggaatgtctcgtggccgaccgaacgactatgcaagatcaaatcgcctatttgatcgccaccgttaatcgtcagcttgaggaagaactgcaggagtcccttcgtcccgaggggattccaatcgagcagtttcggatcttgaatgcattgttcgaatcagacggtctatcgatgggagaactcgcatcggctgtgctcgtcgaagctgcctcactgaccaagattgtggatcgcatggtagccgaagcgctggtgtaccgcgccgcggcgtccaatgaccggcgccggatacggattttcttggccacaaagggaaaggcgctgcacaggcgattaaaggtaaccggtatgagctcccacgtccgg

SEQ ID NO: 125 - DNA, 77853 bp, Bradyrhizobium colbertium
cacccgcgctcgctacgtgtgcggcgcgtgcggcggagacttcgacgccgacgtcaacgcggcgaggaacatcctcgccagagcaatcagctcaaccggaggacttccggggatggcctgcggatcgagccagactatcggccggacgcaggaaaaagacgctcgcgagagcagaagctcggcccttcagggccgagagtagtcacctgcttctccagaccctcgcgcagcttcttcttcaggtcggcgagccgtagtccggcgtctacgatgggtgccggcgacgacaggtcggcttccaatacttgacaggcgtccagattcgcggatgccgtcgccgacacgtcacccgaaagatccgcaggtatgaaggctttgtccgatgtcgcgcaccagatatgcacggtcgtcgccgccttcacgatgggcccgatctcgcaaagcgaaaatgcgcgcagcatcgagggccttggtcttgtcaatgccgagcgcacccttctttaggcccgcacacgcgtcgtaccgtggtcggcaatcgccatctcggcagccttcttggcgatcttcgcgagcgccgtgtcgcagttttccggagcctgagcgtgcactggccgatcgagaaaggtaaaaaccgtaaagatcaaaaggaggctccgcatcatggatgaaactcctcgttcggcatggaccgaagtgcgacgtctgagtgctccggagagacgcgaaactcagacggcgcagctcggtttcggctgaagtctgcccgatcgcgtcgacggggccaagcccttgcgtcttccaagccaaaggccggacatgccaaccggcgacccgccgacggtccagtgtcggagcgcatgcccccggcacttcagcgcgcggtgggaggctacacgtccccgccgaacggctacaggccgctaattcttcactcgtcctttgcggaggtcttgagcagttcggaaagctggactccgaagacacgggcgatctgctccaccatcaagatcgtcgggttcgacctgccgttttccaatagcgagacggcgttctgctcgatcttgagctcgccggcgagctgatcctggctccactcgcgcgccttgcgcagcctacggacgttcgcggccaaggcgcggatcgccgcggattcccgggccggaaatcgtttgcggaattccttgttcgtcggtcttttcttaccggcctgcttgcgcgccatgccggcaaatcgaacgtatggccgcaattagtctatgtgatttatcacatttttaagccgatacgcgtaaccgtctccagaacaggaggacgagaatgaacttgttcgaactcgaaggcactctcaccgccataggtcaaaacgtcttcagcaacgacggcacggtctacgcctatctcgagatcaccgatgcgaccggtcgacggacgctggtcgagaaggtcggagtctgcaacgacgtcggttcccagctcatggtcggactgtcgggccgcttctacgtcgatcggttctttcgcacgggatcgctgagatgccaattatggggcctcaagacagaacgcgtgtccatcgtagacagcaccgacctgcgaaagaccatcgccgccgttcagatcctcaagggcatacccacgatcgtggttttagggctgggattgatcctgatcgcgtcgggtgtcggtcttctcctgcaatgctcccgctatgaccgaagaatgttcttcggggcgagcgccgtacccccagcgcttcctaccgccgcggcccgcatatgaagccgcaagtggtcgcaatctgcgcaatcatgtcagccgcccccgccgcagctttcgatcgcaccatctacaccgccacgcgcggctccggatgtgtggaccgttcgaccgcacatctcagcagatcggtcagcgccgggccgatgtgcttttccgtcgagctgctcgacgagggcaatctggccgcgattgcgatcccgcagccggggcgtatcaccccaagcgcttacgtgtggcgcggctctgacaacgtgttcggcgaccggctcgaacggagcttgatggcgggtaccccgcgggcagtggttctgcggatttggcgagccgagaacgatgcgaccttccaggaactcggcgtattgaaagtcatgccaggcggagctcgccggagcgcctccatcggtgcaaagggtccggacgccaacgtgctggctcgcgaagaggcgggccttgcatcgcgtcgaacgtctatcgacattgccgatcgcatgtgaatattctccaacgatcgcggcagaaccgtcagaagacgtgtgcgagccagccgcgcttcccgcgccttcggaaccaagagcttcgacggcgtcacctcgttggatcccgtcccaaggtcggcgttcgaccgtcgatggttaccggagatctcgctcgccgttcggagtgcgccgcttccacttcttcggtccggcgggagacaaggtagcgactactttcgtccgacgcgggcgcgctgtctttcgggtgcgtgagcgagaatgattcgcgcaatcgaaggagatttccgcatgtggatggcttgcgacaggactcccatacccttgttcatggtctccaattcctcgatcgttgcctcgcgcgcatccatatggtggaaatcatcgaccgcgctttcggacaggaaaacgcggcccgtttcgtgggtgtaccaaagtccgtgcacgagcttgttgcgctgcgcgtttagcttcgaaaactgcaggatgatctcctcgtagagatcggatttgcgacggtttatttccgatttctggaggcacgccagcatcaacgattggcgagccttgttgcttacgaccgagtggaagatctgccgagcgggtgcgctcctgcttcccaaaagatcctgcaacacctgaatcatctggtcctcgacatgtacccaggtcgcgacggtctggccgaacaacaacgtgaacttgtcgttccgtatcccggcttcgtagcggccgggcagggcgtctttcccggtcggtctgacgaaccgcttcggaaccttcgctcgcgtcttccaaaccttcgatgctcgcccccccgtcgcgccttcgactccgccccgcttttgagacattccgactcctggtgctccttctgctttcggaagcaggtggaatccttacctcaacgatgagtccacatccaggtcgcgcgacacctggagccttgcggtccctcagcctccggccgcatcgtgttcgtcgatatccaaccaggagaagttcatcaccggctcgtccacgttcggcagcaggttcagtttctcgatgaacaacggatgtattacgatccaatcggaatttcccagaaccttttcgccgaagtccagcgcttcgggatagatgtggtagaagagatcccgcatcttgtgccgatttccgacgtccatccgcttgcgtcgcaccccaaagaaacccagttcgtacagcattgccagcttggcttgtccgctcatctcggtctgccggtgcatgaacaggaaaggcagatgcgagagccgttcgatcaccgcgtcgtactcgagttgttgcggtccgttctggaaaagcttgatgacggcgtcgatgttggtgatgtggtcccgcatctcgcccagccattcgtgctcgatgatgagattgttggtccgggcgatgacgatgccgagcacgctaggagccgtcgtgcgtttgagtcttctgttgtccttaagaacggccagaagctcggcataatgaatgaggatatcgcgcggacgccatagggtgtgcctcagaacctccaggaagacatcgaattcgaacgactttccgttcacggtcaccgtcgccgatacgtccagctccggcgcgaacttctgcatgccctccttgagccgctccggaggcgaggcgcccttcattttggaagcttccgtgtcgaaaccacccgcaacctcgatccgcttgcgcagcaggctcaccaattcgatgccgctccagcgcagttcccgcgtaggggcggccaacaccgaatcgcgccggtcgagttgaacttccaggaaccggtccttcggcacggcggcgacgatggtcaacgacttcagcttcccgagcgttctgcgcccggcgcgccccgatgggcgcttgatggactcgacgacctcgatgaacgccgtcagccagtcgacctccgtcttgacgaccgccgcttgcgtggcttctcccgcccgtcgcgcgtcgttccgtgcgcgttggaagtcggaatcgaaaccgtcgaggcacagcagatgccggcgcgaggcgatcgcggacaggttgttctgaaggggaccgctgccgcctgagatccattcgaggagactgtcgatatcgagatttctctgtaggaacgcgtcgaaacgagcccgcgacccgctcggcgccagttccaccatctggcgaatgaattcggagaccagttcggaagcggccgtgaattccgcggcctttccctccgtgggcggcatctgcagcagctcttccgcctctcttctcacgacgaccgggaagtcgtcggcgtccaacttgcgttgagcgcgaagcagctcgagatagatgaaggcggcccacagaagcgagaaggcctcgtatttgttgcgatgcagatagaggaaatccccgctcgccttcttcctatattcggtgagaccgacgccatgcacatcccatcgatcgaccacgagttcaatgggtgctgcgaaggattgatgcttctccatgatgctgatcagcgtcgtcttgcccacgccctttcttccgatgaggaggtaatcctcctgctcctcgacgcggaggtactgacgcgtcttgacgaagaggtcctcgcggaagctctcgtaaccctcgcgctcctgcttctggcgcttgaaatagtcgatgtcgaagtcccgatacgattgccgccggcggtcttcgtccactgcgacctgctgcaacgaaagaagacggtgcgctatcgttcgtatcgggccggccacgttcttcgccgaacttgcggccaacctccggccgccgtcggcgttgaacgtgtagaaattcgacaggtcgatcgaccgctcactcgattcgaactgcttgggaagagccgtttcaaacgtccctttccaaacgatcggtatcgcaacgaccgggtttcgtcgcgaccaatcgtcgtttcgtctgagatatatctcgaattcccgaccgacgccgctctgaagctcgcgcagatccacgcgacgcttgtattcgggagttccgacgatgatcaaggcgtcggcgctttccagtgccgactcgtgactcgatatggtctcgccgagctccaattcgtgcgacgagaggtattccacgttcccggcggtgatcttcttgagttcccgtatcagaacggtgagctcttcggcattgccgtcctggatgcaaaacgagacgaagcatcggacgatctttttcggtcgcttggccattcgatccatcgtctgtctttttcccgtgcatgccgcacgcagaagaaatcgtctcggccccttgaatgagcggacctcaaatgcggccagcctctctttcactcctttcagagacaaccccgggagaaccctaggtccagaacgcctgcgcgccgattgccgccgctctgatgcccgccaaaccctctcccacccgccggttcgctcgccagccctttccgatcgccaaggctccggtaggacagccggaaatggccggggcctgtcactgcggaaccgcttgtccacgctagggaaatccccggtagacaatggtcgaaaacggtcttctttggacacgagaatcatggcatcggggacgtatccccgagaaggggcgaaccggcccctaaggatacgttccaggaggagcgaaagcttgcaaaccgacatcctacaccgcttcctggacaatcgattgatcaacatcggtccggacgacgagcgtctggcgcggttgcgcgcttccgcaggtgccatcgccgagtcgatcggaacgcggccggagcgggtaccgcgcctcgccatggtggctttcgatcctaaggtgccggccgacgaccccgtcatggacgaggtggcggaagcggtcagcgcgagctggaccacgtacacgagcgccttcgcggatcggccgatcgtgcttttccgtgccgtgctgctggaagctttgcgcttatctcaggaagaggaccccggcatcgcgggttcgatcgccttgaccgcccgcaacttgcttcccctggtggatctcggaagagaaggcgccatctggcgggatcttacggacaggtccgaacgtgctttggccgaaggagccgcaatacgctggtccacggcgatgaaggatgcacccgccgccgccgttctgccgacgcccgcgaagccctcgaaatccgaccgcaagcaattgctttcgaaggtggaggccgccgtcgggccacagaacgagaaaggcgaaacgctcaccaatcccaacacgcattggcccaacgcagggaacccttggtcctacatgttcgcgcccaggatggcgaacgccatcggcgaagctctcgattccgccgtcgaggccgttttggccagccgttccgcgaccgatcaagccatgcaaaaggcgatgcagagcttcgtcggcgacgccctacccggctttctacgtgccgggcaggctatggaacgcaagatcgatctgttgtggtggcgccagaccatgtactccaacaccgcgcaacgcagttatcgcgccatgaagcccgaagcggccgccgtgcaaatggccatcgacgtgttcagggcgacgccgcccttcagcccggcgagcgtagaatattttctgcgcgaggcggttgccgacgcgctcggcgagggaaaggggcggacggcgagtctcacgctcaagcagatcgcatccagcaggttcatcaagtcggaggtcgtcaccggctcgattccgttcgcccttgccgagggcccgggccggcgtccgatgatttcagtgttgttgggggccggggaggtggaggaggccctcggtctcgccggcaccaccaaactgaccctggacgatctcgcggtgtggctgttgagggaagcgcaagcggcagccctcgcgaccggagcgaagcaatcgtgatcggtcagtgtccattttccgattgcttcgctccggacaccagctgtgtgctcggcgagctgcaccacgacgattgccccgagttcaagaaatccgttccgagcggcgaacaagctgcgtcccgcatcggcgctgatgcgatggtcctcccatggagcgggaacacgctcggcgctgcggaccgctccttcgtagccgcgaggaccaacccgaggatcatcggtatcgtcggccccgcgagggcgggaaagacgaccatgctcgccgcctggtatctcgttacgggtcgcggcgcttcacccgaagcccgtcgtttctgcgggtcgtacaccctgaccggttgggagaacatcgcccgatcgatgcgttggagttccggcggggcgccgagttttcccgctcacacctccagcggtgccggcagagtccctgggcttctgcacatggcgttccgaaacctaagagacggatcgatcgaagatctctttttcgtcgacgcgcccggcgagtggttcagatcgtgggcggttaaccgcgaaagcggcgaagccgaaggcgcccggtggatcgcggagcatgccgacgcctttctcgtcgtggcggattgcgacgccctggccggcgccgagagaggcggcgcgcggaacggtctgacccagatcattcagcgcgtgggcgacgagcgggatggccggccggtctgcctggtctgggcgaagtcggatgtcgacgtgcccgcgccgatcagggcatccatcgagaccgcggcggacaggcatatcggcaatcattcgaccttctcgtggagcgtgaagccggcttccacaggcgaaggaagcaaagcctttactgagcttctctcctggaccatcgcgagccgaggcgagcgctatctccgacgcgccgccgggcaagagaggccctcggatcatttcatggcgttcggtcatggccgctgaacgggcgaaccctctccgcctcatgctgatcggcgaatcgaacgtcggcaagtcgcattacggcggacagttgctgatgaggctcaatcagcggacgtacgcgctgcgcatgacggcgcagccgacgaacatcgacgcattcaacgacgtcaccaaggcgctgcacgaaggcaaatcggcaccacacacctcggcgaacacctacatcgaaagcctttggcccgtcgtcgacgacgagggccgggcggtggatctcgagtggccggactacggcggcgaacaggtcagacgcctcatcgacgaccgacgcatacccgtggattggcgcgaacgtcttctcaaggccgagggttggatcctgatgatcagaatccagcggtccgccgtcgaggacgacgtcttcagcaaaccgctggccgaagcggcgtcatccgacccgacgagaacggacgcgaaagcatcccttcaggcccgaatggtcgagcttctccagatgctcctctacgtcaggagtgccggcacctcgcgggcgatcagggatccagcgctgctggtgctcctgtcgtgctgggacgaactgggcgatgaaggcgagaagtcggcgccgatcgacgtgctgaatcggcgcatgcctctgttggccagcttcgtcgaaagcaattggcgaaaggggcgctacgatgtgctgggcctgtcagccttgggtcggccgctggacgccaaccggtcggacctggattacgtggactccggacctgaaagcttcggctacatcgtggaaagaaacgggcgacgaaacccggatctatcgatcccgatctcccgcctcgcgtcgatcgtatccgagggatgacgctgcatcgtgcgacatacggcgtcgaccgcggcggccacgcgctgcttcgaggcagcacgcaggaactgaataaactgttctccgaagtcgcttggcggaccgatctgcccccacatgctccctacggagtggagtggcagccgtttctgcggggttttcccgagaccgaccattacgtgctgatctggatcgagcccgacggctccgccgggcgtgcaggcatggttcgatctcacgcggtgttcattccgttcgacgcgctggatcgatcgctcgacctcgaaagggtgttcgccgccctcaggcagatgccggatcgagacgtcgcgctccaaccattcgaggccacgtttcggcgagagcgcgccaacgatcggccatcggcgatctcggtcggcctagccgaggcgctggtcgcggccaagaaaattccgatcgtccatctggggcaggagggattcgacggtgccgtcctcgagctgctcggacgtcttccggttcccatgaggcgccaattctccttccggctgagcttcgggccgcaggacatcgagaacgatcagcagaccgtcgtcgccaccccgccttcgttggagcgtcgatggcacgattaccggatagcacgggtgccctcgagcatacaggggacgcccgcagttggcatgcttctcggcctccccgaaggggccggcctggcgaacttcgcggacgcgctgggcactccggtttctgacgtcagaactctgtcgttgctgtccagagcgtacgagctatcgaggtcgccagaggcttcgcccacggctctgctgcggctcatcgatgtgctgtcgccgtcggccggccggggcatcgcgatcaaggcgcgtctgcttgcggcgggtgccgtcgcggtcggctcgatgtcgatccctcagatccgcgggctcaaaaacctgccgctcgcggcgttcggcgcgaccgaggactattggtcggccgtccggcgcagaattccgtactttctgaaggaagacgtcgtggaccgttccatcttcgcgacgctgaaggaggcgctcgccggagacgcggtcgaagcctggtccgaggccgtcgccgagggcttccgcgacggcgcatcgccgctttccgtcgccgcggctcgagcgatgtgggatgaaatcgtggagagcgcttcattcggccccgccgttctcgatctcctgccgcgcgactcggccacggaatcgacaatcgcgtcgtcattgccgagcaccctggcggaggagacggcttcccggctcgtgcccgccgtgcgcagaaggaagtggctgttcttgcatggcctcctgctggcggcatcgcgcccgccggccgaagcggttcgcatgcagctcgaggtcgatgcggacccacgcttcgaaagcggcgtcaaagccgcgatctcgagggcggaagatgccgagatcctggccatagcgctcgagatgacagaggagcgcctcgccaggctggccgccaaggcttgcgtgcggaccccttctctgatggccggtttcgacacgagcggccccgcctggctcgatatcgtgctcgccgaacccggtctggtcgaaacgatcgatcggaaacgggatctgttcgacgcgctgatccgcaaggagtcgcgcgatgccgcgagatggctccctctgtggaaagccctcggcaccagcgctgcagccgatttgtcggacttgccggcccgccgcgagatctggcatcgaattccgtacgacgtgcggccgtcattcctcgccgccaccgccgacggctggctcgcgtcctggcaggacggccgcaatcccgagccggcgaccgaatccgagctcgccaacttcatcacggatcggagccgcatcgttccatatctcttgcggtgcatcccggaccggctcggatcggcagtcgcgctctttcgccagttcgaaagactgtccgagtcgctattcgtcgaatggatcggcgaaatcgggtcgcgcatgagattcgggggcgtcgcagaagcggactcgcaggccatcggcgatctcgtttcgatgcgcttctggaggagcgcggcctacgcggtactcgacatggctcggcatcgcggagacatgatgcccgcgctgacccgctgccaatggcgactcgatatcttcgacacgatgtcggtgtggcgactgcccagcatgcggaagccgaacgacgacgatctctggcgcatcctggagaatatcgtggccgacctctatcccggcggaccgctcgagaacgagatatggagcagggccggtggcgcaatggatgtgctggacctggcgggcaacggccgaacgcgttggcgatccgccctgagaagacttcgcgcgggcggcggtggcaccagcggtagcaggttggtcgcggagatgcgatcggagtatcccgcgaaccgggatctcgaaagcatcgtcgcgttcgacgtcttcaagccggaggaacgggagcattgagcggacgcttcgaatggggacgggctttgctggtgggcgtcgccggatattcgcggctcaaggcgcttccggaagtcgtgttgaacgacgtcgccgatttcgccgacgtgctgcggtcggagaactattgcggctacccgccacaccaggtccggacgttgtgcgattcggaggcgacgaacctggccttgagaaatgcgctggccgacctcgcgtccgcctgccgtccggaagacaccgcagtgttcgtattttccggacatggtgagcgaatcgaggccggcgccggcacgggctcctatctctgcccggtcgaattcgatccggcacgaccgcaggaaacgggcatatcgcgcgaagagctgagcgcgatgctcacggccgttccggcgcgccgcctcctagtcgtgctcgacgcatgtcatgccgcgggatcgatcgtgttcaagtccgggacccaggcgatcacgctcaaggcaggcttctcgggagcggatttcgagcggttggcgtccggaacggggcgcgtccttttcgcttcgtcgcgcgaggacgagacttcgatgatcctcgagggcgacaggaacagcctcttcacgggtcatgtcctcgccggcctgcgcggcgcagcgccgcgcggaccggatggaacgatcggcgtgctcgatctattcaagtacgccagcgactcgatgcgggagccgtcgcagcatcccgtcatgaaggccgaactcgaaagcaactttccggtggctttggccgcgggagcgggcgccactttcaagtccacagccggccgcgcgaaagaggattcgtggtggcaacgcctggagcggatcgccgtcgatctgtacccgtcggggcctcaggagcaactgatctggagccgggcgggctgccaggtgagcgtcctccagcccgccctccacggccgtgcggcttggcacgccgcgctgctgacgctgaagcgcggcggaagcgacgccgatgcaccgaaccgacttgtcagtacgatgatcgaggagttccccggcagcgaggcgctcctgaagctccaggccgaagcgcgctgatgcagactgtgcgcgccgacagtacctaggggacctccgaggtcgacagctccctgggcttggacgaacctgtcggcatgaccgagacgaccgacgcaagggccgacaattcaggcgccatggacgcggaccacgccgctttggccgcgctatcgggcgccgactacgtgcgcgacaagctcctctcgaccctgacgatgggtgcgttcgacttctcgcgccgggtctacgcgctcaagtgccgggtcaagagcaaatcgaaactggtcgagaaggtcaggaagaagcaacaagaaaaggatcccgagtaccacgcggcgaaggtcaccgatatcgtcggcttacggttgatctgcctgttctccatggaccttcccaataccgtctccgagtttctcgactacatttctttgatgcaagatccgaggctaggtctctttcgcggcgacaagctggaggatgccgttaccgaagcaatcgtctacgcatctccgggcgatcccgccgtctatcgttcgatctacgagaatctctcgacaagactgaggaagggcgccgaaggcggcgtgaactgcgagatggtgccgccctcggaagatcatcggtactcttcgatacacctgatctgcatgacaaacagctactcggatccgccgcgacagattccgatcgaggtccagatcaggacggcgttcgaagacgtctggtccgaaatcgaccacccgaggagatacaaggggccggacttcgccaaggtatacgaaaacgacccgcgtctgcaggggctcgcggacggaatcggccggcgcctgaaggacctgaaggggcaactggaaagctgctcgtcatcggcggagcagatcagaaaggacttcgacctgctgagcccgatgcctgcgcagctgcaagcggcatcggaagccaatccgagaatcctggcgaagtcgtgggcagatgcgaaggcgccggaagccgtcaggcgcaagcttcgcgaaatcgaggagtcgctcaccgaaacctacggcaaactctaccagcacgacagggtgaacccgggtgcggatttcgtcgagctacggagggagctcgaggtcgcgatcgaggcgatcgacaaggtcggtgcggactaccaaaagaaggcggcagccgtattcgaacgggacaagacctacaagtactacagcaacatggagaagggactggcgtattactggttggggcgcatcgaccgcgatcaaggcatgtcgggatggtccggtctgaacgagacggcgttgacgacctatttcgatctccaagcgtcgctcgccgcccccgacccgcttttgtcgtatcggatcgccaacgccctcaaggtaaccgatcagctggatctggcgaccgaaaaactgcaggaagcggtcggggccctcgggagcgatcagcggctcgcgaccgatagcgtctatcgtgcgatcataccgcgtacgctcggctacatgctgtggcaacgcggtcagcggcacctcaagctgggaacgacgctgggccatccggggacattcggcaaagaggcccgtcagcttttcctgcaagccatcctggtgacgctcaacgggcaaaagaacatagggaccttgaagaaggaggatgccgacagcgagacggtgaagttccagggcaatctgctcgcgtattcggtcgattatctttcggccggaggctcgagcgaagatctgaaggcgaacggaatcgatcccgagacgttgttcgagcagatcgagcagttcgaaagggccgccgacgggaacgccgcgcgccttgacacgtgtacgagggtctatcatctcctgggaagacgggaggcggccctccgaaccgttaaagcgttggaggaattgttgagggacgaaaaatccatcaaagtaagctattcttccgattcgatagcgtatatgaaagatacagtagctctcatacgaggcatgtcatgaccattctacctgaaggcgatctcggctaaatagctggaaataatcggcttttctgccataggcgcccgttgcgggcgccttagcattatatagctttcctttaccttgttcccgcctcagaccaataggtcaactgtgggattgcttacgatggccgtgccgactttcgggaaaatggtcgtgcttgtgacgcttcactgacgcattccccggccatcggaaaggcccccgggcgcccaacggctggcggcgtacccgatcccttccggtcagaccgctccatgcgcgagcgatcgcagcattcggcgatgagggccgccctcgaagcaacttcccggcgccttaactaggcgcccgagtccgaattcttagtggcggcctctcgatggtcgcgcgagcacggccgcatgtccggccggccccaacttgaggaaacgaacaactcctcagatgcagaaacccaggtcgccagagacgatctggatgcgggccgatcagaattcctccgcgtacataacgccgccttcggtgaagtattcggcgcgcgtcttcccgtcgatcttgccgagcgaaaggatcgcgaagccgtgctcgtaggcgccatcattgacgcgaagtttggtcgacttgatcagttcgggatggtccgacaggcccttcagcaccttgtagggcttctcctccgcgaagatgggaatcgctccgtgtccgacgcaacgtccgcggtcgagaccgaggtatgagccatagatgcagagattgtgttcatggccccaataccaggccgcgatgtcgcccacagcctgaagcttgcggagcaacgcaagcagagacggattgtgcgcgagcagtttgccgccgggcgacggtttgccgatctgcgagaaggccgaaaaaagctgatggtgcgaagccaggatggttcggcccttgaactcgcgcacccgctcctccaaccaggcctgctcgtcgtcctcgacataggtcaatgcatccgtcaccgagagcgggctgtaatcgtgcagtccggtatccatcgcgagcagttgccaggccgaatcctccgacctaagacagaagaagctcgactcctgcttcatccggccgccgttcatcttgccgatcaggtcgtagtagccgccgccgccactatacatgtcgtggtttccggcgagcgtgaacgtcggcaccgcatcttcgaagacgtcgcggatcacgccgctgaaattcgcctcacactcctcgccggtgcccgaatagtagatgtcgccgagatgcagcagaacgtccggattctgctgcttgatcagccccagaatcctgcgcgccggcgcggcgcccgtgccccaatctccgaacaaagcgatgcgggcaccggccgggatcggaatggtccggctgccgatcgtagccggccgcacgtaggggatttcggcccgcgttcccctgacgccgaagtacttgacgtattcggcaagtgtcgaggcccatttgggatcgcaggtcccgcccgtcatctgctcctttatgcgctccgcccgcgcgaagtcccgcatcgccagcgcctcgaggtatctgaagcccagactcgcgcagatcttcggaatgtcagcgatgccttcctcgacgaccgcgacctcgctcaggtcctgcgacctggacgatgcgacctcctcgacggcttccacgaacttccgcgatgtcgacgggccgcccggcgccacggattcctcctcttcgagcttcgacgcgtaatcggcggccgcggactgatagaccgaaaggaaatggtcccggaacgttcgcatcgtctcgttcatggctcggcgctccccgtggacgtccgtgtcaacgcacgaacctgatctgctcgaaggcctgaagcggctcgcgatcgctgatgtcggcgattccctcgtcgtcggtttcgagcgggtccacctgggcaagccgaccgaaggtgattcccgccttggcctcgatcgaccggatcgatacctgggtcgcgacgtggagttgcggagacgtgaacgcgccgaacacgaactcctcctcgggcagcttcgacttctggctcatctcgtagcccgtggcgcagagctttccggtctcgtcgtggataaacgcgatgatcttccaaaatgcgaccgggatcctcacgccatacatggtcggatcgcgccgagcgaagtagggcccggtgaataccgaaatcttcatgtcgtcctcgcgggcgtgctggagcgcgtagtcctccagcgcgagccaaatcggcgagttaaaggcctgcatctgcggcgtggtgttcgtgacgtgcatcgaatcctcgttgccgcgtttggccgtctccggatccccccaacccggatcctcccggcgggtcatgtgcccgcggctgaacttcggcggattgccgtagcattcgttcatgatctgctgcgaacggggaatgcgcgggtcccacttccaaccgacccgggcgctcttgagcgacttcttgccgtcgatgttcactgcgctgaagaagcacatccggcgcttgcggctcatgaccacggagtagtgctcgtacttcagttcgctgccgcttccgtcggtcaacgcgagcacgtcgtccgcgtcgcgctcgacgacgggcagatcgaccacgttgtgcgggccgagaaagccaggcacgtatccctggcggtcgctgtagtccgccgcgacggcttcagtgccttcgatctcgtcgtcgatcgtggacacgatcgcggtcggcggcggctcgacggtacgttcggcggcgccgggctcgccgatgctcaccgtgatggtcaggggcaccgtcaggctgacgcttcgcgacggcggagccggaacgcgcggcgcggagcgggtcgagcgcgaccgattttcgggcttgaccgcctcccagcgcggacgccccttggcgacgtcatcgatgaccttggccacgacgtccgacctcacggcatagttcgtcgtcatgaacgtcccggagaagtgaagaccgaacgcctcgccgctatcgaggtcgatcagcaccgatccggaatttcctccgagcgtggtgcaattgtgaaacagtcgcgtggcttcgaggcgcgtgatggcgcccggcgccaaccgcttcttgttgtagatcttgccgtagatcgactccatgagatcgagatctggaattctgctgtcgtatgccggatatccgatgacggctatgccgttggtctccttaggggcgcgagcgagccggatcggctgcgcgagcttcgcatcgccggccaccatctcgatctcgaacagcgagatgtcgggtccggaggcaggctcgatgtggagcgggcgcaccaacttgaagacgagctgcctgtcgctgtcgatctcctggaggaaatcgacggcagcgccgattctgccgccgttgcccatcttgaaggtaaatccgtctccgctacgcgaggcgaacaagttcgcgacatgccggttcgtcacgatcatgttctcgccaactagccagccggtcccgacccattcgagatcggcgcggaccagatcgatgcgcccgaccgcacggatcgccggctccagaaccggtgtcgccttcttcagacgctcttcccagagcgtgccttcctcgcggtccttgaagatcaattccgattggttgtccttgatagccaggacgggccggaagcgccgcatcactatgctttcctcggcgatggcgatgtcgacgtcgccgccttcggggagcctctgcacgccctctttgacctccgccgtctccgggccgggttcgggaagcatcatcctgcccagatcggcgctttcctcggcgagcttcggatcggcaagccggaccgaggaattgaattgccgaagcctgaggaggcgaccttccttgctcatgtgcggtccctgcgattcacgcgatgcatcgatcgatgcatcgagggtagcagaaagattcgacatgtcgaagacggacgccgtcgcacctaggggaatcccgagcgtccgcgcgtcaaggaagcagccggccatcgtagccgcccgacccctcggtgggcggaacgtctatgccggtggtcgactgaaacacctcccgagcgacgaacgcgatctcgatcgatgtctcgtcgcgatcggtcgcgatcgtgaccgccacgtgaaatcgttccgtatccacagacccggatttcgaacaagactgttcgatgggccgccacagatcgccgggtccgatgtcggacagagcgatcatcttgcggtccgacgattcgaccacgcgctcgacggcaatcggccttccgtcagcatgcttcgcggtggcggcgatatgcgggcagcacagcaaagccaaccaaacgcgctctccggcgggaaggggcgcgattgtccgtcggtactttccgccttgctcgaacagcgggagagcgccccggttggccgacggcccctctccgacgcggcgttggagcgagagacgccagccgtcgccggtaacttcgaagcgctggtgaggaccggtcagtcgaatatcttcttgagaatcgaatcgagaagcggccccgggacgccgaggacgcgcgacagttccgcgcgatcttccacatcgagcgtcggcatcggcggcttcggcgcaggtctgccgcgcagcctgtcgaaagagtgcgagatcgcctcgatggccgaattggaaagcttgccgaagacgccgcggtcgttggcgcgtcgcgccgcctccaatcgtgcccgcgccgagacgaaggactccagcgactgggccaaggcgctggacaggcccgaagccgtgccggtcgcgctctcgacgacagcctcccatttccagatcagccatgagccggtcggtagaaccttgtccgcgatcgccgtcaccttcgccgcttcgggaaacgaagaggcgtctctaagactttcggcgaccgcgatgtcccagcttgccctcaacatcggcggcgtatcgagcgaccgcggcacctggggcaggggggtgacccgacgcagacagagcgcccgcagatctggatgatcgggaccgagcagcctgaggagattgcctgtgaccgtctcgaacagcagaacgttcccgggttcgtcccggagcagcagatgcgcccccaacagacctagcatcggatcgccgaacttctcgtttacgatctcgtcgcgtagctggtccgacacgaccttccgtttttgagtcagcgcgtagcgagccgtctccccgagctccgtcctgcggtcgtgaccgtcgaatccgaacgaccgagaaatcacaactgctccgcccgcgatgtcgggaagccgcacgtccgaaccgggccgttcgggcgcgagcaccagaaagatctgggtctggcaacccggagaggcgaacagagcgcgttcgccgaccgtgccgtcggcatacttcaacctcagccgataaggacctggagccgcggtcgcgcacatcgccacgcaggggtcgtccgccttttcgtcgtacagcgacccgagatccaccaggatgcggccgtcatcgtcggcaagggagaggccggccgcagggttcgccgcaacggatcgtcgttccgcattccagtcgcggcagaacacgaacaacccggctcccgatccgaattcatgcgtgggctgggtgctcgcggtcatcgcgcgatgcatggctaacgcgtcggttcgggctgtcccggcaagcgggatcggcgtgaagatcggaggcgggggaatatcgaccgagacatcccgatcgagcgacacaagccgttccgcaacgcctggaccattccgcacccggaccttgtagattcccggcgcaagttggctcgacaagtcgccgaccgcctgagcgacggtgttcatgctgccgtccagcaccgagatctcggcaagcggaccggtggatacggtgagcgtgttagattgcgacatcgaccacctttccgctgtcgtcggaagctacggcgccggtgacctgaaacagcttgtcccccacgccctcgacgaccagcctgtagaggccacgcggtaggctgacgctccattccggcgtcgaggcggctatcgaggccaccgccacgaacgcgctgttctccacccgcgccggcggaccggggttggagaacctgaccatcaccggaaaggtcgacacctgtcccgcttccggcggaaggatgtcgaacggatccggattgacgacttcgggcatcttggcgatctcgtcgtccgcaaggtcctcgggcggaagcaactttatcatgttgtcctgaagataggccttcaactgtgccgccgtcagggcgccggttccgggatcgcgcgctttcccttgtagcccttgtagcagcgtcgtcgtgaagacgccctgcatccgcgccccgcccaacggcaactccttcgaaatctgccggttcttggcggaaaaggcatagaatctgcgccgaacctgagcgagcggggcgatcttcttcttcaggaagggcggggtcaggtcgacgtcggtcatcggacttctgcaggcgtcctggaacagaaacacgtcgtcgaaccatccgccctcgtgcaaccgctcggcccacagcagtgcggccacgttgtgaatgcggctcgacgtggcgttcgccagcagcacggccgagcggtccagcgtcggcgcgaagccatgcccggaaaagaagagccagatcctgtttccggccttcagccctaggctgttcctgttgttcgcaatcgcggcgttgtcgatgcgcgtgaagaaatcctcgatttccttcgcggccggccttgcgtcttcggcgccggcgaaggcgccgaaatcggagctgacgagcagcacggcattcgcacggtcgaccttgccgccggagggcgaagtcacccaggcgtagaaatcgcgcgcgtcgttctcggcacccttgagcgacgtcaggcccggatagacgttgatcccgacgacgagcgcgtaatcggcaagcgccatgtcaggggtactgctgccggatgaagctcctgtccttggaggagagatccgagttcatgcccgcgctggtcccgtccaaagtccaactcgaaggtatcggatacatcatgatggagcgggtatccagcgtggtcccgttgatctcgttgcgcggataggcttcgaacatgttgtgccggatagtttccatgtcccagttgttgggaggccccgaaaggtcggcgatgacagccggctcgttccactggatcggttgatcgggattctggtgctcgtggatcaggccgagcgcatgtccgaattcgtgcaggatcaccctcctcgcttcgtcctctcccaccgccggcgtcagccacccgaagttcatggtcggccggttcgcgggaacatgcttgcaggtcgtgccgatcaccgaccacgaccccttgaacctgaagctgatcctgatgtcggcggtcgtgccggcgacccagctgagattcagattcgccaagccgtcggtccaaccgggggcgtatttcttgaccagctccttctgccggtcggtgccgtccagaaaggcgatcgtgatcgtcgcacccggagcccacttgctatccttgacgagcgccgccctttccgtgccggatttcggaggtgccgcctcgaaccaggcaaagcaccactgttcgttcgccgctcgatccgcatcgctcatgatcgcctcccatcgattgtggttgcgggtcgttccttatagcagggccgtgtgcgtcggtggccaagggtaattcctaggttacgtcagaccggctacgcggcaaactcgcgagtacctcgactgacgctggcgcttgggcatcatgaaatcttccacggtaggtccgaaaccttccgtccgccgatggatgtggggccctcgcagactgcgtgccgcgtaaccgtcgtttcgctcgaaaggacgtcatgacttccgtcacgatcgcagctttctcaaaccgggcgcgtgccgcgcacgaagatccttccggtctcgcgtatcgcgcggccctcggcatcttcttcaccagaaaaggcgtcgtgatccggcgccgcattggattgatttacacgtggaaaccgacctaaaataggctatcggcatccgatgcgggacgccggagaattatttcccatgaatattctcgattcatttccgttccctacggatcaaccggccgcacaagaactcatgcgagtgctcgcctcgctctatcgtaccgagcgcgaagccgttctgttcacccaaccattcggtgtagatccgttgaaggttacgccgaacctttcgccgctgctcctatgggacgagctattgaaggcactcgccgcccagggtacgttgcgcgccgtcgtggaggcggcgcacgaccaatttcccaagaatccccgcgctcgacttttcaaggagcttcttgcaaaccgaaagaccgaaagcagcgccgagcctatagacaagctgggcccttcattcgacgacgcggtaagcgagcccgaagctctgttgttcttcgatgacctcacgatgccgatcgggaacgtccccaaactggtcgcgacgctggaaaaaatgtttcgcaccgcaccggcggtctgtctattgcgcgtggagaatgaaataggcgaattcttcggcaccggcttccgtatctccgccgacaccgtcctgaccaaccatcatgttctatttccgaagaacgtcgtcgcgaaaaggctattcgccgattttggctatgaagccgattccgacggggccatggccgcagtttcgtccttgtccggcgatgtcggcaccataactggagagcaggccgacgactgggcgacaatcaaggtggcgaacctaagaccggaatggcccatcgtgcagccagacaccgctgccgttcccgcgaatggcgatttggcttatatccttcagcaccctggaggccggcagaagcggctgggtttcgtgcgaaacacgatcacagaggtaaacgatcgcgtagttcgatacttgaccgacacggaaccagggtcctccggtgcgccggttttcgatgctctcggtcggatcatcgcgattcatcatgccggcggtcggccgcaggaggtgctcggtaggccgcccgtgaccaagaacgaggggatcagagccagccgggtattcgaccggttgaggtctgtaggcgttctgccttgaggaagcgatgcttgcgcaagaacatagggatctgttgatccaaacggtcagcgctgtctttccggtcgagggtcatttcagagtcctcgtgaacgccacgcgggcgaacagctataataagatcgtcccgaccaatactgcgccctacttcgcgatcgggatggttgttgaagccgccgaggcccaaggttggctccgagacctggtaagacggttgcgcgacgccaacccgaatcgacccgagttcgcgcggatcttggaggaactcaaccggctcgttccattcagcagcgccgcaagtcctttcgacgaggtactgcttcatagtggccgaccattcgtgaatagaaggagcctccgcaatcacctcctgaacctgacggatcccaaaggaccatcgatccttttgatcgatggtccgcggcagacagggaaaacgttttcgtattatctcatcaatcacgtcgcgccgtgcaggggatacgccgtaagccggtttcttctcgggcgcctgcctcggccggacgaactcgcaagcgagattctgggacgtatcggcgtcgagaaggcgctgccgccgatcggattggaatcagcagagcgatgggccgagaaactcgcggatgtcgtggctcgcgcgatcgaagataggaagacgccgcggatattcgtgttcgacgaattctccgatacgccactcccggccgggacccttagcctgatcctcagattgaccacgtattccgacgaggaactgcgtcatctgctgcggatcgtcttgatgcgctttccaagcgaactctctcccgagatggacgaggtagccttgcgcgaaaccgtggagccattctcgtccagagacatgacggtcgccgtttcgcaagtggccaaggcgaacggctgggccgtgagcgatcaagccatttccgaaaaagtggacgaattctgcggcgtcccgggccgcactctgaaagaccgctttggattccttcgcaggctgctgcaagagctgggggccgcggcatgagtcggaccgaccccacgacattggaacggctgcaaggggcgatcttggacggcttcgactcgacgtcgctgagaacggctcttcacccggtcgtgagatgggaaaacctttcgccgcataagccgttggcaattcaaatccacgaaatcttgaggcaagccgacgccgaaggcagaatagcggagcttgtagagcgtgcactcagatcgaatccgaacaatcccgccttgagcgaggtcgcccacgagctcggcgtcaagtcggtagcctcgcgcgagatcgtcaagtcggtcagggcctactcgtcgagactggacagcgagatcgccagacgacggttgatcgaaatcgaacggcaagtatgtctggtggaaaccgagagcggagcaacaggaaccggctttttggtaggcccggatcagatactgacccacgccacggtcttcgctgccggaaacgttatgccggaacccgggcaaacggcatcaatcgcattttcggatgcgtctccgtcaaatcaattcccccgaatcagctgtcgatcgactttcgcatcgcgaaacctcgtcatccttcaagcggaccgagacatcgggcgcgagcgatcgtccttcgataccacctccgtcagtgcccgtgcgagaggctgggtggcaccttccgagggacgacttagcgtcgaagacacggtagtggtcgccttatgggacgaggtcgagcgcattcggttctctcaaggacacgtggtccgaattgacggaaacaagttaagtcatacggccaacatgactcccggctccgccggcgctccgattttcgacgacgagttcggtctgaggggaatctcttccgggctccatccgctcgtctcccataacgaagctttctcgatcgaaggaatactggaggagctggcgtcggcgggattccgatggagtctttcgggcggcatcacagggacgcccgaggctccgcacagccaggagggcgggggtctcgatgaagtcgtccgaaacctccagattgcaaaagccgctgtccaggatccggaggacgacgtctggaacaacgaggacggcgaaaccgatgccgatcgttgggaatgggccgaagcagccgcggtaacggcctacttcgacccagataagctcgtgccgctgggcgagccgtccatcaacgggcgtgtttccttgttgttggagagttcacccgcgcgttcgcgaaccggcaagcagctttggatcctgcccgaacagttgcgggtccgggcactcgagcgactgtccaatcgcggggaattgaagctgctccggtcgaagaactccaatcattccgacgatttcacggatcttctcctcggcgccttcatagcgggtgacggcgcccgcgccttcgatccgcaagacccggatcatctgcgatccgccgtgcaagtcgtgcaatggcttcgcaagacggatatcgtccttccgtccttggacgagctcagaagcagcttggagagagcgacgctgctcggtccgttccggcatcttacttctgggttctttgcgggccgcgacacggagttgaaggagctaaccagctacgtcgatggcccggatagtctggcggacggcacgccgcggcgccccatcctgctctacgctcccggcgggatggggaaatcctcgcttcttgcgcatttcatcctgaaaaactcggaacgcgacgtcctcgacccggaacgttggcgaccgttcgtctacctcgatttcgatcgtcccgaactagatgcgcgcgatcgatctaccgtgcttctcgcaatagtccgctacctcgcgccgcaaatcccggagatcgcgacgctcggaaactccctagtacagacctggtcgtcgcgcagacgcgaaggacgcagttcatcgggtgcggcaggcgcaatcgccggcggcaggcttccgcgattgacggaagcccaattgatgaagttgatggcggatactgcggagttcttgaaagtcgcacacgaagcgaagccggcacctctgcttctcgttttggataccatcgaagaaatccaatacgcgagccccgacgcggtcgagccgctcgcgcggatgatcacccaacttcgcagcatggttccgtggcttcgcccaattctctctggccgagtggagatccactcgattgcggaactggaacatcgcaagatcgaacctctcgaggaggcggcggcccgagatttgctaaagtactatcttcctgaggcgctgagccgaaaggcggatctcgtgagccggctggtcgggaccgtcggcggaaatcctctttccctccggcttgccgcggaagtcttgagtcacgaaaccgaagagtccctaggcgcggtcggagaggtcgatctctggaaaagggttggtgacgcaatcgtccagggacagttgtacgagcgggtcgtcagtcatctccaccaaggaccggtcaagaaaatcgccgtcccgggactggtgctgcgttacgtgacgccggaactcatcaaggacgttctcgcagggccctgtggtgtggaagtcgaagaccatgcgacggcagagtcgctgttcgcggagctggcccgggagatcgcgctcgtccgccaaggagacgagccggggcggttggtcctccgtccggagctcagaaggacggttctcgaaaatttccgcagcgatacgaggagcgcagcgacccgggagctgattcatgcagaggcgataagatacttttcggccaagcccggagcggagaaccgggccgaggagatttaccatcgcctatggctaggccacgatttcgagacgatcgatgccagatggctcaggggcatcgagttgtctctgcgatccgcggcggaagagctgacgggcgaagcgaaaatctacctgacgaacagaatagggggcctcgacgaaggtgccatcgccctgtcagcgccgctttccgaatgggagatctacgccgccaagcgggcttcggatctcctgcagctcggcgacgcatcgtccgccctcgaagtgctcgctcatcggcaagagagactgccaggcagccgcctgtatctcatcgaaagcgtcgcccaaaggtcgctgccgacgcccgatctcaccgccgccgaagtcgccgccgaaaaggcggtcctagccgcgcggaccaataaagatctcggcgaggtccataaggcgctggaagagctcatcgaaatcaaacgacttcgggacgaccccgccggggtattgcgcacactcgtcgagctgggaaatctcggagagcaactcggagacgatttgatcctgcttcaagcggaagtcgaaacactcgagtcagcctcagcgcgcggaagaccggatcgacggttgagcgaggcggcaatcagagtattcagccgacttcccgacgagctcatcagtcgtgggccggagctttgtcgccgggtggcggcacaagtgggcggcaccagtccggagatcctgaagcgagtcgtgaggctcgtggggttcggcgcgttaggcccggaggcctcgggcgagctgcacgagattctcaaagactggggaaaaaccgaccccgaagtagataacgtcgtccgcggggttatggatcagaaaagcatcgcggccgtcgctcaacatctcgtcgtagcgaagcagttggatggcgaggtcgcgtcccgtctctcggattggctacaggggatcgccgtaccggatgcgatccgcgtcgcggcacgacgaacggccgacaaggaggaaaacaaggcgcgcggacagcaggcgatcctttctcgatacaacgagtccctcttggaattcgacccggcactcctgcaagaggccgccgagatccgcggctatggatcggtctcctccgttgcggtgaacgacgaaatcgagctcgaatccatcgtgcttcgccgaagtcgcccggttctcgcactcaagaacaatctgccccaactggtgttccacgacgaagcggatagcgaaatctggcgggatcggctgatccgtgccacgcccgcaatagagagagccgccaaatcggtcggtcgtatcgacctcatcggcggagaactcgattgggtgggagccggctggctggtagccgagaacgtgatcgtgacgaatcgtcacgtcgcgcaggtctttacgcagcgccagcaggtaggcttgacgttcactcgaggccctgccggcccggtcggcgcgcagatcgactttctgcaggaggccgacaacccgaacacggcggccttcaggctgatcaagccaattcacgttgagccgcacggcggtccggacgtagcattcttcgaaatcgagtcgagcggtcgtcgggctccggatccactaacgcttgccaagcgcatcgaacagaatccctccgtcggactgatcggctatccgagctacgatagcagggtcgccgaaaccgacctgatggagcgcatatacggaaggatctacgacaaaaagcggatcgcggtcggtgcgataaccgctgtggaagaacagaatgtggtccacaattgtgcgactctcggagggaattccgggtcggcgatcatcgatctcgagaccggagaagcactgggtctgcatttcagcggaaaattcctcggaaacggctacggcgtacgcgccgacatcgtcggccgtctgctcgagtcgatccgatccggaacggggcgaaggggacaaggcaatcgaagcgatcggtcgttcaaagccgagaggcccgatcgtccgtcgtcggacatggccctaccaaaggacctcgatcggaccgaaggcgagacggaagacgcttctgaatattcggacagagagggttacgatccagcgttccttgctcgacgccaaatccgtcttcccgaggttgtccgaagccgcgacgacttgctttggttcggtttcgatggaacggccgtcagcgagctcaaatatactcacttctccgtcgcgatgagccgcagtcggcggatgtgtctgttcagcgcggtgaacatcgacggggatcaatcgagaaaaaccgctcgcttcggctggcgatgggacccacgtatcccccggtccgctcagatcatgaacgaatgctacggcgatccaccgaaattcggccgcggacatatgacgcggcgcgaagatgccacgtggggagatcgccggtcggcggtgcagggaaatagagacgcaatgcacgtcacgaacgtcgtgccgcagatgcaggcgctcacttctccgatctggcttgggctggaagactacgcgctggagcacgcgcagcaggacgacatgaagatgtccgtatttacgggtccatacttcggggaagacgatcccgtgatgttcggcgtgagaatcccgctcgctttctggaaagtgatcgcattccttcacgacgagaccggcgaactttgcgcgaccggttatcagatggagcagcatcagatcctcgggcatgaagaaacggtcttcgcccccttcgacccaccgcgacttcaagtcgtaagtcaggtctcgatcaagtcgatcgagctgagggccggtctgcagttcgactctctgtcgtcgttcgatccgctcaaggacgaaatcgaagagccggacgaatcgcaagcacggccaattcttctccagacgttggaacggatacgcttcgtttgagaggcgtccccgcaggttgagctcggtcggaggtccgcatcggaccggcgaactcgacccttcgaataaggctcgcgctccttttgcgaggacgactcgctatggaggccgtcggcgccgcagcaagccacaacgaggctgatcgccgagggcatcggaccggcaccgtcgacgagaccatcggggtccgcgcggcaaaacgccgaaacccgccgttaagcatacgatcggactttcggtggcatattgctacggacgtgctatgtgataaatcacatacagacggagagcgagatggaagcaagattcgcaaggctgccgagggacgatcaaatagcccctgatgcgatccgaccgcgccggggtcgggtggggcgccgtcgcaggaccgcggcggaacgaacgtgaaaccgaaaaggaggccagcaaccatggaagcgaagttcgcgagactaccgagagacgatcaaacaatcagcgccggctccccaccggcaaggacggaagtcctgcgccactatccggaagacatcgaaagacgagaccgagcgagatgacgaagcgaagagaaaccaacgaccacggccgaaggaagcggccgcccctggccgatcgcgggcacgacgccggcgaagcggccgccgggtcgaaagcgccgcctcgcgttgccttgcggcccaaccccgggcagtggagctcggacgaactcatgacgctgcaggaggcagcctggctgttctggccgatgggaccgctgacgacgacttcgctgcgcaccgcggtccgcgaccgccgcctcgacgtggccgagatcgcgggcaagatcctcacgaacaaggattcgatccagaagatgtgccggtgctcggcgaggacgaaggacaccgcgcccgaagcatccgcggttccggccgagtccggcgccggcatgccgcggagcgtcgccgagtaccgtcgcatggtggccgaggggcggctctagcccgacgtcggcatgcgatctccaagcgtcgtcgttacgagcgcggtcgggctgcggcccgacgcgaacagcttcagcagagcgggatatttctccggcggggcgcgcctcggatcgacttcggccttgcggacgacgtgcgccggaccgtcgtcccgcagcagcagcacgcccacgaaacgggcatccagcgcttcgagtgcgtccgccagccgatcggcgtcgaccgcgtcgagatccggacccaccacgacgtagaaggccggcagaaagcccgccagcaccacggattgggcgaggccgtcgagcgggtcgcgaccgccggattcggccagatagagatcggccccgccgaggagggcgcaggccggatctcgaaactcgaatccgaggcggcggaaataccgcgccgacggacggcggcgggaggtcgcgccatcgccgaacaggacggcggcctcggacgcgacgagcctttcgcaacgagcgaccaggacgccgcggtcgcggatgctgcggccgcgggtggcggcgtccgaatccggcgacccgccttcccccagctccttgcggatgtcccgcacggtgaccttgcgcagcgtcaggtccttgagcgccttcaggccggcgacggggtcgcgcgagtgcaggcgcagcgcgagctcggcaggcgcgaaggtcgcggaaaggaggctgccggccgccagacccgcctccttctcgatggcctggagacggtcgagggcgccaagatacctgcggagcatcacctcggacaggccggtctcgcgcgcggcgatgcgccaaacctggccgtgcttgtcggcgccgaccgcctccagaatgcgccgcatgatttcggcgagggcatgccacggctgaccggtctggcgggccttctttaactcttccctaaccgtctcgtaccacatcgccgtccccagggttgctatctcagcagctttggactatcagatcggactacacgaactatgatagttcattcacctctgctgttgaatttcatcagctgactcagcaagggtcaacccagatgacgaagcagatccccaccttctccaacctccaggaccttccgatcctgcccgatgcgctccactccctcagcgcggcaccttcaccgcatcccgagccgccgttgcgtcacggcattctcgagatcccggtgcccggcggagcggagacgggcatcgcaacggtgctggccgctccgatccggctgcgcgcctcttcgaccagcgccctgccgccggtgccgaccttcgaacgacgccccatcgcgcgcggagtggcgatcgcgaccgaaccggcgctggcctacctggcctgggcgaggggccgctcgaacgagaagccggccttcgtgtcgcgcgcgccgttcgccaagccgcgcgccgcggcccatggcgtcgagcacaccggcattctcgagctgtcgcatcggccgaccggttcgtcgacggcatcgccgtcgcccgctgccggcacgcgaaggcccgcccggccgtcccagcgcggcgacgtgcggtaagggaggatccgacatgggcatgcacttctctcccgttcccggtttcgtgccgctcggctacatccagccgaaggccccgccggacgatccggagctgacggtcagccagatggcgctcgtcaccccctacgccacggcgagccatggcaagcacgaactgccggcggaagctccgaagggcctcatccccgcgagcggcatcatcgtgaccggcggcgaaatcgactgggtcgaagccaccacccgcttcctggtctggtcgggccacaagatcgaatcggcgcgctccatcgccgacgtggccatcgccctttcgaagatgaagagaggccgcggccgcaagcgcctggcgccgcacctcttcccgcggggcgactacatccacatgacggacggctgggacaggcgcaccaccggctgtcccctgatcgaaggcaaggactaccgcgacgacgtcggagccaacgcggcgctggcggagatggtcgagaagcgcgtgcgcaagatcttgggccgcgttctcaagaaggacgtgaaggtcaaggaggcgttcgcggcctacctgatgcacttcaagccgggtgcccgccccgacgcgctcgacgagatcagtcacgggcgcatcgtcaacgacctggcgcacctcgaatccttcatgggcgagaacacgctgcaggacatcggctattcgaccggagtccagtatgtggaatacgagaccgcccaggcgatcgtcaaccggacttccgcgcaggaggacctctccgaggtccgctacgtggcgcgctcgacggcgcggcggcgcgtcgtgacgctggtcaaggtgctcgattggtactgcggcggcgagaaccgcatcgagccgatcaagatcaagatcccgaaagtgccgcgcacctcggtcgatttccttaccgtcgaggagatcgtccgactgatctcggccgcgcgcgggcggatctacgacaggcacggcaacgtcgtcggacatcacgacaagcgcgccgactacgagtgcgtggtccggttcatcctggtgtacctctacggcggcacccgtcacgccaacatcctgttccttacctgggggcaggacgcgagggccggctggatcgacccgaatctcggcatcatcgcgcggcagggaccgctcgccccgatcaccaacaagggtcgcgatacgagcccgctgatcggctcgctggtcgagctcgcggcgcgctggtatgccgaggacgaggcgctgcgcaggcagcacccggggcgctacgtccacatcatccacgacgccgaaggctttccgatcgccaagaagaacccgaagcacgcgatggacgccggcaagcgcatgaacgcgctgttccaggaggtgcgcgaactcgctgcgctgccgcatgcgcgaccccacatgttgaagcatagcggcgtcacgtactgcgtgagggcgggcatgccggtgaacgacgtcgagaacgccttctcgacgaccttcatcacgctgtggacgtactacaagtccttgcagccctggctgcgcaagggtccgtcgcagccgtatgacccgtcgcgcctgaagctgctggccctgcgccggttctcctccaaatcgaaggacaagctgcttgcgaaagccgcgtgataccgtctcgtggcgtccgctcgccggggtcgcgcggccgtcggtcggcgacttccgcatgctgctgcgcgcgtcgttctggccggcagcgcggttcgctacggacctcgacggcgaagcgatcgcggcggcatgcgcactgatgggactgctcggcattcccgaacgcgcgatcccctcgatcgagttcgacgcggcgctgcccgaggacgcgcccgccacgatcgtagtcccggcaggcgggcgcctcgaagccgtgcgcctgccggcggccgcgaagctgctggtggcgcggtggaaggagaagcggccgaccggcatcgcttcgagcaggctgttcgtcacctgcgtcggcaaggagctcacgatccgggacttcgcgacccatctgatgcaggcgggcgaggcgctcgggctcgccgaccacctcgggacctgcctgcgccgcttcttcgtcgacaacttctatcgccacggcgaccacgtcgccgccgacgccgtcgtgctcgaacgccatctcctgcggttcgacgggcgtgcctcggcgcggacgcagacggcggcggagcgacggatggtggcgttgcggaccgattgttttccggacgccggcccgcgcttcttgtccgacgcgcgcgccatcgaggacgcacgccggctcggcggcgagcttcccgacagctacgaaggctgcttcaggccgaaggtcgacaaaagcaagctgcgtcttccccatgaccacccgctgctcgccgatctcgcagccacggagctggcccgctccaagaaggcgcgcggggagcagctgctcgagatctaccggcgccatcgccccgacctggaccgccgtgccgacgacggcaccctgccgcgacggctggcggcgccgatcttcggcctcaactacaacaactatctggccttggtcgccaaggccaagcgcgtttcgggcgagctcaagccgaaccccggtcctcgcccgcctccaccgcaacgcccggccttgtcggagaaggaggccgagcgcgttcgtcggatcgaggagatcaaggatccgggcgaggcccgattgcccgacttccgcttctcgctgctgcgcaggcatgcctccttcgtgttcgatctgcagcgctcgggcaagatcaccgccgaacgcggagccgaactgctgcgtacctacaagcgcaccttcctgcgcatgaagtccgaccacgacgacggcatcttcgatcactggctgaggccccggccaacgggcgccgaggcccgcaaatgggtcgccttggtccgcgaacaccatgcccgccgcgaaaaggggctgagcgacgcggacttcatccgctggctccgcaagactcatcgtttgcctctatccgatcagtccgcacacgcggccatgtacccgaggcgccgcgagaagacggtcagggccgcctacgcgaagccggcgccgacgacgcccgcggcctccgagaccgcgcaactcgaggcgatcgcagcgcgcgctcgggcgtcgcgacaggccggaaaaggcgatcgcaacgtcaggctcggcggcgacgcgcccttcgtgttcggcctcgtccgggccggcaggttgcagggcaaggacgccgcgcgcatcctcggtattcagaaggagctgtcgggcgagctctatcggctgtacctggaggacgatctggcgcttgcgctgaagacgcactcccgggcggagcagaatcgccaccgagagctgctgctggacgagatggcgcgacgaggcgccgacaagggcgtcgccgcgctcctgcgcgacattcgccggcgtcaccggatctacatccagcgtaacaccgcaaccgcgatcctgcagcgatacgagcgcgagcacggacgcaagccgcccgggtttgcgaagggggcgcgcggcatcaggcccgacgtccacccgagtgcgcaggagcggagaaggctgaaggacatcgccgcgacccactgggagggggccgccgacatcgacacgctgcgtcggcgcgtgatgaaacagcacggcgccttcctcgtcgacatggtctcggagcgaaagctctcctgcgcctcggcggcgaggctcacgaaactctatcctagccagttctcggaggtccgtcgcgacttcgcccgggggcagaccgcccgccactgcgaggcgcagccggtcggacaggaaaggcggaggcaggaggatatcgtcgtgcgggaggcggtcgcctcagcggagggcgagcgctacggcgacttcgtcgcgcggctcggcgccgacatcactctggggcacggtcgcatcaggatccttcgtcaggccgcgctgcaggcgcgcctcgtcgcaggagcccgacatccagaagcctaaccgagccatcgaacctcagatcgaggggaatgtaagtccgcgagtaccgtcgctcaccatcagcgctcaccgcatgaaggttcaggttctttctcggggtgcagcgttgagatcattcagcggcgatgaacaccgcgtccggcgcgggaatcagcttgatgcagtcttcccgatgcctggattgcgacttggatgcatttcaccgagttcaatcgttccgtcccgacgtatctctgaagattttaccgtttccggatcatccagttcaaacgtgccgtaccccttcctctcagtttcgagcagcaatgcccgcccaagcaccacctttttcaaggtggctggggcggggccgcgaggcgcgcgcggcaacgactagcgggtcccgggccagatggtcaaacaacgccgcgaggtcaccgccgaaaccgagccttggagtctccagatggatccgcctggctcgccatcgctccggaagcggtggatcatctaggcgcagaacaggtcgttatcgagagcagactggagatcggcgataatgcccttcacctgccggcgcgaatacagaggcgaaagatcatcggtcttgggcaatatgatgcgcatgcctttcgcggtgatcgtaacctcggtatgggtctcctgcctgcgtcttgccatgctccgcctctcgcttgataggtttccggaatatttcgcgcggtgtggctaacctcggccctgttgcagtaccaggccttgggtcgcaacaacatgcctgtagtgtgcgcaggcaaaatcgacataagcgagtcgattccgcatccgaccgcctcgaaagcgtggaaaaccgaatcgggaagctaacctttcttcgccgccataaaacaggatagctgggttatattgaaagccccagttgctcgcgatcgatcttttcccatcgtcgcggagtgagcgagcaatggttgaataccgaggggcctgccgacgccctgatgggtgcgaccagcacgagctcgacggtgggggcgctatttgcgccttgcgtcatgggtgcctgtacggcctagatcgatgaaatgtccgcgcagccacgccgtcagatattcgatcaggtctgggacgccggcagcggcccggacgatcgtacgcaggatgcggccgtggtcggatgtccgttcacggacgagctgttctagcaggaatccggtcgttttttcgcgatagcggagtgcggacgagtcgttccaggcgtgccgcaggaattcaatcaccacgcggatgtgagacgtgggatcggcggaagcgccgccgatcatcctggcggtccgcctgaagtaatacccagggcattcgcccgcctcgaagtcgatcaacgctgcgcgtatcaacgctctgccagagacacagatgtagttgtgaccggcaccgatgaggtgtgctgtccatttcacgtaattttcgaacccgatcttgttccggttggcggcgaccatgaatgccggctgcagccaagtgcttcggtcgaagccgaaccgcctggcaaattcccgtgtcggcgcgtcgtcggtgacaagcagaatatccttctggatggcaacgaccaggctgtcgaatatctcccacggaccatcgcgcaggaattccctaagaacctcggggattttttcgggcacgatcagcgggcagatgaacgcgttggttttcgcccattctatcgccgcctcgacgtcggtcagccacgatttgacaacctcgggcgccacttcgatgaccgccatcttgccttcatcgtagcgcatgctcttcataccagcccggacggaataagcgatgcgctcccgtcgcgcgagaagctggtccatcgtactctgcgcgatgtgaatagtaccgcacgtctccgagatcgcgcccagcgcgcccaaccgccagcacatccaatacgcgagcaggtccatcacgcaaccgacggcaccgttcgagacgattgctgcgatcgctgtgcgacgttcggcttccgatccgaccgccaccttcatctgcagtccttgtgccgccaagccgtcggctgcttcgatgctgtcgcagccgacgcgatgggcgaagatcgcgagcggccagggtccgttccggtagttgtcctgctcttgcgcggcgaaatcgtgcctagccttgagctgttccagaaccggtgcgagaccctccggactcgagacgtcgagcgaaaccgtacggaacgcagggacatccggaaagcgcgcttcgtgattggcgaacacgaaatggtgtttggcgatgtacttgtgtcggatctgcctgatcgtaccggacttgccggtcgtcgggtttgtgaagcgcgcatcgaccgacgatcccatgatccggcggatgagcggatgatcgggctcccaggaatcctcgtcgaggcgacggagagctgcgtcggattcgacgatgacgaactgcttctcgccgtcatcgtactcgatgtcgaccgcggcgttttcgcagactacctcggtgtcccaggaatctccggaagtcgcgagcttggtcccctcgcacagaatgagtccttgaaagcacagccaagcctgcgacacttccctgttttccagaagaagcctgtaggcgtaggcgagggcacgactcatccgcccgaaatgacccagcagcgaggcgacccggagcttgtcgctcaaccggttgaatccgagccgttcgacggggcgatcgagctccggcagcagttcgtcgatctcgttggaccgtatcaagatctcgatcttgaggagccgcgccgccgcgccgtccggacggtagacgaggagggcgtccaccgcccgcctggattccggcagatcgcctatgttccacgaatggatcgcccacagccagagcgtctccggatcgttgcggacttccggtgatgctttggcgagcgccgccgggaacgcttcgtcgcggcgggattcgacgaggcaggcgaggtagagatgggtggctacgttgcgtgtttgcaactcgacgatcggctcgatcaggtcggccgcctcggcgggcagacgctgattgcgcatttcgtccgcgaccagatagcgcaagaggttgtggccaagcgtgaattccgtgctacccagctccttcagccgtgcgtgccgctcgtccgcgtcgatgccgagccgaacgtcccgccggagccgcagaagttcgaccgcgactttggccccgggcaggtcggcgaggttcgcgatggccaattccacgcggtcgtagtcacgcacccgcagagccaggtcgcccaagatgcgccatttcaattccgcgacgtgatcgcgccccgtcggctcgacggcctcgacgagcttgatggcttccttgtcgtcccgacgggccactatctctgcagcgaacaatcggctttccggatccggatcaccgcgcagcgtgacctcggcctcgtcgaaccggccttgggcgacctgtgccagagccagcagcctccgcaattgcggctggtcgggaagggacggcagagcgcgaacgaggagagattcgcattcggtctgccggcccgtcagccggagcaggaccgccgcattgttgacgaaagcgagaaggtcgtgccggtcggcgaagccgttgctcaggcaactctcggccatagccaacatctcgccggcagcgccttcgagttccgcccgggtgaaggtgcccggggtcccgatgaaagcatcgggtcccaacgccaattcgagcacggcgatcgcagccgcgagcttaagctccggaacgtcgtcgtgctttcgcgccagagccaacgtcttctcggcccagcccggtgcgttgcgtttgcgccagaattcgacgaggccgaggtccgcgtgcacggatccgaccatgtcggggggtatcagggtttccgggtcgccattccaggaataccgcgccacggcctgcagcagataggagaccgcctgatccgatcgcggcgttgaggtcaatgcggcccttgccagttccgtcgcctctacgtacctcccctgtatagtcctggccaaagcgagattggcgatggcgttgcagtcggttagtcggattgcgtaggcgctccgaaatgagaggcggcctcatcctgcctgcccaatctgatggcgatggcgccgagattggtcgcgatgcggaatctggcccatggcttgctcgagaggctctccgtgaagctcaagaagcccgtcccgcgcgacggcgagcgagtttcccttccggaacaggtcccgccagagatcgatctttgcgtgcaggacggggtcttcggagttgtcggccggggccttcacgtcggccggaatgaccgcattgttcgacagccgcatgcgctctacggcttcggcgatcgcagagatggatccgggatccaacctcagggactgagccgcggtcgaagcaacggcggcgggaaagaagaaggagagagccgccgggtgctggcagatcttcagctcgagatcggaccatgaatagagtatgaccttcaagtcgtgcccttcggcccggagctcgctttcgatgtcgaggacggcgtccgtcgccttggtggatccgtttgggtcttggcgctcgggcataggtgactctggcctcgcggactatcccaaaccgaagcttttagaaagcagcttccgcatctccatgcgtacgaggcttcgtgtcagctcagggcaaaatgtccgcgggcggtgcgctgaattcccggggcggcggcggacggaactggtcttcgcggccggccgtcggaggcgatcgatcgccgtactggccaagcatcggaaggagcgatccgaccgaggaatggtcggagtcgagcaggggggtgccggcaccctttcggcgccgcgaactccggaacctcgagagccaccgctcggttttccaaggtcgctcgcgaattgtggcaggcgctattttcacgaaatccctattttcatagaggcgaggccatgaaatgtgttcgaattacggcagaaaagaggaggtcgaaaaacccggttttttcggacggcgtgtacgggaaagtgcgccgcgaccagcccgcagcgggccgatcgggccgcggcggatgaatgaaacggggcgaaacgcggccaaaagcggtcgatatcgaccggaatcgacgtcgcgggcgcgcgaccggtaacacagtcgaaagtgcgaggcgggctcaagtcactgtttttcctgaagaacagcggcgaccctcgcccccgtgtgcggagatcgtgccgaatcgacgacgcatcagacgacctgcggtggacgggtccgcattcagtcgaacaagatgaggcgctccgcgggctcagacagggcacgcggcgagccgcgcgaagcgcaggcttgtagcgaatccttgtgttcaatgcgaatgcgcatcataccttcctcaaggattcgtttggaggccaggcaccggatgtcagaggatcagctgatcgacggcgagtggatacgcagcaggctgcggagccatcgcaggacgcagcgggatctggccgccgcgctcggggtcgacgcgtcggcggtcagccgcatcctagacggccaccggaagctccgggccgacgaggcgtccagaatccgatccttcttcgatccgggcgcggagccgccggtggcgcctccgcctgcgttccggctcgggccgctcgccgggagcgccggcccgcggcgcggtccaccgccgcgacaacgggggaccggcgacattcccgtcttcgcggccccgagcggtaggggcgagccgttcttcgagtttccgtccggcccgccgatggaataccgcccccggccggaacagctcctgggggtcgaggacgcgttcgccatctacgcgccgggcgacatcctcgcgccgaggtaccgggcggcggaaacgctctacgtccacccccgcaagccgccgacggtcggcttggactgcttcgtccgaatgcgggtgcccgaccgtgccgtggccatgctgcgctatctcgggagcgaccggacggtgctcggcttcagcgcggtatcttccccctaccctgccgccgccgtgccccaagcggaaatcgtcaccttgaaggaacacgaggtgctcctgatagggcggatcgttctggtagccgcaggataacggttcgttaaccaagcgtcattgcaatgagaaatcacattgaaatgcgcaatgcgatgacgtagatctcccaggcggccatagggccgcttcggagaatgccatgtttctgaccgacgtagggggtcgagttccgttcacaagggacgatcccttcttccaaacgacccccgaccggatcgacgcccacgtcgacgccttcgtcaacaaactcggctgccgctcggtttcgttcgttcgggtcaagcccttcgccggagccgagacgggcttctgccaacgcaacgtggccgagtgcgtggccctgtacggcggccaccacgcctacggatacgcgctgtggaagaaccccctgttcctgatggcggaagtccattccgtgtgggcgactcctgacggagagctgatcgatcctacccccacggccgaaggcgagactcgcgtctgcttcgcgctcgatccatccctctcgacggccttcgacggagcgcggccgccgcccaatcgggccatgaacatcgtggacaaagccgatcccgccgaggtcgcccaggccgtcgccggcctttctccggcgcgcctcgactacgaaaggcgtcgcgccgaccgcgcgggcctcgatctggaaacctacttggccacaaagctcggacggacggagctgtcgagcgcggtcgacgctttcatcgccgccagcgaggcacgcgacctcctggcgacgccgacgccgacccgatttctctcccacgatcctcaggcattccggagcgcgcagctcaaggtgtgccagctcgaagaccgcatccgccgcctgctggcgactcgcggcggcgagacgtccaagaccacagcggcgccgcccgcccgcgcggcggcggccgcggacggccgccccacggtcgcatccggcttcgacgggttgatcgcggcactgctcgatccgggcttcgacatggtcgccgtcgacctggcgccgagcggaccgaaggtgctgtacgcgggacgcctcgaacgcgacccgtcgcccgggagcgtcaccggccatcgttccgaccaggagccgttcgcagcagtcgcgcagatcgtgaaaacccgtctcggcggcgaaggcagagatcgggacgccgccacgtccgccgagaaatcgtcgagctgatcacccatgcggctctcccgtaaggagctcaaacgaagtcccgtcggcagagtgttcgcggggctcgccaccgagcgggtactcgcggacgggccgggcgagccgtcgatcgtggccgcgacaccaggcaactctcgaggctgaccggaaaacatggagatgctgccgcaaaagtcgctggaaggctacgtgccggtcttctcgggcctgaggtcgcccgtctgggcgccgctgctgtcggagccgcgcgagcgcgccgcggaagcccgggcgcttctgcaggtgcacgacgaattcgatacctacgacttcctgaatttctttgcggcatcgagcgatccagccagacactgcgcggcgctcgcaaattccttctgcgacatcttctcggtccacctcgcgctcaagttcggcattccgcatggggccaggttcgggagatacgaggaggagtccgaccgcatcgttgggctggtcccgctgggcttcgtgcggtggctcctcggtcgctgtgcgcagaagcgccaccgtccgctcgacgggatcaagcccgccgagttcgaggcgctctgggacttcaggttcgaggcgggagatcggcacagcgaggaggtgagccgggcgttggaacggatggatccggtcgcggtcggcaaactgctgcccgcgttctccagtccgggcatcgagaagaaggcgatcaggagcatcgcgaccgacgcggccgcgcatgccttcttcgtttcgatcgatgtggacaagtaccgcgccgccaaggaacgccggcgccgcgagaagcacgcgttcgcgttcgctcggctaggatacgcataggagcgcgaacatggacaacacctccaccatcgaccacgcgccgccggcccccgatggctggcgctccgtcgacatcgcctcgccgcgccctctcggcggcccaagctacacgatgatggcaaggcgcaacggcggcgaagagagggtggcccgctacgtgtcactcgcccaggcccttatcgtcgcgctggagcaccgcggcggatgcgaggccgcgatggtctaccgcgaccgcggagacctgcgcgaatacgtcatcggccgccgcctgacgggcgcgaacaccttcgagcccgtgttgcggggcgtggtgccgcgcacggctcgcatcgccaccgaccacatccgggcgttggaattcttcgaggaggtcctcgagcacgacgcgcgcgtgttcttcgacgggcgcctggttcgggatccccccgcacgccccgtataaaagtaaaccagagacgagatgcgacatgcccaagaacgcctaaatgccaagaacgccaagaaatcgactaacgggaggctcgacaccttcctgcagaggttcagcggcttctaccagagccattaagagcagctgccgtccgatgtcgaagacctctacgcgaccatgcagcccgaaacggagcgcgcgccgggcggcctgtccaaggacgagatcgccgaaatcttctccgggacggtcggtgcctctctcctctgcaccggcctggcgcggagtttctgcgagcggtccgacgaggagatgtccgacaggctcggctttcggttgggcttgaagtccgtcgaactcgacagcccgagcgaatacaacttcaccaccgaccgcatcctagccacgatgccgctgcgcagcgagaagaagcttttctctgcgagcatgggcgagcggcaccgaaggttgaacgacgcgatcatcgactggttcacgccttatccgggttttgccccttactacagcgactatatcggcgagtggatcgcaaagctcatcgcggagtgggacaggaacgagctctgcgtgctgctcgactccttcgtcgacaccgacatcgacgaggagatctatcacgccttcgccgagggcgacgcatacggcgcattcgaggaattcgtcgactggaagcggttcgatgaagaggcggccgctctccgtcgcgccaagacggaagcgttcctgaaggatctggaattcgacggcgagtcatcatgatcgacacgctgatttgtttcccgaggaccacatcgcccctgctggcgacgcgcgaaggcgagacgtccaagaccacaccggggggccgcgcgccgcggcccggacggcggcaccgcggctgcatccggcttcgacgggttaatcgtggcattgctcgatcgcagcttcgacatggtcgcggtagatctcgcgcccagcggaccgaaggtcctgtacgcgggatgcctccaacgcgacctgtcgcccgagaacgtcgccgacttttccgcgcaggagccgttcgcagagattgggcagattttgaagactcgcctcggcgacggaagcagagatcaggaagccgccacggccgccgataactcttcgagctgatcaccgtgcggctctcctatgggcagttccaagataatcagtccgcaaggttcgcggtgctcgacaccgagcgaaccccggcatggtgcgggtgcggtgccgccacgttgcatcgcgagaggggtgtcttgcgcgaagacgccatcgatcgccgacggctcatcggaggcgtcttcgagcccaattttgcgcagcgtcgttccgggcacggcccggatcgagacggacaatttcttgccggggaatttcaggtattgcggtcccttcggtgcggcgggtgccggtgcggcgccaccggctgcctgcgcgtgcgccgcgggaactgcgatgccatcaggcagcatgttgccaaacagtgtgcctgctgccacgagcgccgtaccgcccaaaaatccaagccgcgttgcgcccagcccggttccgacgtcctgcgccatggtttcctccccttgcgctgatcgattgcggattatgtccgcattcgctggcgagtattcgcgctttccgtatcatcggcaagctggcgcaccggccaattgacagctcatggcgcgattggcagtcctgcggcgcgcgtgggcatggcgaaaggcccgcgcgcgaaaactgtcgtggcgggtcgccgggctcgcccggctacaatgacggcctgcgatcgcgccaggcggtcgccttttcgcaggcgtgcccggtcctcaagacggcaacctcgtcgaacggccggccgataaactgcaccgacagcggcaggccctcacgcgagtatccggcgcagacggccagcgcgggcagccccgtcacgctgaacggcatggtcaggaagggccgttcgaacggcgcatacttgctgatgtcctcgatcggtggcgccttaaacggaaccgtcgcgctcacgaggacatcaaacctgtcgaacagcgatcgcatctcagcgaggagctgtgccctgacgcgcatggcctgaatgtagtcggtggcagagatgaaggcacccatcgagacgcggtcgcggaagaattcgccatagtcgtcgaggcgatcctgcatggttcggcgatggatcgcgtaggcttccgaaagcatgatgacgttggcgcaggcagcgtagtcatgcagcggcgaaagcttgacgtcgcggacatcggcgccaagcctcctgagcaggtcgagcgtgctctcgatcgcctccagcgtcggtgtatcgaccggattgtcggtgtcgaagaaatggcggatcacgccgatgcgaaagcccttgatgcccttgtcgaggccggacaggaagtcgccgctgccgttcggcgtggcgtcatcaagcgggtcgatcgcctgcagcaatatggcgcaatcttcgaccgtccatgccatgggacccacgtgatcgagcgaccatgcgagcggaagcacgccttcccggctgatacgcccgtacgttggctttagtccggcaatgccgcacatcgccgaaggaaaacggatcgatcccaccgtgtccgttccaattccgccgagcgccagccccgccgcgatcgcgacccccgtcccgctgctcgatccgccggcatagcgtttcgtgtcccagggattgcgcggcgtcggccacggcaggtcgtccgagggaccgccgatcgcgtattcatgcgtcgcttgcttgccaagcaggatgcatcccctgtcgaccaggcgcgtcacgacgtcggcggacgcgttgctgtcatagcgcggtgcgacgcccgactgcgccgtcgtcgccacgcctccggtgaggatgatgtccttgatgccgatcggaatgccatgcagcggaccgcggtagtggccggaagcgagctccgcgtcggcgcgccgcgctgcctccaaagccgattcggccgcgacaaggatgtagctgtggagcgccgcgtcgtaggccgaaattctgcccaggcaggcctgggtgagttcgaccgacgacatggatcgggagcggatttcctgcgatgcctgcttgatggtcggaatctcggatgcgttcacggtcgctcctcaccgtgccagatgttgatcggctccaggctgtggcagtcgcgaccatgcagccgccccgtcattgcctgaagcagctcaagacccctcgccagctcagcttgctgcgccccggtgaggtggaggttcgattgcagcgccgccaggcgccaggcttcgatcgagaatggctgtttcgactccggcttcatttggccaccaatgcgcagtcattgtcgttcaggggccggaagacctgctcggcgggtatctccttgacgaggtcgtaatagtcccaggcgtagcggctctccgccggcgatttgacgcgataaagtgccgacccgtagaccacccggccgtcggccctgagctctgccgagcgcccaaaatagctgacgggaagttcgcccatcgtctttcgtaccgcttcggaatcgtccgtccgtgcctgttgaatggcccggagatagtggacgactgatgcgtacactgccgcctgctcccgcgtcggcatcttgccgtgttttgccatgaagcgtttcgcgaaagcgcgcgaggcatcgtcgcggtcccaatagaagctggagctgatcaggaggttttgcgcggcggccagtcccaggctgtgcacgtcggtcaagtagatgaggaatcccatgaccttctgccccgaccgcgctacgccgaagtcagcgctttgcttgagcgcattcacgaggtcgctgccaccgttcgcgaatacgacgatctgcgacccgctttgctgtgccctcaatatctcggaggagaaatcgctggcgttaagggggtgcctgacggaccccacgacggtggcgccgttcctgacgatggcggcggatgcgtccctttgcagggcgtgaccaaacgcgaagtctgcggtgatgaagaaccaggtcttgattccctcgccaacgagggagctcacggaggcaaccgaaagcgaataggtgtcgtcagcccattgcgacgcgaacggcgtgcaagccttcccggacaggtccgagctcgtcgcctgggtcatggtgatgacgcgcttttgccgggcgacttcctgcacggccagcgcgaccgacgagacggggaggtcggcaatgacgtcaaccgcctcggtgtcgatccatcggcgcgcgatcgcgcttgcgacgtccggcttgttctgatgatcggcggcgatgagctcaactggtatgccggcgaccttgccattgaagtcttctacggcgagctctgccgccagcaccgaacccttgccgccgaagtccgaatagggtcctgattgatcattcaaaacgccgatcttcaccttcccgttcgagaactcggttgcgacggccgaatatggcaaggtggccgtcaggcaaatcagcagggcggccgatgcggcacgctgagccatgaatttcgtcgttgacgacacgtcgcgttctccatcagatgtgcggcttataagaacggtccaaacgcaggcgcctcaagcgaaatgaagttgctgttggattagctctgcttataatgaccttccatgcggtcgcttcttccatcgctttcggcaatcagagcttttgaaacggcctcgcgatacgagagtttttctcgcgccgccgaagagttgaatctgacgcagagcgcgatcagtcagcaaattcgtcagcttgaaggtttcctcggcgtgtcgctgttcgagagaacaggcaaacgcgtggtgctcacggaagccggcgcccaatatctcgccgaagtcctgcccgcgctcgatcgggtggaatcggcgacggcgcgcctgctgacgtcggggcaggtggacggcatcatcaacttcggagtcatgccgacgatcggagcgcgctggctgctgccgcgattgcccaagtttctggggcgacatccgggagtcgtcgtcaacttcaccagtcgcatctatccattcgatttcgaaacgacgaacctggatgccgccatgcattatggcgaaggcgtgtggcctggcgcgtatgccgagctcctgatgaatgaggatctggtggcagtctgcagcccgcagctgatcacaaagcctgcggcccggcccattgaacatctggagcgctgcacccttctgcagcacacgacgcggccgctgggttggcagcaatggctggagcaggcgggtttccatcacatcgacggccgccggggtccgaagctcgatcagttctcgatggccatcgaagccgccaaggccgggctcggagccaccattctcccccgcttcctgatcgaggacgagctggcaagcggcacgctggtcatgccggtcgacatcaccgtgcgaagcaagagcgcttattggctggtctatccggaatcgaaaagccaaagccccgcattgcgcgcctatcgggcgtggctgctcgcggaagccagacgcgtgcttcatgccggcgctgaagccgtgggttgacgcccagtcagatcggttccggtcgccatgttcccttgcgtcgcgtctgccttgcgtaaatgcgcatggctatgcggcctcggcccttgccctctcggggccccggcggcacacttggccctcgcggcctgttgcgccgccaataatgacatccagggaagcgttcatggcggcaacgcggatcgactgcgacattcacccggccgtgggtgacacccgcacgacgctgttgccttatcttgatgaccactggaaggagcaggtggtcagccgcgccatcgacggcctcgcctcaattcctatccgcccagcatgccgttttgcggccgcgccgactggccaaaggacggcagcaagccgggttcggacctcgccatggtccagcgcggcgccttcgaccagcttggtgcctcgcacgcgatctgcaacgtgatttacggcgcgcaggccgtgttcgatccctatatggccacgggcttctgcaaggcgatcaacgactggatcgcggccgaatggcttgacaaggacaggcgtttgcgcgcctccatcgtcgtgccgatccaggcgccggatctggcgctggaggaaatcgagcgccgcgccgccgacaaccgcttcgtcttcatccttgtgctggcacagggcgagaccttgcttggccgccggcactactggctgatttatcagctcgccgaaaagtaccggctgccgatcgcgatccatgccggcagcgcatcgcacggcgccgagttcggccggctgggcgtcctaccgctacgaatactacatctcggaggggcaggcgtttcaggcgcaggttctgagcatgatctacgagggtgtattcggcaaattccccgcgcttaaagtcgtgctgatggagtccggcgtgagctggctgccagccttcatgtggcgcgcctacaagacctggcgcggcgtgcgcgtcgaggtgccctgggtggagcgcgagccggcttccattatccgcgaaaatttccgggtcaccatgcagccgttcgatgcgccggctgatgccaccgcggtcgaggacatcctccatcagatcggctcggacaaaatgttcctgtttgcgtccgattatccccactggcagttcgaaggcgacgatccggtgccgccggccttgccgaagagtcttgtcgcgcccacgtgcgccgacaatccgctggaaacattttcgcggctgaaacttgatgcataaacgatgatgtatcgcactgacgccgcatcacatgggttttacctctccccggcggggagaggtcggactgcatcgccagatgcaattcgggtaagggggcatcgccgacggcaaggtcacgacctacgagacaccacgtgcgctcgagacgagcgagattcccggcatcatcgaagcttttcgtcaggcggcgcgtaacgcaaaagccgcgggcctcgagggcgtcgaggtgcacggcgccaatggctatctgctcgagcaattcctgcaatcgcgctccaacctgcgcaccgaccgctatggcggctcgattacgtccatgcgctgtaatctttcgagaggccctggagcacgacccgcgggtgttcttcgacggcctcgagcgcgccaaggatcgcacgcgccgtcgcgccaacatcgtcggaggggcgacgtgaccaaggcacaggaacgccgacgacactcgaccgtggcgcttaaaggtattccggaaagtacgcgatggttacgaaagcatcgtgctcaaacaaagtgctagaccgcgatgaccatggcatcgcgctttagaagtcgaacgggtctccacccgggtgtggctcgacgcctcccaatccgccggatgagttgttgcttgcgaagtcgaagggatcgtggccaggcagcggtgcggcggccgagccggactggcgtagccgattcacggacgttctgacccgttcgaatgcggcagcatccatcgtcaaggtcagcttagctctctttgacgatcgcacgaaccgtacggccaggccctgatcgtgcagggttcgaatacttcgtaccaagtcctccattgagacgaccttgcgcgcacttgccgatgcgccgctggttcgtttgttcgccgccgatgttccgcgcttgcgaccgggcgacctcgtgcgcttcgcagccgcggcgtgtcgggatttctttgggcgcgattttctgggggacatcaggctctcctacgtcagggtgcgacctgcagcttgaattccttgctcttctgttgatcaatcgcgatgacggcgagaacctcagacggggtgccgccaccggtcacgcgctgcccggcatagactaccgatgccggccttcgcggcgagacgcgcgcgcccgcgatcagggcagtgctgcttccacggcctgccgagaacaggaagccccgcaccgagtccacgccgcctatgtcgacggcaaggcctatcgtaacctgatgcttgtcgctgcgccccacgttgagatccagcgacgcattagccacgcgcaacagggttccgaccggagcgaagacgagcttcggtgtgccttccagggtgagcgttgtggtgaagatcaggtcatcggtcatcgtcggcgcggcgcctgccgcgccatccttgccgccgaggttttcgaacagcagcatcctggcgaaatccttgacggagcggtcgacgccgacacggcccgcgataggatagacgtagttcggtcccactatctgccctgaacaatagcggatgccacggacctccgccgcgttcaaattggcgagcaggaagccgaaggtgtcggtcacggtgaatttgcgctcgttctgtcgccggcgttttgcatggccttcgatgccggccgtgaagctcggattgatgtcgcgcagcagattgaccgtggcgccgatgtcattatcctcgaagatatcgaagtcgaacgtgtaggcaacgcccgccttcatgagcaagtcgatggccgcgcgctccctcacatatcgcggcccagggaagtagcttgaattgaacttgtccatcaattcgggcttttcctcgtagagcgctaccagacggtcggcgactgggtcccgaacaccctcaggtaatccggcgaacagaccgctcccaatgaaccgcaggaaatccagcaatgtcgccttgacggcatcgcgcgtctcgcagcggatctgtcgcacgatatgtggcgtgtcgacgccggcgacctgctccggtagggggtggatggcacacccgccgagaccgacggaaaattgcgactgcagtcagtacacgatggatatggcgcatgacggtcctcctgccggatgcagtttcggatcaatgcctcatccagctgggtgcggtttcagaagacatccgtagatttcccagacgagcgctatccgatcgccccgatccacatcatcgtgccattgcctcgggtctacgacgcgtttctccgcggctttctgcggagcgcgcgtgcccccgcttacagcctccgcgattgccgcggcgtgctccggagggccggtctggattttgaacatcggatcgacgatgttcggatcctgcgacttcggagcgggaccgaccgcgacgcaggcgacaaattccgatggcacgaaccggccgttggaccagggcgccggacgtagggccttgccccatttgcggtgacgcgccggaaaccgcgccgtcatgtcggctcccagatcccgcacggccgcctcgctcagccacatcatcttcgccccctccatcccgccggaggagattaacgaagcagaagcttccctccgcaagctggggaatcgcctagggcgcaaaatcggctcctaggtgtatccctagggatgaaatggtcgtgattcctaggacgccgagcatccctatgagtggcatcgggaccgaacgagcggctcgaaggagagaaaatggcgcgttcgcaccggatattcatcagcttcgccatagaggacgaatgggcccgaatcaggctgggtgggcaggccaaaaacgagaggacgccattcgatttcgtcgacatgtccgtcaagaagccatgggacgaggcgtggaagacccagtgccgttcacggatcaagggctgcgacggcctcatcgccctggtgagcagcaacacggcgagggcagccggtgaactttgggagatcaagacggccagggaagaaggggtgccggtcatgggcatgtacatcaccgaggacaatcggccgctttggctcccgcccgaactctcaggcgtcctcgtggtcgattggacgtgggacaacatcaagaactttctgaaccgcatctagatggcaaagcgcgcgctcatcgtcggcatcgacgactaccaaaacgtcacgccccttcatggttgcggcgccgatgccaaagccatggcggagatcctcaggaaaaacgacgacgagagccccaatttcgattgtcgcgttctcacgagttcggacagcgagcctatcacacgtcccgtcttgcgccgaagctggaccgagctgttccgggacttcgatggcgacgttctattctacttctcgggacatggctatccgacggagctgggcggatatctcgtcactctggagggcacgcccgacgatccgggccttgcgatgaacgatgtcgtgcaactcgccaacatctcgaaggcgcggagcgtgttgatcgtgctggactgctgccacagcggcgcggtcggaaactacgggaatctgcaatccggcaatcaggcccaactgcgcgaaggcgtcacgatcctcgccgcgtcgcgcccaagccaggtcgcgttcgaactggaaggccacggcgtcttcaccaacctgttgctcggggccttgcgcgggggagcggccgacgtgcggggccgggtttcggcagcttcgatctatgcctacgtcgaggccgcactcggcggtctggatcaacggccgatgtacaaatcgcatgcggcgcggttggagccggtccggatctgcgacgcgaaggtcgaggacgcgttgctgcgccaactccttgtgttctttcccgagcccgaattcgaataccgcctcgatatgacgtacgaagagacgaacggcgcagcgaagccggagcatgtcgccatcttcaagaaattcaaactgctgcagatcgccggtctgttgaaaccgaaggtgggtttcgacctgtattggaccgccgagcggtcgggctacgttcagctgacgacgctgggcgccttctaccgccatttggcgtcggcgggccggatctgaatctacctcgggcccaccacgcgccaaagtcggtcaaacaaatccgcaacgaaggaaaaccatgaaggtcttcatttcgcaccaaagagccgattcgacgctcgccggcaacatcgctcaccggctcaggatctatcatcagatcgattcctatctcgacctgatcgatccggaagcctcgacggtgggagacaaactaggcgaacacctgagagagcaactgggactctgcacccaactgctcgccgtcgtgtcgcaaaacacgaagagctcatggtgggttccgtgggagatcggcatatccaccgagaaggaccagccgatcgccacctacgccggcgacaataccgtgttgccggaatatctgaggaagtggccttacctgcgatccaacgccgaactggatgaatacgcgcaggcgtcgaaggccgctgaacggacgttcacccgcgagagaccgttcaaggtcgaagccggcgcccgtcggaccgccacccagcagttctaccgcgaccttagggcccgcctgggccaataatttccttcgcaccaagagtacgtgcaccagccggtggacccgaagttcgaagccacccggcggagagaaggcgcgcgctgccaccgcgaagtgctcggcaggcaaatccgtagcggccctattcgtgagatcgctcggagtaccgctcgaaggcggtaagccgtttcgcatcgatcaccgcatcccggcgatagatatcactgcacagaaaatcgcgttcgctctggatcatgtcttccgacacttcggtgcaccatgccccccgccgccccccgtcgcccgggtcccacctgtatccccgctgcttcagcgtttcccggcatgcgaagggggcagcgaccgcacgtagccgccagcgtggctgccgggcggaacgcaagagcgccgacagccccgaaatgccgctgcgtggtaacggacgcgaaagcaattccagagccgcttcgcaatcgttcagcgccctgtgtccgtcgaagaagagcccgtagccatacgcgagatgcgacagacgggcgctatcgaatccttcgcctgcccagtccacctctttcagcgaacacgcccaagccatttcggcaaaacgggggaaaaggcgctcgcagaagggcctgtcgaacgaggcgttgtgcgcgaccaccaacgaagccggcgccacgaacgcctccacgtccgcctcttcgatactgcgtccggagaccatgtcatcggtaatcccggtcaatgcggttaccgtcggcgggatcggccggtgcggatcgcgcaggcggtcgaacctcgcaacgctcgcgatgaaatcgccgtcggtcgaatagtcgaaggcaagcatggccagttccagaatctcgtcggtcgacggatcaagccccgtggtttcgacgtccagcacgatccctctcctgacggatgcgccagccgaagccgccgcccccgccctgagacgcagcttccggagcacccggtattccccgctggattcgaggacggacgccaggcgctccaatctccccgtgtggtgcccaagatgaacgttcatatcagcccacccgaatgccgtcggtcggagcatgctcggccgccggctgccctccggacagaatggagcggatctcggtaccggagaggaatcggcggcgggaaagcacctccgcaagccggacgacctccgcgcggtgacgatcgacgatttccagcgcgcgcatctgcaggcgtttcagcatttcgtccacccgccgacgtgccgcggggtcgcgccggatatcgcggccggcgtcctcggcgtcgccgagatagatcagctcctcatcgctcaatccgaacgaaaagatcatcgccgccagcatccgcgtcgcaatcgccagatcggagttctcgcttcctcccgcgccgatggaggcggcgccgaggacgacaagctcggcagcgcggccgccgagcactcctacgaccgcccgttcgatcgcctcgcgagtcgccagatcgtcggataacggatcgagccgcgtaaggccggcaatgccgccacgacccccgatccgtaccgacatcacctgtcccgggcagctggcctccgcgacgaccacgtgtccggcttcgtgaaccgcgatgcgacgaagggcatcggggccgacctcgagctccggcagcgcggcggcggtcagatcgtcgatggacaggtcgcgacctgcatggcgcgccttcctgcgcgcgctccgcacggtttccatgatctcggccggcgtgaatccttccatgacgccgatcgcggccatcagatcctcctcgggcagagctccgcgcgcatggaagcgcaggatgttcaggattccgtcggcgttcggcggcttgatttcgatggcacgctcgaggcgccctggccgcagaatggcggcgtccacggcgccgatgcggttggtggcgccgatcaccacgaccccctcgcgccgcccgctggtcgcgtcgtccagaagcagcatgaaatcctcgatcaccggcatccaccagtcccggttgcgggaatccaaggattcgcgcgatggcaggccatcgatctcgtccaggaacaggatcgaaggagcggccgccacggcgcgcgtgaacagttcgcgcatgctcttgatgaccccgtctaggtttcccgaactggtcgcgaagatttcgccgatgctgccgatcacgagactcgccttgcatgcccgcgccaagctccttgcgagaacgctcttgcccattccggggcccgaaaagaagatcgccccgcggtcgaccgcgctccacggaagaacgccgctgcggtagtcgctcatgtcgcgagccagagccaatccccattcccgcgcagcgccatattcgaccgccgtggcgagctccggcacctcctcgggaccacggcgtccggcccgtacctcggccgcggcagcgatccgggaagcgaccgtttcagcgtcgctggatgggcgcatggcggcaaccaggtcgtcgagcccgagccgcgccagctcggcgtcatccacatcgagaggagcttcgccgaacatatcgcggatgatccgctcgagtacgtgtcggccgagcgtcgccgtgaggcggaagtcggctgcggcgagcagcgtagacgggagcacctgatcgggagatacggcgatgccgacgacggaccgacccttggcgagagccgaggctacttcggcgttgccgaccgtagtcttgtgacgggtgcgctcggacccgtcgcgggcgaagcaagtccatcgcctaccgtgcggtgcgtcttcgaagaagcggttcacggcggcaatccagtccgccgacgggacggccaccaccacggccaggggcgaggaactctgcagcgcttcgagcatctgtgcggagacgctggctcccattaccgcggcgaccatggccttgcgcgggtctccatgcgatgagctcacgagctcggcctggcccggatcgcggtccgcatcgtcgatcgggaggtcgaattccggtccggcgtcgtcttctccggaggaacgcgacttcggcgagaccgccaagccggcgaagccgccgcccccggtctttttcggcggtgcattcgcttcgtctcgggacgaccccgtacttgcggcgatctcgagcgggatgacgccgttcggacgctcggatttggccgggggcgaagccgcgggcgtgctctcggtcgacttcggaacagcctccacctcgcgcatctctttgttccgatcgtcagtatcagtctgcatcatcatgtctcgaagcgaaggagccaaaatcaggaagatcacgtggcgggaaggcgcacgacaaacgaaggtctgaagccggttgcctcgccggggtagccgactggattgctcaccatgcgggctttgccgcgtcgcacgtcgatggcgtggtgcgtgtgtccggtgacgatcaggtcgggctggaagcgatcgatcatcggcaacatctccgaagcgtacgcggcgctcagaacgttgcgctgagcggacggcgccaccgcgtcgagcgtcatcgcgtgatgacagacgcaaaccgtcgggccgtcgtgagccctcgcgagctcacgctcgaggaaggaccgcgaacgctggtgcagcatgcgcgcctcggccgggcggaatctcgcccaagggtcgcgcgaccacttgatgcgccgatggtcgagcatctggtcggcggcactgcgcattgcggcctggcgcgaggaggctccataaagctcgtaatcggtccaaagcgtgcaccccaacaggcgcacgccgccaaccacctcgacgccgttctccaacagcagaacgccgcaggcatcggccgccgccaagccttcctcgaaatgctcctcgaaggacaaccgcttcgaccagagttcgtgattgccggccaccatcacgatcgccgccggcgggggataggcgtggcgaagcctctcgaccgcctgcacgaggccctcgcaggtgtcgccggctacgatcaccgcgtcgaccccagccgccagaggcggtgcgcccgcgctaccctggacgtcgaggtgcagatcgctcatgatctggaagttcacggcgccgctccggaaacggcacgatccaggagcggccgggaggcgcgcaccaaccaggacgtcgcaaggcgcgcctctcgcctgcgggcaccgggcaggcgccggatgacgtgagagaggacaaggcaggcggcggcgttcccgccgcaggcgcaaatgacgagggcggtcatcgccagatcgaacctgtgaagcgaagattccgccggacccatcgacagaacgatcgcgatggcgcaattcgcgtcgccgtcgatggcggtacgccaacgcgcttcgccgaagatctccatcttcgcggccgccgccttcatcacgcccagcgccggcggatggaagttctgcgcggcgacggtccgccaccaccgaagcggcgacgagcgcgtcccgatcagggaggggcttgccgccctccatcggctcctggtcttggtcctcacgactttagtcctcctgaaaatcccgtcggtcgcgccacgtagagaccgatcgaacctgaattggtggtggagagctccaacggagctctccaccggtcgggagtgcctttcgacactccgcctcaccgcaccacaccgggccgtgccgtagctcaccgggccacaccccgccgtacgatctcggctagtcgagcacctcgactgcaaacgttccgttctgaggacgccaatcgcccagaccccgggtgaaacccgccagcgtgaaggtctcgatcacctcgtcgcgattgagcagagtgggaagaaacttggcttcgaactcggcgcgccaatccggaaagcacggccgcgtacgcatcgtgcgcgcggtcttcaccttcacgcccacacgcaacctgaagcgagcatcctcccagagttcgtcgagatcttcggggccgtcgtagcggagcagcgcgttctcatcgacgaccagcccggcggcagcttccttgccgcgacggcgcgacttcgccgcggcgacgaaggtcgccgacaacgcctccgcgggaatgcagggcttgccggcgtgcaaccagagacaaccgttccattccacccggctgatctccttgtggtccgactcggtcttgcgccgtttggaagtgagccgcgccaggtccttggcgatgggatcgagcggatcggcaagcctgctcgaactcatgaggaggcgcttggtgccgacgatgcggaagcgaacggtttcggcgtgcatgatgtctgtccttcgttagcgggtgggatcgaaaagggggcggcgcagatcgtggacggcgacgacatccgcacgccgcggcgtgcggttttcgtagcgccggcgcgccagaaacgaggtgacctcgagatggcaatcgctgcagagggtcagcaggtcgccgtcgacttcgcggccgcaacgttcgtacgtcgcgtggtgcacctccatccgagccccgtcggccgtaccggcgaagcaaatgcggcagcggccgccggcgccggcaagctccgccagccttgcggggttggtccgccaccgcgtgctcgcgatgtaggtccggtagttcatttggggcctccttcgttttatgcgataaatcatatagcagggccggacggagatcggtagcgtaaaataaccgatcatgtcggaatggttaattcgcggtaggcgggggacgcagtgggcggcatcgaaacggagcttctgaccccttcgctgatacgggctgcgcgggccctgctcggcttcgaccaggaggcgctggcggagaaggtggggatctcgcgcaagaccatagctctcatcgaaacgatgaagcccgggcccctcgatccccgccggcgccgcgtcctggagaatttgaggcggaagatggaggacgatctccacgtcgagttcgtattcgcgggagagaaaaccggagagggagtacggctcaggcggcgcgtagttgccgccccttgcggtgccggccgctgattcctgcggaattgccgatccggaaaggatagtttgccgcaatgaaagtgggaatcacgggtcatcagaaaaggaagggcgtcgattgggactgggtcggcgaaactctaaagctcgaacttgcccgcctgaccggcgtcacccgcgcattctcctcgcttgccgtcggaagcgaccaggtcttcgcccgtgcggccctgtccgtcggaatacccgtcatggccgtcattcccatggacggatacgaaagatttttcgctccccacgcgcgggccgactatcgctcgctccttgcgctgtgcgacgtcacgaacttgaggtggacgggcgacgagcaggaaggcttcttcgcggcagggaaattcatcgtggaaaaaagcgatctgctgttcgccgtctgggacggcgagaattcgaagggcgtcggcggtacggccgacgtggtcgcgttcgcgctcgccaaattcagaagggtgatccacctcgatccgatctcgcagcgcgtcaccaacatcggggtaggccgtcatggctaggacaaggttttcccgagcttcgactacgatcatcacaagacgctgagaggaggtggccgtcgaagaaggcactcgtcatgggtatcgacgacaaagcggccaacccgctttcagggccgcgtcaacgacgccaagccatggccggcatggtcgaaaagaacgtgcgatgggtcgctcttccgctcgggttctgtgaagcgggtcggtttcggcgtgagtgaaggctcggtcgtgatccgggccgtccaccagttccttaacccccgggctcgcctgaaccgcgcgagatcgaaccgttgcgtcgccccccgagctgtggttcgcatcatgccttctgcgaggcttcgaagaccgccccttgagcgtcgaatgtgcgggccgaaagcgggcctggccttgcctccggcggcgtaggccgaaaggctcggacgctcgtcgaggaggcgctggctgtccggcatattcgacgcctcaagccggcggagcaccgtgaccatcagcaggttggcggcgctgaactccccgacgagccactcggcatcgccgcattcgcaagcccgaacagcccttcgcgcacattgtcgtcgagcatgggcaggcgctcttcgtaccagctcctacttcgtaccagctcttatcgctcgaagagcatgaaggtttcgcgctcgacgatcggcggctcgatggtattgagcgctgcaaacatccacgcgacgacgtgtgcgcgacctgccgcacgctcgggcagcaggcacgcatggccctcggatgtggagaatgatgccgcctgcctcgaacagggcgatatcgccttcctcgtaggtcgggattttgccgaacggatggcgcgtccggtgcggcggctgcttcaactcatcgaacgagaggaggcgaacgtcgtagggctctccgacttcctcgagcgcccaacggacacgcatgtcgcgcgcatgtccatggccctcgtccggagaccgttcgaatgcggtaatggtcgcgaccattgtcgtgctccgagtgagagcgaagaactgcattcatgtaagctggacgtcgtctcgctcgcgagtctacgccaaggtgaagaataatatgcgtttgaaagcaaagttgctaggcaagtccgaacaggagatcctcgacaggcgtaaggcccaggaatcgagcccccacgtccgggacatcgtgaagcagaatcacggcttcaccatcccgtccggtcgacatcgagacttatgccttccgaaaagggaccagacggtagctgcgggagctctacttggcgacgcggaatcttgtacttagcggcgcgggatcttaaagcgaagggggcctccatcgcacatgccgtccgacatgatcaccaggtctaggacgtccttcgaatcctcgagcacggccattgcctccggctttagctcgtcgtcgcacttgcggagctcgaccccgtccaggaccagctccgcgagctccttgtaatcggggttgtcgcccggcacgccgtcccaaactcccaacctccagcgaacgttctcgttcgccttgtcgtcgtcaggcccggctagaaccagaatcccatccttgatcggtactagatcccgcaccccgcgtccggtccccaccttcaagaacgtcacgtctgccttgggatcggagctatcgaataaggccttcgcgtccaccgagagaatcggtgccgtgctccccagcgctggtcctctaaagccgaaatacagggatcccttgcgcgccgccagtccttcgatgttgacgccccgttgccccttcaattgaggcgcgtccttcggcggttcggtgccgagacacttctgctcgccgacgctatccttgagatcggggtgagaggccataattttccatagggcttccttgtcctggtaatccaccaattgtcctttttcatcgaccctagccttgccggaagcccggtcgaccgcgaacttgatgatccgccggttggccgagttgctcgcgcaggtgctccgcttagccgagtgcgaaccggtcacgtagtagtgctctccgtcggtcgctgcgccctctgcgtccaactccgcattagtctgcctgagcgccacggcggtgttgtcgatcatgtacccagtcggagatagcgtgacgtagtgcgcctgcgttccctcgtcgaacacgacgagacaaatccgctgtgggaggccaatttccggacatgctatcccgctcagagatttacgcgatttcttttcctttgaaggaaaggcgaactcaccgccttcccatgggccggagactggctttgcctccaggaccgcggcgcggcaatcggttgttatcggcatcgagaggaagctcgccgcgatcatcgtgattgccgaacggagagaccatttcataggcagctccttttgagccttacccgagacaatcctatccctcttgaccgcacctacgacctagtgaagaccctaggggccgcttgcgcggacaatacccaacggacagcggcccaaagcgtcgggaaagacctagtggggctcctaggagccgtgatcccgactttgcatcatgatctgtccgtgtcgagatggatctcgacgagagaggcgcatcgatatggccatccatttcacgatcgagcgcagtggccgcatcttcaattcaaaggcggacgggggcgcggcttttttcgtcggctgccataccagttaccacgacagatcgtcgggtgaggacttcgaaggcttattcaacgttccccgcagggagttgcccaagctgatctatagggcaacgaactaccgggggcatgtacaagttctgggccgacttcgtcgagccgtcattgacggaaatgtttcggattccgtcaccaaagtcgacctacaaggtagtcaatggaaggacccgagatccacgtcactcctggttggccctggtcagaagcgaactttgacgttagagggcgaaggcggcttccggcttcgaagagctgaatccttaagctttgcgaatacgacaggccacgagagcgccaccgcaagcgcaatgtctgcgtcgatgcttttcttcgaccaaggactcggcgcggcgattacggatttcttgtgaatggtgtcgcgagccttgcttagatcgctgacggcgcccattcattgacaaagtcgacggtcacgcgcgcgaaagctgtcgccgggggtaaatgacgtagagttcacgcgtgaggtcgatcgcctcgccctgacgagagctaaggcttcgaaaacagcgcgcacgtgcagcctcgctgttctggatgcaaacccaacaagcccacgacgtgctacgttacctccagcttcgtgtggatcatcggcgatccacggggcaagcaatgggcacgtgctcgagccgacgcctaactccgcttcacactcgacttctcccaccgcacttccgcggcgcaattcagccgaacgaacacacgatcacgttcgccgaaacaatggcgacgttcacatttcgatatccgtaacatcttgtgccggactcccgttcacgaaggcgtaatgcaaagcaggggtttccccgagtagcgcttggctccgcgcgatgcttcaaccatcggagcgaacgaaggagcggaagatgatagaatccttttccatcgctacggcgcatttgttccacgatgccttcgcttctcaggcgagattgagacatgatgtgttcgtggtgcggcggggcctggatcattcgagctacaacgggctcgagttcgacgaattcgatacgcctgcagcgaagtatctcgtgtggagagacgaagcacgggtcgtccgtgggctggcgcggctgctcccgacgattcgtccttacatgctgcagacctattggccacacctcgtcgcggacggtcgactcccgtcgtccgccgggatcttcgaggtcacccgagtgtgcgtcgacaagtcggtcgagccgagcgtgagacggaagatctttcccgaacttctctgtgccatccaggaggagttgaagtccatcggagggatcggaatggtgggcgtcacgcgcgagcacttgctgtcgcacttcattcgatacggcatcgactggctgggggctgccgatgaaatcgaaggcgaaatcgaacgcgcgttcttcgtgccgacggctttcatacggccggaacatcattgcttgaaatatggcataggacccaaggtcctgacgtcgccatcgcagatcgcggactacgtcacgagagcagcatgaggcgcttcgcagataaggcgtgccagcgaagggacaccgccgagaagatggcggacgccgtgctctatttgtgccgggtggccgcagcggaaggtttgaaggaagtgctttcggacctgctggaattgcgcagcaagctcgagcacatagcctcgcgcgaagagccttccggaaactccagaccccggggaagcggaaatgcacattgacgttttcgagcagaatgaatctgcggtccgttactactgcagaaaacttccgaatctgttcgtttcggcaaagggcgcattgatgaaggattcggaaggagacgaattcatagatttcatgtcggcctgcggtacgctcaactacgggcacaaccatccgaggctcaagtccgcagcgctcgactacctttcgcaggacggcatgatcgccgggctcgattttcacaccgcggccaagctccgtttcgtggagaccttcaagagaacggtgctcgatccccgcagactcgactacaaattccagtttcccggtccaaccggggccaattgcgtcgaagccgcgctgaagcttgcaaggaaagttaccggccgatccacggtcgtcgcgttcaccaatgcctttcacggcatgtcggccggcgccctgtcggtgacgggctcatcgatcagtcgatcggggcagcccctctgtgccgttcaccggctgccgttcgagggctatcgaggagcaggtatcgaagatctggagcgtttcgagacgatggccgtcgacccctcgggaggcatcgatccgatcgccgccattatcgtcgaaaccgttcaaggagaagggggactcaacgtcgcctcgaaccgctggctgcgcgcactatcgactatcgcaaaacggttgggagcgcttctcatcgtcgacgacatccaggcaggttgcggccgaacggggaccttcttcagtttcgagcgcgcggagataaagccggacatcgtctgcctcgccaaatcgatcggcggaatagggcttccgatgtcgcttcttctcctgaacccggacaacgacgtctggcgacccggcgagcacaacgggacctttcgcggcaacgcgctcgccttcgctacggcggccgaggcgctgctcctttgggaagacggatcgatggcggacgcctcgatgaacgcagaaatcctctcggaatggtgcgcctccatggccgaacgatcgaggggggcgatcaaggagaagggaatcggaatgatgaggggtctcgaattcgaggaaccatctatgtccgaagtctgcgcttcactcgcgcgcagacgccgcgtcctggtcgaatgttgtggtcctcgagacgaggtgctgaagatcatgccgccccttaacatagagccccatcttctccgccatggcctcgctcgcattgcggatgccgtctggagagcgctccatgcgccgaccgacgcctcaaagcggtatgagccctcgcttgatcccgattatgaccgcggtgatccgattgcccgcgccgagcttgcgcattccgttgcttaggtggaattccaccgtcttctccgaaatatcgaggatctctccgatctcccagttcgtcttcccctccttgcaccagcgcagacactcgagctcctgggcggtcagcgggcaagcctcgtacgtgcgctggtccgtcagctcgcaatacttgagccaatattggacggtcagcatgtagacatgagtcatccgatgggaaggcacgctcccgcgggcgcgaagactcagactgataaggtcgacctcctgcccaataccgtggatcggtatcgtcacgccagaatgtacgccgagctcacggcacttctcgaaaaacgacttctgttccttcgagaagccacgtccgtgagcgtcggaccagctgaatggacctcgggcggaatgcactcgctggacgaccggatcgatacggtcccattgctctgtgcggtaggtgtcgagatagccggccgggaattcgctccagggtatcgaaatgagacgcctgttgttggccctcgcaaagacggcgttctcgtagccttcctccgtcaccgccccaagaaacatcttcttcagctggctcgtcgacgcaacgtgctgggtgcgttctatgaaggtttcaacgtctgtgcccatgctctttctcctcggccccgtgcagcatcaacccgattgcatcagaaattccatcatcgctgcattgaatggtttcgcagcctcccaatgggcagcatgccccgcctcaataaattgaggtcgtcccttccacaaattcctgaagccgattcgttcgaagtaatccaatctcagaaaggggtccttacgcccttgcacgacggcaatgggccttgggacgctcgcgaccgcctcgacttgatcgacgccgcgcccggccaatgcgttggcgaccatccatacacgtgcgtttccgtccgtccggcgcgccatcctggcaaagtgatggccgtgggatagcgtcgctcccatcatggcgttgacgtaacggcgcgcgtcctcgggccggaaatatttgcggccagcaagtgacgtcgtcccgctccagcgaaagccttggccgatgctccgcgcgtccagacgaacaggcggtgttcccgtgatcagcagcgacctcaccgaggcatcgcgggcccaaagttcgagcccgatgtgtccgcccaaagaccacccgactacatggaacgagtggtagccgaggagtgccatcaggcgtcccagcgcgcgcgcgtacccgggaaagctgtaggtgctcgacggacgggcggagttctccgatcctccgtgccctggcagatccggcacaacgatgccgaattccgtcttctcaagatctccaaattggcggacgaatacttccttgcacgacgaattgccgtggatgagaaggaccccggtgcgtcccgcgcgtcgatgccagaaacacagctgttcgccgcctataatgcaggtacgcgaaaacattgaaaaataatcccgccaaagaggctgctattcccgcggaaatcagattagtccgacagactgcaatttatgattgctttcatggtacatgcccgccgtatcgggtcaagctggatttgtaaaaagaagccgagccaatccacgaggacgcataggtcggaggctgcgcgggccgcgagcgccgaaccaccgagattgcctccggcgccgatacgttttcgacgaaaatgcacaacgccaagctcgggacatcctttcagcgatgatgagcgcgacgagatcagaggcgccgcctgtgggaaacgccacgatcatctgaatgggccggaacgggtgcatctgcgcccgagcgacgaaagaccaaacaggagtagcgagcgaaccaacgagaaccgcgcgacgggaaatggtcatgtctttatcttcttccgattttggtgtgccatcatgcctcgggttgcaggggcgtgcctaagccgagctgcgtttgatttgtcggttcatgctgacgaacaatcgttcggaagcgggcggctttccgacgttcttcgcggtttgcccgtctagccgacgttcgcgctctcagtgactccgtggcttgcgcagcacgccgatcgccaccagcaggccggtgctgaccagggccaagcctgcgagctggagactgttcggaatctcgcctgtgataggcgcgcccatcaggatggcgatggctgggacgagggccggaaagactgcggcccgcccggcaccaagaatttgaacagccttcgagaaagcgatgacagcaacgacgcctgagagaacgccttgcaccaggatttgcgctgcgaccatcggcaacggagccgccaacagacgatctgctccgatcaccaggacgtagccgggaatgtagacaactgctgaaagcacggagaccacggcggttcctgcgaccggcgacaccccccagcggcggctgaggaccgtaaacactgcccacatcaggccggcagccgcaaatagcaggtcgccgatcggcgtcaatgccgtcccggtcatcaagccaggcccggcaatcacagcgagcccggcgaggattatggcgacacctacaacgcgcgcaatcgtcggcctatcacccaggaccagaaatgctagtccgatcgacccgagcgtcagcgctgccggctgaatgacggcaccatgggccagcggcgcgaatgaatagcctgacacaccggttataacgaagagcggcccgaccagcagtgtcaaggtggcgcccttcatcatgcccatgccggccatgtccatgaccccgcgcctcaacaaccacggcagcattatcaatcccgcgacaccgtaccggatcgcggcgatgtcggtggcgtggagacccgccgatacgccggcgcgcgccatagccagataggagccccagatgctcgcggcgagcaagccgagcgcaaggccgcgcacctccggccgatcgcgcaaagccacccgcgaaggcacgctcggtacagcaaccgtggaaagggacgtgctcatgacaatctctcttattcttgagatctgagatcaggccaagatggcgatcttgcgcagcgccgagagcgctacggccggatccatccggttgcggtagtcgggatcgacgctcgcgagtgcgatacggccgcccctctcgatgacgtagcttgccggtattggcagcgaccactgtccgtccccgttgcgggtcggcaggtcgtgaccgaatttccggtaaagcgccttgatggctggcgagagttggaagcggatgccgagtgcatccgccagcgcaccgtctgtatcactcaacacgtcgaagctcagcgcgttcttctccgcggtcgtcaacgtgttgtcgggcgtctccggcgagatggcgacaaggcgggcgctaagcgccgtgatctcgggcagcgccttctggtaggcgcgcagttcgagattacagtaggggcaccagccgccgcgatagtaggtcacaacgagtgggccgctcgcgatcagagcgccgaggtcggtcgtgccaccgatttgattcggcagttgccttttcggaaactgtgcaccggtcttgagcgcgcgatcagccagggactgcagcgctgcattgtcgtcatcgacgagcttcgcggtctcagcgccgacgcgctcgcgccaggatgtcttgaaggtgtcgagttcggtctgcagggacatgatcgttctccggaatgttcgtggcaaaagaattgaagccggccgttgttcgatggggtgctcaggtcttggatgcggccatcatctgttggacgagcgcgctggcgctggccccttcgagcgcgagtccgtacccgacttcgcggacgatccgctctttcagcggttggatgaagtggatgcgcgtattgcggcgcgtcacctcgggttgcttgaggtattgctgcgccagatcacgggcgaccgcgacggcactgccggcgtccgtcagataattcacgacgccccatgctgctgcttcctcagccgtgaccggacgcgggctaaggaggaatgcctcggtccggcccgctccagcgcgatatgcccacgtcgtgtaaacgccgtctcctggaacgatcccgccggcgaagtgcggcagatcgtggaaagtcgccgtcttggcagcaacgattacgttggcgagcagcgcatactcggtgtggatgtgcgccttgccctcgatggcggcaatcatcggcacgcgaatgttggcgatgttctccaggatctgggtgccttcgtcatgcactttcgaccatacattggcgtcgccgacattgccgaagctgccgaagtcgatttcggccatgtagtcgccgacgccggtcaggataacaaccttgtttccacggtcgcggctgatctcgtaaaaggcgtccgtgaacccctcatggtcgcgcgcatcgaatttgatggggccgccgctcgtgtgcatctcgaccagcaagatgccgtctgcgtcccggctcatgcggaggtgggcgtagcggctaaaataggccggcactgagttgttttcggcgctcatgatgatctccgtagcgttgcgtactggcagcgctgtcgccctgtccatcaatgaaccatgtttaaaacttgcggaacgcccagcgaactcatatcattgatacgaaaggcgtatgaatgatatggacctactcagcccgatgaggacgttcgtccgcgtggtcgaagccggcagcttcaccgcggtcgccatggaacagaactcgactcaaccgacgatcagccggcagatcgcagcgcttgaggagcatctcggttcgcgccttctcacccgcacgacgcgtgccctgacgctgactgacgacggccgcgcattctacgagcatgcgctacgcgctttggaggccgtcggcgaggccgaaaatgcggtcggccggcggcaagcgaagcccacggggacgctgcgtctcgccgtgccggtggtgctcggccgtcgacatatcgtgccacgcctcgccagcttcctctcgcgctattcagatctgtcgatcgacttgacgatgagcgatagcttcgtcgatctcgtcgagcagggcatcgacctggcgttacgcgttggcgagatcaccgaccagagcctggttgcgcgcaagatcggcatggtgcgccgggttacggtagcctcaccggcctatctcaaggcgcacggcataccacgtgcgcctgccgacctcgcacgccatcagtgcatcgtctacacgcgcctcgccaccggcaatcgatggcactttgagagcaaggatggtccgcagatggtgactgtctcgggccgctatcgcgtcgataactcggaagccgtgcgtgagggcgtgcttgccggcctcggcgtagccgtcattccggcattcgcgttctcgaatgaagtggcgcacaaacaggtgcaagttctgctcaggtcatacgagcccaagcctctgccgctcaatgccgtgtacccgtcacgccgcttcgtcccgcttaaggtgcgagcaatgatcgatttcctggccaacgaacttgagatcgatccggtgctcagtcgctacggcatatccgcagactgagcgccagcatgcccgccagcagcagacccgcccagtcgagtagattgcgtcgaagcggatctctcttcctggccccgtcgccaacatgtatcgcgcgtgcaaatccccgctttgcgtggcggagcggactagcaactaatgaattgacgaggtcgcctgtctactcgaaggctgaagaccggccggtcctgaaacggaccaatgaggtccgtgaggttcaagtgggcggcccaatcagggccagggctgcacgcgatctctcccccagcagcctccgtcatctgtgtgaagctatgactagtctctttagaccgcgcagcaccaggcttagtttccatttcaattgtgcctccggcattgcgattgtcatgccgggaaagcttcgcagcagggcgttgaaggcgacgcgacctcccatccgggcgagagccgcgccgacgcaatagtgtccgccctctccgaacgtgagatgccggtcgctcttcctgtcgaaatcaagcgcatcaggtgcctcaatgtgccggtcgtcacgattgccgacgcggccgagccaagcacgatgtcacctcgcgcaacccgggatcccgccagttcgatcctagtgcgggcgtagcggagcgtggtcgcttccgcggggccgtcaaagcgaagtagctcctctacggagcggctggcgatgtcgggctcggccgcaagcgctcgcgcctgcggatgctttaagagggccaacgttccgttgccgatcgtatttgtggtcggctcgtgtccagcagacagcagaatggcgattatggcttgaactcctcgccactgagccggtcgccctcggcttcgatcgcaaccagcgcggatatgagatcatcagcggggtgggcccgcttcaaggtgcgcgaacgacttgaacctcgagtttctcgaccgagcgcaacacatttacgcgctcgcacccgaggagcccattggaaatcctgtggaaggtcgcgttctgctatccaggcgcttcctaccgccaactacctgcacctcatattgcgaagtgctgatcgcagatgacacgaccgctgcagccggcaacttggacgcccttaggttccgagctgtgagactgggagcattcgcaacggtttgatttcctttagcacaaacgtggtctgcatttccttgatgcgcggcaaccggcgcaccacggtcatcgcgaaatcggcaaacgtatccaggtcgcgtgcaacgacttgcagcaggaaatcggcgttccctgcgattgagtagcaggccactacttcatcgagtttcaggacgtcttcttcgaaacgctgcgcttcagtctccgaatggctgtcgatttgcacgcggatgaaggccaatacccccaggccgagcttcctgcggtcgatgatcgcttgataccccttgataatgccggcgtcctcgagacgccgcactcgccgccagcaaggcgaggtcgacataccgacctgcaccgcgaggtcctggttcgtcaagcgcccctccgtctggagcgccgatatgatccgcaagtctccttggtcgagtgccggcataacctacctcgctggacgtatacccaggtagactctacccaaaattcgttttcgcgccagcaattcgaaaacctctacccgccgtaccgcgctaggcttgaacctgtggtcgggagctagtgcggttcatccaggccactgcccgcggccgtccgcttgtgaggagagagtgtgacattgatcggcttcaccccgccttacacttcaacaggcaagtcctccctcgtgccggcgccgccgtggcactatgcaggccaagtcctgtccatcgttttcgaggtcgaccgagccgcggcaggctccttgctcccgcagagttttgggcccccaacaggtcgcgcctacggacacttttgcgagtggcaggccaccacggatggctccgagctcctcgatccggtctacgctcaatataaggaattctttgcgctgatcgaagccgagcacccggccgcagacggcccggtcttgttctgccccttcatttatgtcgaccaggatatttccatggtgcgcggccttctccaggggtggcccaagaagatgggtagcgtgtggatgaccagatcttacgagctcgatcatcccgcggccgcgccccggcgtcgaggctcgcgcttgggcgcttcgttgagcgtgaaggaccatcgcctcgccgaggccgcggcgacactgacgggcgcggaggccgatccggtgggctttctggcgctgcccaccttcggcgcggtcggcgagccgacgctgatcggcaagccgagccccggccgttgcaccctggttcgggccgccgtcccctcgaaggtgtctggccccgtgcttggggcggaggccaccctgcgcctctttccgagcccccgcgacgagctcgacacgctcgcgcccgtcagggtatcgggggccacgttctcgaccttcggcctcaccgtcgtgggcgccgtgccggctggagccgcgccgtgacctcggggctcggcatggcctccgatggcttgcgcgttgcagtcgtcgttgaccccgcgttgcctgcgggggtgctcgctaataccgtcgccactgtcgccatcgggcttggggcggcgcggcctatccttggcgacgcggcgttgcgcgatgcggccggccgcatgttccggtgcagcgctaacaggcccgtgccggtgttgcaggctccgggcgaggcaatccgtgcgttgatgctcaaggcgcttcccgcgccggggagtgggctggtcgtgccgttcccgcgcttcgcccgctcgatccaggtctttgaggactatctggcccgcctgaccgctacaaatctggcggatgaggccatcgagggacttggccttgtcgggcccgacaagtgggtccggtcc
